United States Patent Application Publication US 2007/0105114 A1 - sequence listing, part 2

SEQ ID NO: 1439 - DNA, 2213 bp, Homo sapiens
ggcacgagggagcggtgcggaggctctgctcggatcgaggtctgcagcgcagcttcgggagcatgagtgctgcagtgactgcagggaagctggcacgggcaccggccgaccctgggaaagccggggtccccggagttgcagctcccggagctccggcggcggctccaccggcgaaagagatcccggaggtcctagtggacccacgcagccggcggcgctatgtgcggggccgctttttgggcaagggcggctttgccaagtgcttcgagatctcggacgcggacaccaaggaggtgttcgcgggcaagattgtgcctaagtctctgctgctcaagccgcaccagagggagaagatgtccatggaaatatccattcaccgcagcctcgcccaccagcacgtcgtaggattccacggctttttcgaggacaacgacttcgtgttcgtggtgttggagctctgccgccggaggtctctcctggagctgcacaagaggaggaaagccctgactgagcctgaggcccgatactacctacggcaaattgtgcttggctgccagtacctgcaccgaaaccgagttattcatcgagacctcaagctgggcaaccttttcctgaatgaagatctggaggtgaaaataggggattttggactggcaaccaaagtcgaatatgacggggagaggaagaagaccctgtgtgggactcctaattacatagctcccgaggtgctgagcaagaaagggcacagtttcgaggtggatgtgtggtccattgggtgtatcatgtataccttgttagtgggcaaaccaccttttgagacttcttgcctaaaagagacctacctccggatcaagaagaatgaatacagtattcccaagcacatcaaccccgtggccgcctccctcatccagaagatgcttcagacagatcccactgcccgcccaaccattaacgagctgcttaatgacgagttctttacttctggctatatccctgcccgtctccccatcacctgcctgaccattccaccaaggttttcgattgctcccagcagcctggaccccagcaaccggaagcccctcacagtcctcaataaaggcttggagaaccccctgcctgagcgtccccgggaaaaagaagaaccagtggttcgagagacaggtgaggtggtcgactgccacctcagtgacatgctgcagcagctgcacagtgtcaatgcctccaagccctcggagcgtgggctggtcaggcaagaggaggctgaggatcctgcctgcatccccatcttctgggtcagcaagtgggtggactattcggacaagtacggccttgggtatcagctctgtgataacagcgtgggggtgctcttcaatgactcaacacgcctcatcctctacaatgatggtgacagcctgcagtacatagagcgtgacggcactgagtcctacctcaccgtgagttcccatcccaactccttgatgaagaagatcaccctccttaaatatttccgcaattacatgagcgagcacttgctgaaggcaggtgccaacatcacgccgcgcgaaggtgatgagctcgcccggctgccctacctacggacctggttccgcacccgcagcgccatcatcctgcacctcagcaacggcagcgtgcagatcaacttcttccaggatcacaccaagctcatcttgtgcccactgatggcagccgtgacctacatcgacgagaagcgggacttccgcacataccgcctgagtctcctggaggagtacggctgctgcaaggagctggccagccggctccgctacgcccgcactatggtggacaagctgctgagctcacgctcggccagcaaccgtctcaaggcctcctaatagctgccctcccctccggactggtgccctcctcactcccacctgcatctggggcccatactggttggctcccgcggtgccatgtctgcagtgtgccccccagccccggtggctgggcagagctgcatcatccttgcaggtgggggttgctgtgtaagttatttttgtacatgttcgggtgtgggttctacagccttgtccccctccccctcaaccccaccatatgaattgtacagaatatttctattgaattcggaactgtcctttccttggctttatgcacattaaacagatgtgaatattcaaaaaaaaaaaaaaaaaaaaaaaaaaaaaaaaaaa

SEQ ID NO: 1440 - protein, 603 aa, Homo sapiens
MSAAVTAGKLARAPADPGKAGVPGVAAPGAPAAAPPAKEIPEVLVDPRSRRRYVRGRFLGKGGFAKCFEISDADTKEVFAGKIVPKSLLLKPHQREKMSMEISIHRSLAHQHVVGFHGFFEDNDFVFVVLELCRRRSLLELHKRRKALTEPEARYYLRQIVLGCQYLHRNRVIHRDLKLGNLFLNEDLEVKIGDFGLATKVEYDGERKKTLCGTPNYIAPEVLSKKGHSFEVDVWSIGCIMYTLLVGKPPFETSCLKETYLRIKKNEYSIPKHINPVAASLIQKMLQTDPTARPTINELLNDEFFTSGYIPARLPITCLTIPPRFSIAPSSLDPSNRKPLTVLNKGLENPLPERPREKEEPVVRETGEVVDCHLSDMLQQLHSVNASKPSERGLVRQEEAEDPACIPIFWVSKWVDYSDKYGLGYQLCDNSVGVLFNDSTRLILYNDGDSLQYIERDGTESYLTVSSHPNSLMKKITLLKYFRNYMSEHLLKAGANITPREGDELARLPYLRTWFRTRSAIILHLSNGSVQINFFQDHTKLILCPLMAAVTYIDEKRDFRTYRLSLLEEYGCCKELASRLRYARTMVDKLLSSRSASNRLKAS

SEQ ID NO: 1441 - DNA, 8265 bp, Homo sapiens
gcctccacacggctccgtcgggcgccgcgctcttccggcagcggtacgtttggagacgccgggaacccgcgttggcgtggttgactagtgcctcgcagcctcagcatgggggaacatggcctggagctggcttccatgatccccgccctgcgggagctgggcagtgccacaccagaggaatataatacagttgtacagaagccaagacaaattctgtgtcaattcattgaccggatacttacagatgtaaatgttgttgctgtagaacttgtaaagaaaactgactctcagccaacctccgtgatgttgcttgatttcatccagcatatcatgaaatcctccccacttatgtttgtaaatgtgagtggaagccatgagcgcaaaggcagttgtattgaattcagtaattggatcataacgagacttctgcggattgcagcaactccctcctgtcatttgttacacaagaaaatctgtgaagtcatctgttcattattatttctttttaaaagcaagagtcctgctatttttggggtactcacaaaagaattattacaactttttgaagacttggtttacctccatagaagaaatgtgatgggtcatgctgtggaatggccagtggtcatgagccgatttttaagtcaattagatgaacacatgggatatttacaatcagctcctttgcagttgatgagtatgcaaaatttagaatttattgaagtcactttattaatggttcttactcgtattattgcaattgtgttttttagaaggcaagaactcttactttggcagataggttgtgttctgctagagtatggtagtccaaaaattaaatccctagcaattagctttttaacagaactttttcagcttggaggactaccagcacaaccagctagcacttttttcagctcatttttggaattattaaaacaccttgtagaaatggatactgaccaattgaaactctatgaagagccattatcaaagctgataaagacactatttccctttgaagcagaagcttatagaaatattgaacctgtctatttaaatatgctgctggaaaaactctgtgtcatgtttgaagacggtgtgctcatgcggcttaagtctgatttgctaaaagcagctttgtgccatttactgcagtatttccttaaatttgtgccagctgggtatgaatctgctttacaagtcaggaaggtctatgtgagaaatatttgtaaagctcttttggatgtgcttggaattgaggtagatgcagagtacttgttgggcccactttatgcagctttgaaaatggaaagtatggaaatcattgaggagattcaatgccaaactcaacaggaaaacctcagcagtaatagtgatggaatatcacccaaaaggcgtcgtctcagctcgtctctaaacccttctaaaagagcaccaaaacagactgaggaaattaaacatgtggacatgaaccaaaagagcatattatggagtgcactgaaacagaaagctgaatcccttcagatttcccttgaatacagtggcctaaagaatcctgttattgagatgttagaaggaattgctgttgtcttacaactgactgctctgtgtactgttcattgttctcatcaaaacatgaactgccgtactttcaaggactgtcaacataaatccaagaagaaaccttctgtagtgataacttggatgtcattggatttttacacaaaagtgcttaagagctgtagaagtttgttagaatctgttcagaaactggacctggaggcaaccattgataaggtggtgaaaatttatgatgctttgatttatatgcaagtaaacagttcatttgaagatcatatcctggaagatttatgtggtatgctctcacttccatggatttattcccattctgatgatggctgtttaaagttgaccacatttgccgctaatcttctaacattaagctgtaggatttcagatagctattcaccacaggcacaatcacgatgtgtgtttcttctgactctgtttccaagaagaatattccttgagtggagaacagcagtttacaactgggccctgcagagctcccatgaagtaatccgggctagttgtgttagtggattttttatcttattgcagcagcagaattcttgtaacagagttcccaagattcttatagataaagtcaaagatgattctgacattgtcaagaaagaatttgcttctatacttggtcaacttgtctgtactcttcacggcatgttttatctgacaagttctttaacagaacctttctctgaacacggacatgtggacctcttctgtaggaacttgaaagccacttctcaacatgaatgttcatcttctcaactaaaagcttctgtctgcaagccattccttttcctactgaaaaaaaaaatacctagtccagtaaaacttgctttcatagataatctacatcatctttgtaagcatcttgattttagagaagatgaaacagatgtaaaagcagttcttggaactttattaaatttaatggaagatccagacaaagatgttagagtggcttttagtggaaatatcaagcacatattggaatccttggactctgaagatggatttataaaggagctttttgtcttaagaatgaaggaagcatatacacatgcccaaatatcaagaaataatgagctgaaggataccttgattcttacaacaggggatattggaagggccgcaaaaggagatttggtaccatttgcactcttacacttattgcattgtttgttatccaagtcagcatctgtctctggagcagcatacacagaaattagagctctggttgcagctaaaagtgttaaactgcaaagttttttcagccagtataagaaacccatctgtcagtttttggtagaatcccttcactctagtcagatgacagcacttccgaatactccatgccagaatgctgacgtgcgaaaacaagatgtggctcaccagagagaaatggctttaaatacgttgtctgaaattgccaacgttttcgactttcctgatcttaatcgttttcttactaggacattacaagttctactacctgatcttgctgccaaagcaagccctgcagcttctgctctcattcgaactttaggaaaacaattaaatgtcaatcgtagagagattttaataaacaacttcaaatatattttttctcatttggtctgttcttgttccaaagatgaattagaacgtgcccttcattatctgaagaatgaaacagaaattgaactggggagcctgttgagacaagatttccaaggattgcataatgaattattgctgcgtattggagaacactatcaacaggtttttaatggtttgtcaatacttgcctcatttgcatccagtgatgatccatatcagggcccgagagatatcatatcacctgaactgatggctgattatttacaacccaaattgttgggcattttggctttttttaacatgcagttactgagctctagtgttggcattgaagataagaaaatggccttgaacagtttgatgtctttgatgaagttaatgggacccaaacatgtcagttctgtgagggtgaagatgatgaccacactgagaactggccttcgattcaaggatgattttcctgaattgtgttgcagagcttgggactgctttgttcgctgcctggatcatgcttgtctgggctcccttctcagtcatgtaatagtagctttgttacctcttatacacatccagcctaaagaaactgcagctatcttccactacctcataattgaaaacagggatgctgtgcaagattttcttcatgaaatatattttttacctgatcatccagaattaaaaaagataaaagccgttctccaggaatacagaaaggagacctctgagagcactgatcttcagacaactcttcagctctctatgaaggccattcaacatgaaaatgtcgatgttcgtattcatgctcttacaagcttgaaggaaaccttgtataaaaatcaggaaaaactgataaagtatgcaacagacagtgaaacagtagaacctattatctcacagttggtgacagtgcttttgaaaggttgccaagatgcaaactctcaagctcggttgctctgtggggaatgtttaggggaattgggggcgatagatccaggtcgattagatttctcaacaactgaaactcaaggaaaagattttacatttgtgactggagtagaagattcaagctttgcctatggattattgatggagctaacaagagcttaccttgcgtatgctgataatagccgagctcaagattcagctgcctatgccattcaggagttgctttctatttatgactgtagagagatggagaccaacggcccaggtcaccaattgtggaggagatttcctgagcatgttcgggaaatactagaacctcatctaaataccagatacaagagttctcagaagtcaaccgattggtctggagtaaagaagccaatttacttaagtaaattgggtagtaactttgcagaatggtcagcatcttgggcaggttatcttattacaaaggttcgacatgatcttgccagtaaaattttcacctgctgtagcattatgatgaagcatgatttcaaagtgaccatctatcttcttccacatattctggtgtatgtcttactgggttgtaatcaagaagatcagcaggaggtttatgcagaaattatggcagttctaaagcatgacgatcagcataccataaatacccaagacattgcatctgatctgtgtcaactcagtacacagactgtgttctccatgcttgaccatctcacacagtgggcaaggcacaaatttcaggcactgaaagctgagaaatgtccacacagcaaatcaaacagaaataaggtagactcaatggtatctactgtggattatgaagactatcagagtgtaacccgttttctagacctcataccccaggatactctggcagtagcttcctttcgctccaaagcatacacacgagctgtaatgcactttgaatcatttattacagaaaagaagcaaaatattcaggaacatcttggatttttacagaaattgtatgctgctatgcatgaacctgatggagtggccggagtcagtgcaattagaaaggcagaaccatctctaaaagaacagatccttgaacatgaaagccttggcttgctgagggatgccactgcttgttatgacagggctattcagctagaaccagaccagatcattcattatcatggtgtagtaaagtccatgttaggtcttggtcagctgtctactgttatcactcaggtgaatggagtgcatgctaacaggtccgagtggacagatgaattaaacacgtacagagtggaagcagcttggaaattgtcacagtgggatttggtggaaaactatttggcagcagatggaaaatctacaacatggagtgtcagactgggacagctattattatcagccaaaaaaagagatatcacagctttttatgactcactgaaactagtgagagcagaacaaattgtacctctttcagctgcaagctttgaaagaggctcctaccaacgaggatatgaatatattgtgagattgcacatgttatgtgagttggagcatagcatcaaaccacttttccagcattctccaggtgacagttctcaagaagattctctaaactgggtagctcgactagaaatgacccagaattcctacagagccaaggagcctatcctggctctccggagggctttactaagcctcaacaaaagaccagattacaatgaaatggttggagaatgctggctgcagagtgccagggtagctagaaaggctggtcaccaccagacagcctacaatgctctccttaatgcaggggaatcacgactcgctgaactgtacgtggaaagggcaaagtggctctggtccaagggtgatgttcaccaggcactaattgttcttcaaaaaggtgttgaattatgttttcctgaaaatgaaaccccacctgagggtaagaacatgttaatccatggtcgagctatgctactagtgggccgatttatggaagaaacagctaactttgaaagcaatgcaattatgaaaaaatataaggatgtgaccgcgtgcctgccagaatgggaggatgggcatttttaccttgccaagtactatgacaaattgatgcccatggtcacagacaacaaaatggaaaagcaaggtgatctcatccggtatatagttcttcattttggcagatctctacaatatggaaatcagttcatatatcagtcaatgccacgaatgttaactctatggcttgattatggtacaaaggcatatgaatgggaaaaagctggccgctccgatcgtgtacaaatgaggaatgatttgggtaaaataaacaaggttatcacagagcatacaaactatttagctccatatcaatttttgactgctttttcacaattgatctctcgaatttgtcattctcacgatgaagtttttgttgtcttgatggaaataatagccaaagtatttctagcctatcctcaacaagcaatgtggatgatgacagctgtgtcaaagtcatcttatcccatgcgtgtgaacagatgcaaggaaatcctcaataaagctattcatatgaaaaaatccttagagaagtttgttggagatgcaactcgcctaacagataagcttctagaattgtgcaataaaccggttgatggaagtagttccacattaagcatgagcactcattttaaaatgcttaaaaagctggtagaagaagcaacatttagtgaaatcctcattcctctacaatcagtcatgatacctacacttccatcaattctgggtacccatgctaaccatgctagccatgaaccatttcctggacattgggcctatattgcagggtttgatgatatggtggaaattcttgcttctcttcagaaaccaaagaagatttctttaaaaggctcagatggaaagttctacatcatgatgtgtaagccaaaagatgacctgagaaaggattgtagactaatggaattcaattccttgattaataagtgcttaagaaaagatgcagagtctcgtagaagagaacttcatattcgaacatatgcagttattccactaaatgatgaatgtgggattattgaatgggtgaacaacactgctggtttgagacctattctgaccaaactatataaagaaaagggagtgtatatgacaggaaaagaacttcgccagtgtatgctaccaaagtcagcagctttatctgaaaaactcaaagtattccgagaatttctcctgcccaggcatcctcctatttttcatgagtggtttctgagaacattccctgatcctacatcatggtacagtagtagatcagcttactgccgttccactgcagtaatgtcaatggttggttatattctggggcttggagaccgtcatggtgaaaatattctctttgattctttgactggtgaatgcgtacatgtagatttcaattgtcttttcaataagggagaaacctttgaagttccagaaattgtgccatttcgcctgactcataatatggttaatggaatgggtcctatgggaacagagggtctttttcgaagagcatgtgaagttacaatgaggctgatgcgtgatcagcgagagcctttaatgagtgtcttaaagacttttctacatgatcctcttgtggaatggagtaaaccagtgaaagggcattccaaagcgccactgaatgaaactggagaagttgtcaatgaaaaggccaagacccatgttcttgacattgagcagcgactacaaggtgtaatcaagactcgaaatagagtgacaggactgccgttatctattgaaggacatgtgcattaccttatacaagaagctactgatgaaaacttactatgccagatgtatcttggttggactccatatatgtgaaatgaaattatgtaaaagaatatgttaataatctaaaagtaatgcatttggtatgaatctgtggttgtatctgttcaattctaaagtacaacataaatttacgttctcagcaactgttatttctctctgatcattaattatatgtaaaataatatacattcagttattaagaaataaactgctttcttaataaaaaaaaaaaaaaaaaaaaaaaaaaaaaaaaaa

SEQ ID NO: 1442 - protein, 2644 aa, Homo sapiens
MGEHGLELASMIPALRELGSATPEEYNTVVQKPRQILCQFIDRILTDVNVVAVELVKKTDSQPTSVMLLDFIQHIMKSSPLMFVNVSGSHERKGSCIEFSNWIITRLLRIAATPSCHLLHKKICEVICSLLFLFKSKSPAIFGVLTKELLQLFEDLVYLHRRNVMGHAVEWPVVMSRFLSQLDEHMGYLQSAPLQLMSMQNLEFIEVTLLMVLTRIIAIVFFRRQELLLWQIGCVLLEYGSPKIKSLAISFLTELFQLGGLPAQPASTFFSSFLELLKHLVEMDTDQLKLYEEPLSKLIKTLFPFEAEAYRNIEPVYLNMLLEKLCVMFEDGVLMRLKSDLLKAALCHLLQYFLKFVPAGYESALQVRKVYVRNICKALLDVLGIEVDAEYLLGPLYAALKMESMEIIEEIQCQTQQENLSSNSDGISPKRRRLSSSLNPSKRAPKQTEEIKHVDMNQKSILWSALKQKAESLQISLEYSGLKNPVIEMLEGIAVVLQLTALCTVHCSHQNMNCRTFKDCQHKSKKKPSVVITWMSLDFYTKVLKSCRSLLESVQKLDLEATIDKVVKIYDALIYMQVNSSFEDHILEDLCGMLSLPWIYSHSDDGCLKLTTFAANLLTLSCRISDSYSPQAQSRCVFLLTLFPRRIFLEWRTAVYNWALQSSHEVIRASCVSGFFILLQQQNSCNRVPKILIDKVKDDSDIVKKEFASILGQLVCTLHGMFYLTSSLTEPFSEHGHVDLFCRNLKATSQHECSSSQLKASVCKPFLFLLKKKIPSPVKLAFIDNLHHLCKHLDFREDETDVKAVLGTLLNLMEDPDKDVRVAFSGNIKHILESLDSEDGFIKELFVLRMKEAYTHAQISRNNELKDTLILTTGDIGRAAKGDLVPFALLHLLHCLLSKSASVSGAAYTEIRALVAAKSVKLQSFFSQYKKPICQFLVESLHSSQMTALPNTPCQNADVRKQDVAHQREMALNTLSEIANVFDFPDLNRFLTRTLQVLLPDLAAKASPAASALIRTLGKQLNVNRREILINNFKYIFSHLVCSCSKDELERALHYLKNETEIELGSLLRQDFQGLHNELLLRIGEHYQQVFNGLSILASFASSDDPYQGPRDIISPELMADYLQPKLLGILAFFNMQLLSSSVGIEDKKMALNSLMSLMKLMGPKHVSSVRVKMMTTLRTGLRFKDDFPELCCRAWDCFVRCLDHACLGSLLSHVIVALLPLIHIQPKETAAIFHYLIIENRDAVQDFLHEIYFLPDHPELKKIKAVLQEYRKETSESTDLQTTLQLSMKAIQHENVDVRIHALTSLKETLYKNQEKLIKYATDSETVEPIISQLVTVLLKGCQDANSQARLLCGECLGELGAIDPGRLDFSTTETQGKDFTFVTGVEDSSFAYGLLMELTRAYLAYADNSRAQDSAAYAIQELLSIYDCREMETNGPGHQLWRRFPEHVREILEPHLNTRYKSSQKSTDWSGVKKPIYLSKLGSNFAEWSASWAGYLITKVRHDLASKIFTCCSIMMKHDFKVTIYLLPHILVYVLLGCNQEDQQEVYAEIMAVLKHDDQHTINTQDIASDLCQLSTQTVFSMLDHLTQWARHKFQALKAEKCPHSKSNRNKVDSMVSTVDYEDYQSVTRFLDLIPQDTLAVASFRSKAYTRAVMHFESFITEKKQNIQEHLGFLQKLYAAMHEPDGVAGVSAIRKAEPSLKEQILEHESLGLLRDATACYDRAIQLEPDQIIHYHGVVKSMLGLGQLSTVITQVNGVHANRSEWTDELNTYRVEAAWKLSQWDLVENYLAADGKSTTWSVRLGQLLLSAKKRDITAFYDSLKLVRAEQIVPLSAASFERGSYQRGYEYIVRLHMLCELEHSIKPLFQHSPGDSSQEDSLNWVARLEMTQNSYRAKEPILALRRALLSLNKRPDYNEMVGECWLQSARVARKAGHHQTAYNALLNAGESRLAELYVERAKWLWSKGDVHQALIVLQKGVELCFPENETPPEGKNMLIHGRAMLLVGRFMEETANFESNAIMKKYKDVTACLPEWEDGHFYLAKYYDKLMPMVTDNKMEKQGDLIRYIVLHFGRSLQYGNQFIYQSMPRMLTLWLDYGTKAYEWEKAGRSDRVQMRNDLGKINKVITEHTNYLAPYQFLTAFSQLISRICHSHDEVFVVLMEIIAKVFLAYPQQAMWMMTAVSKSSYPMRVNRCKEILNKAIHMKKSLEKFVGDATRLTDKLLELCNKPVDGSSSTLSMSTHFKMLKKLVEEATFSEILIPLQSVMIPTLPSILGTHANHASHEPFPGHWAYIAGFDDMVEILASLQKPKKISLKGSDGKFYIMMCKPKDDLRKDCRLMEFNSLINKCLRKDAESRRRELHIRTYAVIPLNDECGIIEWVNNTAGLRPILTKLYKEKGVYMTGKELRQCMLPKSAALSEKLKVFREFLLPRHPPIFHEWFLRTFPDPTSWYSSRSAYCRSTAVMSMVGYILGLGDRHGENILFDSLTGECVHVDFNCLFNKGETFEVPEIVPFRLTHNMVNGMGPMGTEGLFRRACEVTMRLMRDQREPLMSVLKTFLHDPLVEWSKPVKGHSKAPLNETGEVVNEKAKTHVLDIEQRLQGVIKTRNRVTGLPLSIEGHVHYLIQEATDENLLCQMYLGWTPYM

SEQ ID NO: 1443 - DNA, 6450 bp, Homo sapiens
cgcgctcgcggggggcggtggcgcccggcacagaggggttaagggggcggtgcagacgtctccccgcccatcccgcccctcgagagccgcggcgccccgccctatttatagcagcggtgcctagcgcgccgcgtctctccgcaggccccggccgcggcgtcctcgacaacctatcgaaggcgccatggagcgaccggcgcccctggccgtgcttcccttctcggaccccgcgcacgccctgagcctgctgcgcggcctgagccagctgcgcgccgagcgcaagttcctggacgtgaccctggaggcggcgggcgggcgcgacttcccggcgcaccgtgcggtgctggccgccgccagcccctacttccgcgccatgttcgcggggcagctgcgcgagagccgcgccgagcgggtgcgcctgcacggagtgcctcccgacatgctgcagctgctgctggacttcagctacacgggccgcgtggcggtaagcggcgacaacgctgagccgctgctgcgcgccgccgacctgctgcagttcccggccgtgaaggaggcgtgcggggccttcctgcagcagcagctcgacctggccaactgcctggacatgcaggacttcgctgaggccttcagctgctcgggactggcgagcgcggcgcagcggttcattctgcgccacgtgggcgagctgggcgccgagcagctggagcggctgccactggcgcgcctgctgcgctacctgcgggacgacgggctgtgtgtgcccaaggaggaggccgcctaccagctggcgctgcgctgggtccgcgctgacccgccgcgccgcgccgcgcactggccgcagctgctggaggccgtgcgcctgcccttcgtgcgccgcttctacctgttggcgcacgtcgaggccgagccgctggtggcgcgctgcccaccctgcctgcgcctgctgcgcgaggcgcgcgacttccaggcggcgcgctacgaccgccacgaccgcgggccctgtccccgaatgcgtcctcgcccgtccaccggtctcgccgagatcctcgtgctcgtgggcggctgcgaccaggactgtgacgagctggtcactgtcgactgctacaacccgcagacgggtcagtggcgctacctggccgagttcccagaccacctgggcggaggctacagcatcgtggcgctgggcaatgacatctacgtgacgggtgggtccgatggctcccggctctatgactgcgtgtggaggtacaactcaagcgtgaatgagtgggcggaggtggcgcccatgctgaaggcccgcgagtaccacagctcctctgtgctggacggactgctgtacgtggtggccgccgacagcaccgagcgctatgaccacaccactgactcctgggaggccctgcagcccatgacctaccccatggacaactgctccaccactgcgtgccgtggccggctctatgccatcggctccctggctggcaaggagaccatggtgatgcagtgctacgacccggacaccgacctgtggtcgctggtggactgcggccagctcccgccctggtccttcgcccccaagactgcgactctaaacggactcatgtactttgtcagggatgactccgctgaggtggacgtgtacaacccgacgaggaacgaatgggacaagatcccgtccatgaatcaggtaaattttcaggcgggccagcattggaagcacaggctggtcctgattttgcaacccaagtgtcatcgtgatgagtgtttgggatccacagccatgatggatgggtctcatctcaattaatagaaggctgctcttacccttattttgcacttaaggctcactgagacacagatgttaagtaataccctatgattacacagcttagtacacatttgagcagtgtttattgagtatctgctgtgagccagagagcagaaggaagtgagggagcaaggcatacagtcatctggggacacctgttccagagagggacagcaggtacagaggccctgcagcagggcaccctggcgtgttcttagatacaccagcagcccatgtggccggagcagagtcagcatgaggtctgtgacctaccttttttatttttgagacagggtcttgctctgtcacccaggctggagtgcagtggtacaatcatggctcactgcagcctccacctccttgactcgcagtcctcccaccgcaccttcctgaatagctgagactacaggcgtgtgccaccacacccagtaattttttttctcatatgtagatacaaaaggatattcttaaaatttttatagagacagggtcttgctgtgttacccaggctggtctcacactcctggcctcaagtgaccctcctgtctcagcctcccaaagtgctaggattataggcgtgaaccaccacgcccagctggttcctgaggaagtcagtgtgggaatactttttttttttttatacggagtctcgctctgtcacccaggctggagtgcagtggcacgatctcggctcactgcaagctccatctcccaggttcacgccattctcccgcctcaacctcccgagtagctgggactacaggtacccaccaccacgcccagctaattttgtttgtgtatttttagtagagacgggatttcactgtgttagccaggatggtctggatctcctgaccttgtgatctgcctggctcagcctcccaaagtgctgggattacaggcatgagccaccatgcccagcccactgtgggaatacttgtgttgagcacttgctgtgtgttctgaataggacaaccagggtccaccccttctctctgggcttgttgagaagaggggtgcccagcctgacagtgatgggacagggaggcttcagtgccatttggccatgtgagcagtgttagtctgaggtacacatcatattgcctacagccttctttcctgtgtgtctgttaacatttccaaacctacactccgtgacatccagcctcacagcttacatcacagcttaatgtcctggcatttaagagacccagcgttctgttttccccgcagtaagctgcacatagtcatagcgaatttgggaaagatggaaggaatcatccagcctcgcggttcagagcccagctctgccactgtcagccatgcaagcctcagttttcccatctgtaacatggggagaacagcactgctcagcccagagggccactgcagagattctgagagagaacgtaggaagcgctgctcggcacgacctgcacacggggaggcctggcgctgcagcgggcaccctcatcaccatagggaaggcccagctgcctccggggaggcccgttctcctaggcagggtgttggaaaggggttggcctctctgctgctttctgggagagccaaggccacccctctggggtactgacagggcatgccttgtctccagtggttccccaggtggggccctgccctaccctctcctctgacctccactcactcatccctttggcccacaggtacatgtggggggcagcctggccgtccttggggggaagctgtacgtctctgggggatacgacaatacatttgaactctcggacgtggtagaggcctatgacccagagactcgcgcgtggagcgtggtggggcggctcccagaacccaccttctggcatggcagtgtcagcatcttccgccagttcatgccccagaccttctcgggtgggcgtggcttcgagttggacagtggcagcgatgacatggacccaggccgaccccggccgccgcgggaccccgatgagctgcactagccccagtctggcccggcacgggcctcggtgcaggtaactggcacctctgcggggcagtgccccactcctttgtgcacaaggacacgttgggctcacaggaggagcacaggctcttgggtggcgaagccagcccaggatccattacctggaaggtttctgtaccttgagagcctgaatcagaggccgtcgggaacgccctccctgcagttgaggaagagccactttcctgccagcacatgtttctgggtcttggaggtcacccccaccccgcggatcacagctcacccacgcggcgcacacccctcctgccgttgtcatctgcacctacttgttcccaccttgggagaggacgatgacttgggagggacgcgtgaagggagaaggggtcctcccatgaggctgaggatggcctgaacctggagcagcggaccaggcagacgggctgaagtggggtcccaaattccatgtccagaggtgtggggagcctgcctccctagctcctggcccctgccaggggcttacatcaaaacacctcagagggctgccctccagaggctgcacccagaacagtgggacatgagcaggggtgtgggcttggagggtgaagaggatgtggtcctatcagatgctgggcctcctcagccatagccccctgctcctaccccctgactggctcttgcgtcctcacctctcaccctctccttcccgggaggccctgggaggtgatcattgacacccagccaagcagacagctgcgggtgcccaagcccttgctgggcctgcgcgtgaggagtcccactgcttctaaaggaagtcctgggcaggaggtggctttggtggttggttccaaagttgaaaatgcttgcagtttgaccttagaagaagtgggaagaagaaggagctctacagggtcagctttgtttgatttgtccagtctaagaagtcccattgccaaagctttctgcaggagggtgaatgccgcagcttggcagcccctgggtttctcttggaaatggtcagtttcccctcaaagtacccaaagtagccttggcttgagtttttgtccttgcctcctttttagagaagagggcatttagactgcattttcctggttaaagaaggttaaagcaaatgtttattgccttttctagtgaactaactcgtagagatgttctcagcaggaagacagtcttagcactgtcacttagcagattgcacttaagtcccttgtgctggccagatggcgtggctggttgccttaatatgtcccaggacccctgacagggctgcctggcctctccctcgtgctcctcaagagcccagtccatacactgtggatgtcattgctgtcgggttaggaagtcttgtcctagaacgccctggctggtatgaccacagttcatggcggctcttctcgcttgggtcatggtcatcttccagcacctgctgtgctgggaaggccgaggatgggggcccagcactgtccaggcctgctggggcctggctgggagtcctgtgggcagcatggaacatgcagctgggcttcctgtgaccaggcaccctctggcactgttgcttgccctgtgccctggaccttttcctgcccttctccttcctctgctcccttggggctaccccttggcccctcctggtctgtgcaaactccctcagggagcccccctgccctgtagctctcgcttaacttcctaggggctgctgagcccacccagaggttgttggagttcagcggggcagcttgtctcccttgtcagcaggggcgtaagggctgggtttggccatacaaggttggctacgccctcaatccctgaccgttccaggcactgagctgggcacccacggaaggacatgctgtccagactgtgatgactgccagcacagggcatctcgggcttggctggtctgcgaggccttgcccctgtggaactctgggttcctgttttctcagtcttttttgcggctttgctgtggttggcagctgccgtactccaggcttgtgtcggccactcagatgagggctgtggtgcgagccagtgcaggagagctgcgcttgggattgtgccctctcctgtgtctgtcctccggacctacccaggtctccaccatcaggaccctgtctttgggtttagaagaccaagtatggggaaaaccaggcaccagcctctgcagcaatgggtccctctagcctgtggacaccagctgggggatccagggtcaggccccctcctctccccagtttccctctgctgtgggttctgggctgtcatgtctccaccacttaaggatgtctttacactgacttcaggatagatgttgggatgcctgggcatggccacatgttacatgtacagaactttgtctacagcacaaattaagttatataaacacagtgactggtatttaatgctgatctactataaggtattctatatttatatgacttcagagacgcgtatgtaataaaggacgccctccctccagtgtccacatccagttcaccccagagggtcgggcaggttgacatatttatttttgtctattctgtaggcttccatgtccagaatcctgcttaaggttttagggtaccttcagtactttttgcaataaaagtatttcctatccatttgg

SEQ ID NO: 1444 - protein, 539 aa, Homo sapiens
MERPAPLAVLPFSDPAHALSLLRGLSQLRAERKFLDVTLEAAGGRDFPAHRAVLAAASPYFRAMFAGQLRESRAERVRLHGVPPDMLQLLLDFSYTGRVAVSGDNAEPLLRAADLLQFPAVKEACGAFLQQQLDLANCLDMQDFAEAFSCSGLASAAQRFILRHVGELGAEQLERLPLARLLRYLRDDGLCVPKEEAAYQLALRWVRADPPRRAAHWPQLLEAVRLPFVRRFYLLAHVEAEPLVARCPPCLRLLREARDFQAARYDRHDRGPCPRMRPRPSTGLAEILVLVGGCDQDCDELVTVDCYNPQTGQWRYLAEFPDHLGGGYSIVALGNDIYVTGGSDGSRLYDCVWRYNSSVNEWAEVAPMLKAREYHSSSVLDGLLYVVAADSTERYDHTTDSWEALQPMTYPMDNCSTTACRGRLYAIGSLAGKETMVMQCYDPDTDLWSLVDCGQLPPWSFAPKTATLNGLMYFVRDDSAEVDVYNPTRNEWDKIPSMNQVNFQAGQHWKHRLVLILQPKCHRDECLGSTAMMDGSHLN

SEQ ID NO: 1445 - DNA, 2995 bp, Homo sapiens
gcgggttcgagtcccgcctcctgactctggcctctagtccctgagtcccgggcgggctgcattcgtcggggaaacctctcctcgaccaggggcacctctactcgaccaggggcgacggcgtactttgggcttcatcatggaggactacctgcagggttgtcgagctgctctgcaggagtcccgacctctacatgttgtgctgggaaatgaagcctgtgatttggactccacagtgtctgctcttgccctggctttttacctagcaaagacaactgaggctgaggaagtctttgtgccagttttaaatataaaacgttctgaactacctctgcgaggtgacattgtcttctttcttcagaaggttcatattccagagagtatcttgatttttcgggatgagattgacctccatgcattataccaggctggccaactcaccctcatccttgtcgaccatcatatcttatccaaaagtgacacagccctagaggaggcagtagcagaggtgctagaccatcgacccatcgagccgaaacactgccctccctgccatgtttcagttgagctggtggggtcctgtgctaccctggtgaccgagagaatcctgcagggggcaccagagatcttggacaggcaaactgcagcccttctgcatggaaccatcatcctggactgtgtcaacatggaccttaaaattggaaaggcaaccccaaaggacagcaaatatgtggagaaactagaggcccttttcccagacctacccaagagaaatgatatatttgattccctacaaaaggcaaagtttgatgtatcaggactgaccactgagcagatgctgagaaaagaccagaagactatctatagacaaggcgtcaaggtggccattagtgcaatatatatggatttggaggcctttctgcagaggtctaacctccttgcagatctccatgctttctgccaggctcacagctatgatgtcctggttgccatgactatctttttcaacactcacaatgagccagtgcggcagttggctattttctgtccccatgtggcactccaaacaacgatctgtgaagtcctggaacgctcccactctccacccctgaagctgacccctgcctcaagtacccaccctaacctccatgcctatcttcaaggcaacacccaggtctctcgaaagaaacttctgcccctgctccaggaagccctgtcagcatattttgactccatgaagatcccttcaggacagcctgagacagcagatgtgtccagggagcaagtggacaaggaattggacagggcaagtaactccctgatttctggactgagtcaagatgaggaggaccctccgctgcccccgacgcccatgaacagcttggtggatgagtgccctctagatcaggggctgcctaaactctctgctgaggccgtcttcgagaagtgcagtcagatctcactgtcacagtctaccacagcctccctgtccaagaagtgactgttgagaggcgaggaggtagtgggtgaggctacctgactcacttcaaatgcatgttttgagatgtttggagattcagcaattctgtcttcattgctccaggatctggtatactgttctcataaaactgagaggagaaaaaaagtgaaagaaagcagctgctttaagaatggttttccaccttttccccctaatctctaccaatcagacacattttattatttaaatctgcacctctctctattttatttgccaggggcacgatgtgacatatctgcagtcccagcacagtgggacaaaaagaatttagaccccaaaagtgtcctcggcatggatcttgaacagaaccagtatctgtcatggaactgaacattcatcgatggtctccatgtattcatttattcacttgttcattcaagtatttattgaatacctgcctcaagctagagagaaaagagagtgcgctttggaaatttattccagttttcagcctacagcagattatcagctcggtgacttttctttctgccaccatttaggtgatggtgtttgattcagagatggctgaatttctattcttagcttattgtgactgtttcagatctagtttgggaacagattagaggccattgtcttctgtcctgatcaggtggcctggctgtttctttggatccctctgtcccagagccacccagaaccctgactcttgagaatcaagaaaacacccagaaaggccttaatgacctcataggcactcttccaaaaagacaacagaactggaatgagaggcctgggtctgtctcctgccttagcaggcctatcaatttcttgtcaatctctttttttccttgctcacattaaaaggaagcatggagttctaatgctcccataaactatgtattttggcaagacacttcactactccaggtctcactttccccatctgtaaaacagggtttggactaggtgttccctggtattctgtgatctgcctcttgctgccattctttctctcctctgcttctctgtatttttcttctgttatccctgggggtgctcaggttcacttgattgtctgtatttctgtgtggttgtagcaaggactcagcctcatgtagcacgaataggggtgtggttcatggcgtgttgacccagcagagcactccctcccactaacttgttctgcatgtgtagagtctccccattttttttaacgcaaccctttcccctttttcctaccccacagctctgttccatgtaagttgccaacagtttcactgaacagtggggtatgtgatggttttggcatgacatcttcagtatgagggggacagtttgacttcactttgagggtgtgatgtctgtagctatgtggaaggtaaaaatagtggtgtgatcatgaaccaaaggaatttatgttttgtaacttgggtactttattttgcattttgttatactattaaataattttttcctgttaaaaaaaaaaaaaaaaaa

SEQ ID NO: 1446 - protein, 453 aa, Homo sapiens
MEDYLQGCRAALQESRPLHVVLGNEACDLDSTVSALALAFYLAKTTEAEEVFVPVLNIKRSELPLRGDIVFFLQKVHIPESILIFRDEIDLHALYQAGQLTLILVDHHILSKSDTALEEAVAEVLDHRPIEPKHCPPCHVSVELVGSCATLVTERILQGAPEILDRQTAALLHGTIILDCVNMDLKIGKATPKDSKYVEKLEALFPDLPKRNDIFDSLQKAKFDVSGLTTEQMLRKDQKTIYRQGVKVAISAIYMDLEAFLQRSNLLADLHAFCQAHSYDVLVAMTIFFNTHNEPVRQLAIFCPHVALQTTICEVLERSHSPPLKLTPASSTHPNLHAYLQGNTQVSRKKLLPLLQEALSAYFDSMKIPSGQPETADVSREQVDKELDRASNSLISGLSQDEEDPPLPPTPMNSLVDECPLDQGLPKLSAEAVFEKCSQISLSQSTTASLSKK

SEQ ID NO: 1447 - DNA, 4650 bp, Homo sapiens
atgagcctttcattttgtggtaacaacatttcttcatataatatcaacgatggtgtactacaaaattcctgctttgtggatgccctcaacctggtccctcatgtctttctgttgtttatcacttttccaatattgtttattgggtgggggagccaaagctcaaaagtacaaattcaccacaacacatggcttcattttccgggacataacctgagatggattcttacattcgctctcctgtttgtgcatgtctgtgaaatagcagaaggcattgtttcagactcgcggcgggaatcaaggcacctccacctctttatgccagccgtgatgggattcgttgccactacaacatcgatagtgtattatcataatatcgaaacatcaaattttcctaaattacttttagccctgttcctgtattgggtaatggcctttattacaaaaacaataaaattggttaagtactgtcagtctggcttggacatatcaaacctgcgtttctgcatcacaggcatgatggtcatcttgaatgggctcttgatggctgtggagatcaatgtcattcgagtcaggagatatgtatttttcatgaatcctcagaaagtaaagcctcctgaagacctccaggatctgggagtgagatttcttcaaccatttgtgaatttgctgtcaaaagcaacatactggtggatgaacacacttattatatctgctcacaaaaagcctattgatctgaaggcaattggaaaattgccaatagcaatgagagcagtaacaaattatgtttgcctgaaagatgcatatgaagaacaaaagaaaaaagttgcagatcatccaaatcggactccatctatatggcttgcaatgtacagagcttttgggcgaccaattctacttagtagcacattccgctatctggctgatttactgggttttgctggacctctttgtatttctggaatagttcagcgtgtgaatgaaacccagaatgggacaaataacacaactggaatttcagaaaccctctcatcaaaggaatttcttgaaaacgcttacgttctagcagttcttctcttcttggctcttattctgcaaaggacatttttgcaggcttcctactatgtaaccatagagactggcattaacctccgtggagctctgctggccatgatttataataaaatccttaggctctctacgtctaacttatccatgggggagatgactctggggcagatcaacaacttagtcgccattgaaactaatcaactcatgtggtttttgttcctgtgtcccaatctatgggctatgcctgttcagatcataatgggcgtgattctgctctataatttacttggatcaagtgcattggtcggtgcagctgtcattgtgctccttgcgccaattcagtactttattgctacaaagttggcagaggctcagaaaagtacacttgattattccactgagagactcaagaaaacaaatgaaatattgaaaggcatcaaacttctaaaattgtatgcctgggaacacattttctgcaaaagtgtggaggaaacaagaatgaaagaactatctagtctcaaaacctttgcactatatacatcactctccatcttcatgaatgcagcaattcccatagcagctgttcttgctacatttgtgacccatgcgtatgccagtggaaacaatctgaaacctgcagaggcctttgcttcactgtctctcttccatatcctggtcacaccactgtccctgctcttcacggtggtcagatttgcagtcaaagccatcataagtgttcaaaagctgaatgagtttctcttgagtgatgagattggtgacgacagttggcgaactggtgaaagttcgcttccttttgagtcctgtaagaagcacactggagttcagccaaaaactataaacaggaaacagcctggaagatatcacctggacagctatgagcaatcaacacggcgtctacgtcccgcagaaacagaggacattgcaataaaggtcacaaatggatacttttcatggggcagtggtttagctacattatccaatatagatattcgaattccaacaggtcagttaaccatgattgtgggccaagtaggatgtgggaagtcctctcttctccttgccatcctcggtgagatgcagacattggaaggaaaagttcactggagcaatgtaaatgaatctgagccttcttttgaagcaaccagaagtaggaacaggtactctgtggcatatgcagctcaaaagccttggctattaaatgctacagtagaagaaaatattacttttggaagtccttttaacaaacagaggtacaaagctgtcacagatgcctgttctcttcagccagatattgacttattaccatttggagatcaaactgaaattggagagaggggcatcaacctgagtgggggacagaggcagagaatctgtgtggcacgagcgctgtatcaaaacaccaacattgtctttttggatgatccattctcagccctggacattcacttgagtgatcatttaatgcaggaggggattttgaaattcctgcaagatgacaaaaggacactcgttcttgtgactcacaaattacagtatctgacgcatgctgactggatcatagccatgaaagatggaagtgtcctaagagaaggaactttgaaggacattcaaaccaaagatgttgagctttatgaacactggaaaacacttatgaatcggcaagatcaagaattagaaaaggatatggaagctgaccaaactactttagagaggaaaactctccgacgggccatgtattcaagagaagccaaagcccagatggaggacgaagacgaagaggaagaagaggaggaagatgaggatgataacatgtccactgtaatgaggctcaggactaaaatgccatggaaaacctgctggcgctacctgacatctggaggattcttcctgctcatcctgatgattttctctaagcttttgaagcattcggtcattgtagctatagactattggctggccacatggacatcggagtacagtataaacaatactggaaaagctgatcagacctactatgtggctggctttagcatactctgtggagcaggcattttcctttgccttgttacatccctcactgtagaatggatgggtctcacagctgccaaaaatcttcaccacaaccttctcaataagataatccttggaccaataaggttttttgataccacacccctgggactgattctcaatcgcttttcagctgatactaatatcattgatcagcacatccctccaaccttggaatctctaactcgctcaacactgctctgcctgtctgccattgggatgatttcttatgctactcctgtgttcctggttgctctcctgccccttggtgttgccttttattttatccagaaatactttcgggttgcctctaaggacctccaggaactcgacgatagtacccagctccctctgctctgtcacttctcagaaacagcagaaggactcaccaccattcgggcctttaggcatgaaaccagatttaaacaacgtatgctggaactgacggatacaaacaacattgcctacttatttctctcagctgccaacagatggctggaggtcaggacggattatctgggagcttgcattgtcctcactgcatctatagcatccattagtgggtcttccaattctggattggtaggcttgggtcttctgtatgcacttacgataaccaattatttgaattgggttgtgaggaacttggctgacctggaggtccagatgggtgcagtgaagaaggtgaacagtttcctgactatggagtcagagaactatgaaggcacaatggatccttctcaagttccagaacattggccacaagaaggggagatcaagatacatgatctgtgtgtcagatatgaaaataatctgaaacctgttcttaagcacgtcaaggcttacatcaaacctggacaaaaggtgggcatatgtggtcgcactggcagtgggaaatcatcgttatctctggctttcttcagaatggttgatatatttgatggaaaaattgtcattgatgggatagacatttccaaattaccactgcacacactacgttctagactttcaatcattctgcaggatccaatactattcagtggttccattagatttaatttagatccagagtgcaaatgcacagatgacagactctgggaagccttagaaattgctcagctgaagaatatggtcaaatctctacctggaggtctagatgcggttgtcactgaaggtggggagaattttagcgtgggacagagacagctattttgccttgccagggcctttgtccgcaaaagcagcattcttattatggatgaggcaacagcttccattgacatggccacagagaatattttgcaaaaagtagtaatgacagcctttgcagaccggaccgtggtgacaatggctcaccgtgtctcttctattatggatgcaggccttgttttagtcttttctgagggtattttagtggagtgtgatactgtcccaaatttgttcgcccacaagaatggccccttttccactttggtgatgaccaacaagtag

SEQ ID NO: 1448 - protein, 1549 aa, Homo sapiens
MSLSFCGNNISSYNINDGVLQNSCFVDALNLVPHVFLLFITFPILFIGWGSQSSKVQIHHNTWLHFPGHNLRWILTFALLFVHVCEIAEGIVSDSRRESRHLHLFMPAVMGFVATTTSIVYYHNIETSNFPKLLLALFLYWVMAFITKTIKLVKYCQSGLDISNLRFCITGMMVILNGLLMAVEINVIRVRRYVFFMNPQKVKPPEDLQDLGVRFLQPFVNLLSKATYWWMNTLIISAHKKPIDLKAIGKLPIAMRAVTNYVCLKDAYEEQKKKVADHPNRTPSIWLAMYRAFGRPILLSSTFRYLADLLGFAGPLCISGIVQRVNETQNGTNNTTGISETLSSKEFLENAYVLAVLLFLALILQRTFLQASYYVTIETGINLRGALLAMIYNKILRLSTSNLSMGEMTLGQINNLVAIETNQLMWFLFLCPNLWAMPVQIIMGVILLYNLLGSSALVGAAVIVLLAPIQYFIATKLAEAQKSTLDYSTERLKKTNEILKGIKLLKLYAWEHIFCKSVEETRMKELSSLKTFALYTSLSIFMNAAIPIAAVLATFVTHAYASGNNLKPAEAFASLSLFHILVTPLSLLFTVVRFAVKAIISVQKLNEFLLSDEIGDDSWRTGESSLPFESCKKHTGVQPKTINRKQPGRYHLDSYEQSTRRLRPAETEDIAIKVTNGYFSWGSGLATLSNIDIRIPTGQLTMIVGQVGCGKSSLLLAILGEMQTLEGKVHWSNVNESEPSFEATRSRNRYSVAYAAQKPWLLNATVEENITFGSPFNKQRYKAVTDACSLQPDIDLLPFGDQTEIGERGINLSGGQRQRICVARALYQNTNIVFLDDPFSALDIHLSDHLMQEGILKFLQDDKRTLVLVTHKLQYLTHADWIIAMKDGSVLREGTLKDIQTKDVELYEHWKTLMNRQDQELEKDMEADQTTLERKTLRRAMYSREAKAQMEDEDEEEEEEEDEDDNMSTVMRLRTKMPWKTCWRYLTSGGFFLLILMIFSKLLKHSVIVAIDYWLATWTSEYSINNTGKADQTYYVAGFSILCGAGIFLCLVTSLTVEWMGLTAAKNLHHNLLNKIILGPIRFFDTTPLGLILNRFSADTNIIDQHIPPTLESLTRSTLLCLSAIGMISYATPVFLVALLPLGVAFYFIQKYFRVASKDLQELDDSTQLPLLCHFSETAEGLTTIRAFRHETRFKQRMLELTDTNNIAYLFLSAANRWLEVRTDYLGACIVLTASIASISGSSNSGLVGLGLLYALTITNYLNWVVRNLADLEVQMGAVKKVNSFLTMESENYEGTMDPSQVPEHWPQEGEIKIHDLCVRYENNLKPVLKHVKAYIKPGQKVGICGRTGSGKSSLSLAFFRMVDIFDGKIVIDGIDISKLPLHTLRSRLSIILQDPILFSGSIRFNLDPECKCTDDRLWEALEIAQLKNMVKSLPGGLDAVVTEGGENFSVGQRQLFCLARAFVRKSSILIMDEATASIDMATENILQKVVMTAFADRTVVTMAHRVSSIMDAGLVLVFSEGILVECDTVPNLFAHKNGPFSTLVMTNK

SEQ ID NO: 1449 - DNA, 4650 bp, Homo sapiens
atgagcctttcattttgtggtaacaacatttcttcatataatatcaacgatggtgtactacaaaattcctgctttgtggatgccctcaacctggtccctcatgtctttctgttgtttatcacttttccaatattgtttattgggtgggggagccaaagctcaaaagtacaaattcaccacaacacatggcttcattttccgggacataacctgagatggattcttacattcgctctcctgtttgtgcatgtctgtgaaatagcagaaggcattgtttcagactcgcggcgggaatcaaggcacctccacctctttatgccagccgtgatgggattcgttgccactacaacatcgatagtgtattatcataatatcgaaacatcaaattttcctaaattacttttagccctgttcctgtattgggtaatggcctttattacaaaaacaataaaattggttaagtactgtcagtctggcttggacatatcaaacctgcgtttctgcatcacaggcatgatggtcatcttgaatgggctcttgatggctgtggagatcaatgtcattcgagtcaggagatatgtatttttcatgaatcctcagaaagtaaagcctcctgaagacctccaggatctgggagtgagatttcttcaaccatttgtgaatttgctgtcaaaagcaacatactggtggatgaacacacttattatatctgctcacaaaaagcctattgatctgaaggcaattggaaaattgccaatagcaatgagagcagtaacaaattatgtttgcctgaaagatgcatatgaagaacaaaagaaaaaagttgcagatcatccaaatcggactccatctatatggcttgcaatgtacagagcttttgggcgaccaattctacttagtagcacattccgctatctggctgatttactgggttttgctggacctctttgtatttctggaatagttcagcgtgtgaatgaaacccagaatgggacaaataacacaactggaatttcagaaaccctctcatcaaaggaatttcttgaaaacgcttacgttctagcagttcttctcttcttggctcttattctgcaaaggacatttttgcaggcttcctactatgtaaccatagagactggcattaacctccgtggagctctgctggccatgatttataataaaatccttaggctctctacgtctaacttatccatgggggagatgactctggggcagatcaacaacttagtcgccattgaaactaatcaactcatgtggtttttgttcctgtgtcccaatctatgggctatgcctgttcagatcataatgggcgtgattctgctctataatttacttggatcaagtgcattggtcggtgcagctgtcattgtgctccttgcgccaattcagtactttattgctacaaagttggcagaggctcagaaaagtacacttgattattccactgagagactcaagaaaacaaatgaaatattgaaaggcatcaaacttctaaaattgtatgcctgggaacacattttctgcaaaagtgtggaggaaacaagaatgaaagaactatctagtctcaaaacctttgcactatatacatcactctccatcttcatgaatgcagcaattcccatagcagctgttcttgctacatttgtgacccatgcgtatgccagtggaaacaatctgaaacctgcagaggcctttgcttcactgtctctcttccatatcctggtcacaccactgtccctgctcttcacggtggtcagatttgcagtcaaagccatcataagtgttcaaaagctgaatgagtttctcttgagtgatgagattggtgacgacagttggcgaactggtgaaagttcgcttccttttgagtcctgtaagaagcacactggagttcagccaaaaactataaacaggaaacagcctggaagatatcacctggacagctatgagcaatcaacacggcgtctacgtcccgcagaaacagaggacattgcaataaaggtcacaaatggatacttttcatggggcagtggtttagctacattatccaatatagatattcgaattccaacaggtcagttaaccatgattgtgggccaagtaggatgtgggaagtcctctcttctccttgccatcctcggtgagatgcagacattggaaggaaaagttcactggagcaatgtaaatgaatctgagccttcttttgaagcaaccagaagtaggaacaggtactctgtggcatatgcagctcaaaagccttggctattaaatgctacagtagaagaaaatattacttttggaagtccttttaacaaacagaggtacaaagctgtcacagatgcctgttctcttcagccagatattgacttattaccatttggagatcaaactgaaattggagagaggggcatcaacctgagtgggggacagaggcagagaatctgtgtggcacgagcgctgtatcaaaacaccaacattgtctttttggatgatccattctcagccctggacattcacttgagtgatcatttaatgcaggaggggattttgaaattcctgcaagatgacaaaaggacactcgttcttgtgactcacaaattacagtatctgacgcatgctgactggatcatagccatgaaagatggaagtgtcctaagagaaggaactttgaaggacattcaaaccaaagatgttgagctttatgaacactggaaaacacttatgaatcggcaagatcaagaattagaaaaggatatggaagctgaccaaactactttagagaggaaaactctccgacgggccatgtattcaagagaagccaaagcccagatggaggacgaagacgaagaggaagaagaggaggaagatgaggatgataacatgtccactgtaatgaggctcaggactaaaatgccatggaaaacctgctggcgctacctgacatctggaggattcttcctgctcatcctgatgattttctctaagcttttgaagcattcggtcattgtagctatagactattggctggccacatggacatcggagtacagtataaacaatactggaaaagctgatcagacctactatgtggctggctttagcatactctgtggagcaggcattttcctttgccttgttacatccctcactgtagaatggatgggtctcacagctgccaaaaatcttcaccacaaccttctcaataagataatccttggaccaataaggttttttgataccacacccctgggactgattctcaatcgcttttcagctgatactaatatcattgatcagcacatccctccaaccttggaatctctaactcgctcaacactgctctgcctgtctgccattgggatgatttcttatgctactcctgtgttcctggttgctctcctgccccttggtgttgccttttattttatccagaaatactttcgggttgcctctaaggacctccaggaactcgacgatagtacccagctccctctgctctgtcacttctcagaaacagcagaaggactcaccaccattcgggcctttaggcatgaaaccagatttaaacaacgtatgctggaactgacggatacaaacaacattgcctacttatttctctcagctgccaacagatggctggaggtcaggacggattatctgggagcttgcattgtcctcactgcatctatagcatccattagtgggtcttccaattctggattggtaggcttgggtcttctgtatgcacttacgataaccaattatttgaattgggttgtgaggaacttggctgacctggaggtccagatgggtgcagtgaagaaggtgaacagtttcctgactatggagtcagagaactatgaaggcacaatggatccttctcaagttccagaacattggccacaagaaggggagatcaagatacatgatctgtgtgtcagatatgaaaataatctgaaacctgttcttaagcacgtcaaggcttacatcaaacctggacaaaaggtgggcatatgtggtcgcactggcagtgggaaatcatcgttatctctggctttcttcagaatggttgatatatttgatggaaaaattgtcattgatgggatagacatttccaaattaccactgcacacactacgttctagactttcaatcattctgcaggatccaatactattcagtggttccattagatttaatttagatccagagtgcaaatgcacagatgacagactctgggaagccttagaaattgctcagctgaagaatatggtcaaatctctacctggaggtctagatgcggttgtcactgaaggtggggagaattttagcgtgggacagagacagctattttgccttgccagggcctttgtccgcaaaagcagcattcttattatggatgaggcaacagcttccattgacatggccacagagaatattttgcaaaaagtagtaatgacagcctttgcagaccggaccgtggtgacaatggctcatcgagtacacactattctgacggcagacctggttattgtgatgaagcgaggaaatattttagaatatgacactccagaaagcctcttggctcaggaaaatggagtatttgcttcttttgttcgcgcagacatgtga

SEQ ID NO: 1450 - protein, 1549 aa, Homo sapiens
MSLSFCGNNISSYNINDGVLQNSCFVDALNLVPHVFLLFITFPILFIGWGSQSSKVQIHHNTWLHFPGHNLRWILTFALLFVHVCEIAEGIVSDSRRESRHLHLFMPAVMGFVATTTSIVYYHNIETSNFPKLLLALFLYWVMAFITKTIKLVKYCQSGLDISNLRFCITGMMVILNGLLMAVEINVIRVRRYVFFMNPQKVKPPEDLQDLGVRFLQPFVNLLSKATYWWMNTLIISAHKKPIDLKAIGKLPIAMRAVTNYVCLKDAYEEQKKKVADHPNRTPSIWLAMYRAFGRPILLSSTFRYLADLLGFAGPLCISGIVQRVNETQNGTNNTTGISETLSSKEFLENAYVLAVLLFLALILQRTFLQASYYVTIETGINLRGALLAMIYNKILRLSTSNLSMGEMTLGQINNLVAIETNQLMWFLFLCPNLWAMPVQIIMGVILLYNLLGSSALVGAAVIVLLAPIQYFIATKLAEAQKSTLDYSTERLKKTNEILKGIKLLKLYAWEHIFCKSVEETRMKELSSLKTFALYTSLSIFMNAAIPIAAVLATFVTHAYASGNNLKPAEAFASLSLFHILVTPLSLLFTVVRFAVKAIISVQKLNEFLLSDEIGDDSWRTGESSLPFESCKKHTGVQPKTINRKQPGRYHLDSYEQSTRRLRPAETEDIAIKVTNGYFSWGSGLATLSNIDIRIPTGQLTMIVGQVGCGKSSLLLAILGEMQTLEGKVHWSNVNESEPSFEATRSRNRYSVAYAAQKPWLLNATVEENITFGSPFNKQRYKAVTDACSLQPDIDLLPFGDQTEIGERGINLSGGQRQRICVARALYQNTNIVFLDDPFSALDIHLSDHLMQEGILKFLQDDKRTLVLVTHKLQYLTHADWIIAMKDGSVLREGTLKDIQTKDVELYEHWKTLMNRQDQELEKDMEADQTTLERKTLRRAMYSREAKAQMEDEDEEEEEEEDEDDNMSTVMRLRTKMPWKTCWRYLTSGGFFLLILMIFSKLLKHSVIVAIDYWLATWTSEYSINNTGKADQTYYVAGFSILCGAGIFLCLVTSLTVEWMGLTAAKNLHHNLLNKIILGPIRFFDTTPLGLILNRFSADTNIIDQHIPPTLESLTRSTLLCLSAIGMISYATPVFLVALLPLGVAFYFIQKYFRVASKDLQELDDSTQLPLLCHFSETAEGLTTIRAFRHETRFKQRMLELTDTNNIAYLFLSAANRWLEVRTDYLGACIVLTASIASISGSSNSGLVGLGLLYALTITNYLNWVVRNLADLEVQMGAVKKVNSFLTMESENYEGTMDPSQVPEHWPQEGEIKIHDLCVRYENNLKPVLKHVKAYIKPGQKVGICGRTGSGKSSLSLAFFRMVDIFDGKIVIDGIDISKLPLHTLRSRLSIILQDPILFSGSIRFNLDPECKCTDDRLWEALEIAQLKNMVKSLPGGLDAVVTEGGENFSVGQRQLFCLARAFVRKSSILIMDEATASIDMATENILQKVVMTAFADRTVVTMAHRVHTILTADLVIVMKRGNILEYDTPESLLAQENGVFASFVRADM

SEQ ID NO: 1451 - DNA, 4542 bp, Homo sapiens
atgagcctttcattttgtggtaacaacatttcttcatataatatcaacgatggtgtactacaaaattcctgctttgtggatgccctcaacctggtccctcatgtctttctgttgtttatcacttttccaatattgtttattgggtgggggagccaaagctcaaaagtacaaattcaccacaacacatggcttcattttccgggacataacctgagatggattcttacattcgctctcctgtttgtgcatgtctgtgaaatagcagaaggcattgtttcagactcgcggcgggaatcaaggcacctccacctctttatgccagccgtgatgggattcgttgccactacaacatcgatagtgtattatcataatatcgaaacatcaaattttcctaaattacttttagccctgttcctgtattgggtaatggcctttattacaaaaacaataaaattggttaagtactgtcagtctggcttggacatatcaaacctgcgtttctgcatcacaggcatgatggtcatcttgaatgggctcttgatggctgtggagatcaatgtcattcgagtcaggagatatgtatttttcatgaatcctcagaaagtaaagcctcctgaagacctccaggatctgggagtgagatttcttcaaccatttgtgaatttgctgtcaaaagcaacatactggtggatgaacacacttattatatctgctcacaaaaagcctattgatctgaaggcaattggaaaattgccaatagcaatgagagcagtaacaaattatgtttgcctgaaagatgcatatgaagaacaaaagaaaaaagttgcagatcatccaaatcggactccatctatatggcttgcaatgtacagagcttttgggcgaccaattctacttagtagcacattccgctatctggctgatttactgggttttgctggacctctttgtatttctggaatagttcagcgtgtgaatgaaacccagaatgggacaaataacacaactggaatttcagaaaccctctcatcaaaggaatttcttgaaaacgcttacgttctagcagttcttctcttcttggctcttattctgcaaaggacatttttgcaggcttcctactatgtaaccatagagactggcattaacctccgtggagctctgctggccatgatttataataaaatccttaggctctctacgtctaacttatccatgggggagatgactctggggcagatcaacaacttagtcgccattgaaactaatcaactcatgtggtttttgttcctgtgtcccaatctatgggctatgcctgttcagatcataatgggcgtgattctgctctataatttacttggatcaagtgcattggtcggtgcagctgtcattgtgctccttgcgccaattcagtactttattgctacaaagttggcagaggctcagaaaagtacacttgattattccactgagagactcaagaaaacaaatgaaatattgaaaggcatcaaacttctaaaattgtatgcctgggaacacattttctgcaaaagtgtggaggaaacaagaatgaaagaactatctagtctcaaaacctttgcactatatacatcactctccatcttcatgaatgcagcaattcccatagcagctgttcttgctacatttgtgacccatgcgtatgccagtggaaacaatctgaaacctgcagaggcctttgcttcactgtctctcttccatatcctggtcacaccactgtccctgctcttcacggtggtcagatttgcagtcaaagccatcataagtgttcaaaagctgaatgagtttctcttgagtgatgagattggtgacgacagttggcgaactggtgaaagttcgcttccttttgagtcctgtaagaagcacactggagttgtcacaaatggatacttttcatggggcagtggtttagctacattatccaatatagatattcgaattccaacaggtcagttaaccatgattgtgggccaagtaggatgtgggaagtcctctcttctccttgccatcctcggtgagatgcagacattggaaggaaaagttcactggagcaatgtaaatgaatctgagccttcttttgaagcaaccagaagtaggaacaggtactctgtggcatatgcagctcaaaagccttggctattaaatgctacagtagaagaaaatattacttttggaagtccttttaacaaacagaggtacaaagctgtcacagatgcctgttctcttcagccagatattgacttattaccatttggagatcaaactgaaattggagagaggggcatcaacctgagtgggggacagaggcagagaatctgtgtggcacgagcgctgtatcaaaacaccaacattgtctttttggatgatccattctcagccctggacattcacttgagtgatcatttaatgcaggaggggattttgaaattcctgcaagatgacaaaaggacactcgttcttgtgactcacaaattacagtatctgacgcatgctgactggatcatagccatgaaagatggaagtgtcctaagagaaggaactttgaaggacattcaaaccaaagatgttgagctttatgaacactggaaaacacttatgaatcggcaagatcaagaattagaaaaggatatggaagctgaccaaactactttagagaggaaaactctccgacgggccatgtattcaagagaagccaaagcccagatggaggacgaagacgaagaggaagaagaggaggaagatgaggatgataacatgtccactgtaatgaggctcaggactaaaatgccatggaaaacctgctggcgctacctgacatctggaggattcttcctgctcatcctgatgattttctctaagcttttgaagcattcggtcattgtagctatagactattggctggccacatggacatcggagtacagtataaacaatactggaaaagctgatcagacctactatgtggctggctttagcatactctgtggagcaggcattttcctttgccttgttacatccctcactgtagaatggatgggtctcacagctgccaaaaatcttcaccacaaccttctcaataagataatccttggaccaataaggttttttgataccacacccctgggactgattctcaatcgcttttcagctgatactaatatcattgatcagcacatccctccaaccttggaatctctaactcgctcaacactgctctgcctgtctgccattgggatgatttcttatgctactcctgtgttcctggttgctctcctgccccttggtgttgccttttattttatccagaaatactttcgggttgcctctaaggacctccaggaactcgacgatagtacccagctccctctgctctgtcacttctcagaaacagcagaaggactcaccaccattcgggcctttaggcatgaaaccagatttaaacaacgtatgctggaactgacggatacaaacaacattgcctacttatttctctcagctgccaacagatggctggaggtcaggacggattatctgggagcttgcattgtcctcactgcatctatagcatccattagtgggtcttccaattctggattggtaggcttgggtcttctgtatgcacttacgataaccaattatttgaattgggttgtgaggaacttggctgacctggaggtccagatgggtgcagtgaagaaggtgaacagtttcctgactatggagtcagagaactatgaaggcacaatggatccttctcaagttccagaacattggccacaagaaggggagatcaagatacatgatctgtgtgtcagatatgaaaataatctgaaacctgttcttaagcacgtcaaggcttacatcaaacctggacaaaaggtgggcatatgtggtcgcactggcagtgggaaatcatcgttatctctggctttcttcagaatggttgatatatttgatggaaaaattgtcattgatgggatagacatttccaaattaccactgcacacactacgttctagactttcaatcattctgcaggatccaatactattcagtggttccattagatttaatttagatccagagtgcaaatgcacagatgacagactctgggaagccttagaaattgctcagctgaagaatatggtcaaatctctacctggaggtctagatgcggttgtcactgaaggtggggagaattttagcgtgggacagagacagctattttgccttgccagggcctttgtccgcaaaagcagcattcttattatggatgaggcaacagcttccattgacatggccacagagaatattttgcaaaaagtagtaatgacagcctttgcagaccggaccgtggtgacaatggctcaccgtgtctcttctattatggatgcaggccttgttttagtcttttctgagggtattttagtggagtgtgatactgtcccaaatttgttcgcccacaagaatggccccttttccactttggtgatgaccaacaagtag

SEQ ID NO: 1452 - protein, 1513 aa, Homo sapiens
MSLSFCGNNISSYNINDGVLQNSCFVDALNLVPHVFLLFITFPILFIGWGSQSSKVQIHHNTWLHFPGHNLRWILTFALLFVHVCEIAEGIVSDSRRESRHLHLFMPAVMGFVATTTSIVYYHNIETSNFPKLLLALFLYWVMAFITKTIKLVKYCQSGLDISNLRFCITGMMVILNGLLMAVEINVIRVRRYVFFMNPQKVKPPEDLQDLGVRFLQPFVNLLSKATYWWMNTLIISAHKKPIDLKAIGKLPIAMRAVTNYVCLKDAYEEQKKKVADHPNRTPSIWLAMYRAFGRPILLSSTFRYLADLLGFAGPLCISGIVQRVNETQNGTNNTTGISETLSSKEFLENAYVLAVLLFLALILQRTFLQASYYVTIETGINLRGALLAMIYNKILRLSTSNLSMGEMTLGQINNLVAIETNQLMWFLFLCPNLWAMPVQIIMGVILLYNLLGSSALVGAAVIVLLAPIQYFIATKLAEAQKSTLDYSTERLKKTNEILKGIKLLKLYAWEHIFCKSVEETRMKELSSLKTFALYTSLSIFMNAAIPIAAVLATFVTHAYASGNNLKPAEAFASLSLFHILVTPLSLLFTVVRFAVKAIISVQKLNEFLLSDEIGDDSWRTGESSLPFESCKKHTGVVTNGYFSWGSGLATLSNIDIRIPTGQLTMIVGQVGCGKSSLLLAILGEMQTLEGKVHWSNVNESEPSFEATRSRNRYSVAYAAQKPWLLNATVEENITFGSPFNKQRYKAVTDACSLQPDIDLLPFGDQTEIGERGINLSGGQRQRICVARALYQNTNIVFLDDPFSALDIHLSDHLMQEGILKFLQDDKRTLVLVTHKLQYLTHADWIIAMKDGSVLREGTLKDIQTKDVELYEHWKTLMNRQDQELEKDMEADQTTLERKTLRRAMYSREAKAQMEDEDEEEEEEEDEDDNMSTVMRLRTKMPWKTCWRYLTSGGFFLLILMIFSKLLKHSVIVAIDYWLATWTSEYSINNTGKADQTYYVAGFSILCGAGIFLCLVTSLTVEWMGLTAAKNLHHNLLNKIILGPIRFFDTTPLGLILNRFSADTNIIDQHIPPTLESLTRSTLLCLSAIGMISYATPVFLVALLPLGVAFYFIQKYFRVASKDLQELDDSTQLPLLCHFSETAEGLTTIRAFRHETRFKQRMLELTDTNNIAYLFLSAANRWLEVRTDYLGACIVLTASIASISGSSNSGLVGLGLLYALTITNYLNWVVRNLADLEVQMGAVKKVNSFLTMESENYEGTMDPSQVPEHWPQEGEIKIHDLCVRYENNLKPVLKHVKAYIKPGQKVGICGRTGSGKSSLSLAFFRMVDIFDGKIVIDGIDISKLPLHTLRSRLSIILQDPILFSGSIRFNLDPECKCTDDRLWEALEIAQLKNMVKSLPGGLDAVVTEGGENFSVGQRQLFCLARAFVRKSSILIMDEATASIDMATENILQKVVMTAFADRTVVTMAHRVSSIMDAGLVLVFSEGILVECDTVPNLFAHKNGPFSTLVMTNK

SEQ ID NO: 1453 - DNA, 1181 bp, Homo sapiens
ggcacgagggcgatgcgggcgcccccggcgggcggccccggcgggcaccatgagccctctgctccgccgcctgctgctcgccgcactcctgcagctggcccccgcccaggcccctgtctcccagcctgatgcccctggccaccagaggaaagtggtgtcatggatagatgtgtatactcgcgctacctgccagccccgggaggtggtggtgcccttgactgtggagctcatgggcaccgtggccaaacagctggtgcccagctgcgtgactgtgcagcgctgtggtggctgctgccctgacgatggcctggagtgtgtgcccactgggcagcaccaagtccggatgcagatcctcatgatccggtacccgagcagtcagctgggggagatgtccctggaagaacacagccagtgtgaatgcagacctaaaaaaaaggacagtgctgtgaagccagacagggctgccactccccaccaccgtccccagccccgttctgttccgggctgggactctgcccccggagcaccctccccagctgacatcacccatcccactccagccccaggcccctctgcccacgctgcacccagcaccaccagcgccctgacccccggacctgccgctgccgctgccgacgccgcagcttcctccgttgccaagggcggggcttagagctcaacccagacacctgcaggtgccggaagctgcgaaggtgacacatggcttttcagactcagcagggtgacttgcctcagaggctatatcccagtgggggaacaaagaggagcctggtaaaaaacagccaagcccccaagacctcagcccaggcagaagctgctctaggacctgggcctctcagagggctcttctgccatcccttgtctccctgaggccatcatcaaacaggacagagttggaagaggagactgggaggcagcaagaggggtcacataccagctcaggggagaatggagtactgtctcagtttctaaccactctgtgcaagtaagcatcttacaactggctcttcctcccctcactaagaagacccaaacctctgcataatgggatttgggctttggtacaagaactgtgacccccaaccctgataaaagagatggaaggaaaaaaaaaaaaaaaaaaaaaaaaaaaaaaaaaaaaaaaaaaaaaaaaaaaaaaa

SEQ ID NO: 1454 - protein, 207 aa, Homo sapiens
MSPLLRRLLLAALLQLAPAQAPVSQPDAPGHQRKVVSWIDVYTRATCQPREVVVPLTVELMGTVAKQLVPSCVTVQRCGGCCPDDGLECVPTGQHQVRMQILMIRYPSSQLGEMSLEEHSQCECRPKKKDSAVKPDRAATPHHRPQPRSVPGWDSAPGAPSPADITHPTPAPGPSAHAAPSTTSALTPGPAAAAADAAASSVAKGGA

SEQ ID NO: 1455 - DNA, 2727 bp, Homo sapiens
ggggattttgggcgccgaccagacgcggcattttcggaaaatagcgccctgtgcagctgaagcgctttgtgtgtagcggggccgcgtcagcccggccgggtacgaggcgcctcgggtccccgcaccacctcctgctgccttcccgtcgccgctcccgaagcttttccagatgtccctggtagatttgggaaagaagcttttagaagcggcacgagcaggtcaagatgatgaagttcgtattttgatggcaaatggagctccctttactacagactggctgggaacttctccacttcatctagcagcacagtatggtcattattccaccacagaggtactgctgcgagctggtgtgagcagagatgccagaaccaaagtggaccgaacaccattacatatggcagcttctgagggccatgccagcatagtagaggttttacttaagcatggtgctgatgtcaatgcaaaggacatgttaaagatgacagctctccattgggccacagaacacaatcatcaagaggtggtggaacttttaatcaaatatggtgctgatgtacacacgcaaagtaaattttgtaaaactgcatttgatatttcaatagacaatggaaatgaagatttagcagagatattacagattgctatgcagaaccaaatcaacacaaacccagagagtcctgacactgtgacaatacatgctgcaacaccacagtttatcattggacctggaggggtggtgaacctaacaggtctggtatcttcagaaaattcatccaaggcaacagatgaaacgggtgtatctgctgttcagtttggaaactcttctacatcagtattagctacattagctgccttagctgaagcatctgctccattgtccaattcttcagaaactccagtagtggccacagaagaagtagttactgcagaatctgtggatggtgccattcagcaagtagttagttcagggggtcagcaagtcatcacaatagttacagatggaattcagcttggaaatttgcactctattccaaccagtggaattggtcagcccatcattgtgaccatgccagatggacaacaagtattaacagtaccagcaacagacattgctgaagaaactgttataagtgaagaaccaccagctaagagacaatgtatcgaaataattgaaaaccgggtggaatctgcagaaatagaagagagagaagctcttcagaaacagctggatgaagcaaatcgagaagcacaaaaatatcgacagcagctcctaaagaaagaacaggaagcagaggcctacagacagaagttggaagctatgactcgtcttcagactaataaagaagctgtttaattgaaatgaacatgtagtttgattttacttttggtcaagaaagaatacaatcttgaactgtacacaacaaaggtacagccatgggaatacagaatgatagaagagactacagatggataattggacttaagccatgagctctgagttcttgtaacataaaactttactttagaagttgtgaaatgtatttaaaactgaattctgtaaatagtttttttttttttacagttccaaatgagttgataaagattgttgaagagatccaaaaccagaataagccactgtttttgtgaattctttttgattttagtacaaaccttaatttctcagaaacggaacagttttaagggtgatcgttgttggttaggccaaatgttgtgtaataattatggtggactgatgctggaattactcctgtaggtataaacctctgtatgaagagaagatttctcccaggaaatctttgtacagctttaagttgtgtcagattctctgaaaacattttttagaaagcaaaatttttatatttgttcaatttcagctatacccaagtagatttacatgtatatgaagcaaatatttttaaaaatttctgtttgtacatattctgcatgttttataatttcaaaatgcatcacttacataggtatttctcccacagaaatgatgaaagtgaccagaaaaaaacaaaaacaaaacccctttactctgtaggtcattgaaacgaagtaagctggcagctggttttattggaatgacagtgttctcggaaggagcagcctacaagataacttgaatttgccaattctgcaaaatctgtgcttttttgaaaatttaagagtggggacgtgaaactgtattctgtgccttccatcatgatttccacatgaaagcactttaaggcactgattttaagataatgtttttggaaaacccaatgcatatgggtttctgaaatattttatggacttatttctccccaggaaacgattcttacggaaaaaaattgcttttgtatgtagaacaggaactttttgtattacagtgatgcaatagacatgtctaatgtaacttctacttttccttttgaaagctcagtgtctgtgctatgacttgctctcatcacaatattgttgaattccacaatgtatggacattaaacactggcagactgttcactttttctttttttttttttggtaaaatattacttcaaacccctttttcttgctttatttttcagtgttttattgctttatgaactgtttaaccctgaaatccctctaggttatctatactgtataaaaaagcaattacccttaaaactgtactctggcctacttttctattttgcaattaaatatcttttt

SEQ ID NO: 1456 - protein, 395 aa, Homo sapiens
MSLVDLGKKLLEAARAGQDDEVRILMANGAPFTTDWLGTSPLHLAAQYGHYSTTEVLLRAGVSRDARTKVDRTPLHMAASEGHASIVEVLLKHGADVNAKDMLKMTALHWATEHNHQEVVELLIKYGADVHTQSKFCKTAFDISIDNGNEDLAEILQIAMQNQINTNPESPDTVTIHAATPQFIIGPGGVVNLTGLVSSENSSKATDETGVSAVQFGNSSTSVLATLAALAEASAPLSNSSETPVVATEEVVTAESVDGAIQQVVSSGGQQVITIVTDGIQLGNLHSIPTSGIGQPIIVTMPDGQQVLTVPATDIAEETVISEEPPAKRQCIEIIENRVESAEIEEREALQKQLDEANREAQKYRQQLLKKEQEAEAYRQKLEAMTRLQTNKEAV

SEQ ID NO: 1457 - DNA, 2691 bp, Homo sapiens
ggggattttgggcgccgaccagacgcggcattttcggaaaatagcgccctgtgcagctgaagcgctttgtgtgtagcggggccgcgtcagcccggccgggtacgaggcgcctcgggtccccgcaccacctcctgctgccttcccgtcgccgctcccgaagcttttccagatgtccctggtagatttgggaaagaagcttttagaagcggcacgagcaggtcaagatgatgaagttcgtattttgatggcaaatggagctccctttactacagactggctgggaacttctccacttcatctagcagcacagtatggtcattattccaccacagaggtactgctgcgagctggtgtgagcagagatgccagaaccaaggtggaccgaacaccattacatatggcagcttctgagggccatgccagcatagtagaggttttacttaagcatggtgctgatgtcaatgcaaaggacatgttaaagatgacagctctccattgggccacagaacacaatcatcaagaggtggtggaacttttaatcaaatatggtgctgatgtacacacgcaaagtaaattttgtaaaactgcatttgatatttcaatagacaatggaaatgaagatttagcagagatattacagattgctatgcagaaccaaatcaacacaaacccagagagtcctgacactgtgacaatacatgctgcaacaccacagtttatcattggacctggaggggtggtgaacctaacagatgaaacgggtgtatctgctgttcagtttggaaactcttctacatcagtattagctacattagctgccttagctgaagcatctgctccattgtccaattcttcagaaactccagtagtggccacagaagaagtagttactgcagaatctgtggatggtgccattcagcaagtagttagttcagggggtcagcaagtcatcacaatagttacagatggaattcagcttggaaatttgcactctattccaaccagtggaattggtcagcccatcattgtgaccatgccagatggacaacaagtattaacagtaccagcaacagacattgctgaagaaactgttataagtgaagaaccaccagctaagagacaatgtatcgaaataattgaaaaccgggtggaatctgcagaaatagaagagagagaagctcttcagaaacagctggatgaagcaaatcgagaagcacaaaaatatcgacagcagctcctaaagaaagaacaggaagcagaggcctacagacagaagttggaagctatgactcgtcttcagactaataaagaagctgtttaattgaaatgaacatgtagtttgattttacttttggtcaagaaagaatacaatcttgaactgtacacaacaaaggtacagccatgggaatacagaatgatagaagagactacagatggataattggacttaagccatgagctctgagttcttgtaacataaaactttactttagaagttgtgaaatgtatttaaaactgaattctgtaaatagtttttttttttttacagttccaaatgagttgataaagattgttgaagagatccaaaaccagaataagccactgtttttgtgaattctttttgattttagtacaaaccttaatttctcagaaacggaacagttttaagggtgatcgttgttggttaggccaaatgttgtgtaataattatggtggactgatgctggaattactcctgtaggtataaacctctgtatgaagagaagatttctcccaggaaatctttgtacagctttaagttgtgtcagattctctgaaaacattttttagaaagcaaaatttttatatttgttcaatttcagctatacccaagtagatttacatgtatatgaagcaaatatttttaaaaatttctgtttgtacatattctgcatgttttataatttcaaaatgcatcacttacataggtatttctcccacagaaatgatgaaagtgaccagaaaaaaacaaaaacaaaacccctttactctgtaggtcattgaaacgaagtaagctggcagctggttttattggaatgacagtgttctcggaaggagcagcctacaagataacttgaatttgccaattctgcaaaatctgtgcttttttgaaaatttaagagtggggacgtgaaactgtattctgtgccttccatcatgatttccacatgaaagcactttaaggcactgattttaagataatgtttttggaaaacccaatgcatatgggtttctgaaatattttatggacttatttctccccaggaaacgattcttacggaaaaaaattgcttttgtatgtagaacaggaactttttgtattacagtgatgcaatagacatgtctaatgtaacttctacttttccttttgaaagctcagtgtctgtgctatgacttgctctcatcacaatattgttgaattccacaatgtatggacattaaacactggcagactgttcactttttctttttttttttttggtaaaatattacttcaaacccctttttcttgctttatttttcagtgttttattgctttatgaactgtttaaccctgaaatccctctaggttatctatactgtataaaaaagcaattacccttaaaactgtactctggcctacttttctattttgcaattaaatatcttttt

SEQ ID NO: 1458 - protein, 383 aa, Homo sapiens
MSLVDLGKKLLEAARAGQDDEVRILMANGAPFTTDWLGTSPLHLAAQYGHYSTTEVLLRAGVSRDARTKVDRTPLHMAASEGHASIVEVLLKHGADVNAKDMLKMTALHWATEHNHQEVVELLIKYGADVHTQSKFCKTAFDISIDNGNEDLAEILQIAMQNQINTNPESPDTVTIHAATPQFIIGPGGVVNLTDETGVSAVQFGNSSTSVLATLAALAEASAPLSNSSETPVVATEEVVTAESVDGAIQQVVSSGGQQVITIVTDGIQLGNLHSIPTSGIGQPIIVTMPDGQQVLTVPATDIAEETVISEEPPAKRQCIEIIENRVESAEIEEREALQKQLDEANREAQKYRQQLLKKEQEAEAYRQKLEAMTRLQTNKEAV

SEQ ID NO: 1459 - DNA, 6368 bp, Homo sapiens
ccatggacctgcgccctgagctgcccaccaccctgggccccgtcagcctgcgccagctggggctggagcacacccgctacccctgtctggaccttggtgccatgttgctctacaccctgaccttctggctcctgctgcgccagtttgtgaaagagaagctgctgaagtgggcagagtctccagctgcgctgacggaggtcaccgtggcagacacagagcctacgcggacgcagacgctgttgcagagcctgggggagctggtgaagggcgtgtacgccaagtactggatctatgtgtgtgctggcatgttcatcgtggtcagcttcgccggccgcctcgtggtctacaagattgtctacatgttcctcttcctgctctgcctcaccctcttccaggtctactacagcctgtggcggaagctgctcaaggccttctggtggctcgtggtggcctacaccatgctggtcctcatcgccgtctacaccttccagttccaggacttccctgcctactggcgcaacctcactggcttcaccgacgagcagctgggggacctgggcctggagcagttcagcgtatccgagctcttctccagcatcctggtgcccggcttcttcctcctggcctgcatcctgcagctgcactacttccacaggcccttcatgcagctcaccgacatggagcacgtgtccctgcctggcacgcgcctcccgcgctgggctcacaggcaggatgcagtgagtgggaccccactgctgcgggaggagcagcaggagcatcagcagcagcagcaggaggaggaggaggaggaggactccagggacgaggggctgggcgtggccactccccaccaggccacgcaggtgcctgaaggggcagccaagtggggcctggtggctgagcgcctgctggagctggcagccggcttctcggacgtcctctcacgcgtgcaggtgttcctgcggcggctgctggagcttcacgttttcaagctggtggccctgtacaccgtctgggtggccctgaaggaggtgtcggtgatgaacctgctgctggtggtgctgtgggccttcgccctgccctacccacgcttccggcccatggcctcctgcctgtccaccgtgtggacctgcgtcatcatcgtgtgtaagatgctgtaccagctcaaggttgtcaacccccaggagtattccagcaactgcaccgagcccttccccaacagcaccaacttgctgcccacggagatcagccagtccctgctgtaccgggggcccgtggaccctgccaactggtttggggtgcggaaagggttccccaacctgggctacatccagaaccacctgcaagtgctgctgctgctggtattcgaggccatcgtgtaccggcgccaggagcactaccgccggcagcaccagctggccccgctgcctgcccaggccgtgtttgccagcggcacccgccagcagctggaccaggatctgctcggctgcctcaagtacttcatcaacttcttcttctacaaattcgggctggagatctgcttcctgatggccgtgaacgtgatcgggcagcgcatgaactttctggtgaccctgcacggttgctggctggtggccatcctcacccgcaggcaccgccaggccattgcccgcctctggcccaactactgcctcttcctggcgctgttcctgctgtaccagtacctgctgtgcctggggatgcccccggccctgtgcattgattatccctggcgctggagccgggccgtccccatgaactccgcactcatcaagtggctgtacctgcctgatttcttccgggcccccaactccaccaacctcatcagcgactttctcctgctgctgtgcgcctcccagcagtggcaggtgttctcagctgagcgcacagaggagtggcagcgcatggctggcgtcaacaccgaccgcctggagccgctgcggggggagcccaaccccgtgcccaactttatccactgcaggtcctaccttgacatgctgaaggtggccgtcttccgatacctgttctggctggtgctggtggtggtgtttgtcacgggggccacccgcatcagcatcttcgggctgggctacctgctggcctgcttctacctgctgctcttcggcacggccctgctgcagagggacacacgggcccgcctcgtgctgtgggactgcctcattctgtacaacgtcaccgtcatcatctccaagaacatgctgtcgctcctggcctgcgtcttcgtggagcagatgcagaccggcttctgctgggtcatccagctcttcagccttgtatgcaccgtcaagggctactatgaccccaaggagatgatggacagagaccaggactgcctgctgcctgtggaggaggctggcatcatctgggacagcgtctgcttcttcttcctgctgctgcagcgccgcgtcttccttagccattactacctgcacgtcagggccgacctccaggccaccgccctgctagcctccaggggcttcgccctctacaacgctgccaacctcaagagcattgacttccaccgcaggatagaggagaagtccctggcccagctgaaaagacagatggagcgtatccgtgccaagcaggagaagcacaggcagggccgggtggaccgcagtcgcccccaggacaccctgggccccaaggaccccggcctggagccagggcccgacagtccagggggctcctccccgccacggaggcagtggtggcggccctggctggaccacgccacagtcatccactccggggactacttcctgtttgagtccgacagtgaggaagaggaggaggctgttcctgaagacccgaggccgtcggcacagagtgccttccagctggcgtaccaggcatgggtgaccaacgcccaggcggtgctgaggcggcggcagcaggagcaggagcaggcaaggcaggaacaggcaggacagctacccacaggaggtggtcccagccaggaggtggagccagcagagggccccgaggaggcagcggcaggccggagccatgtggtgcagagggtgctgagcacggcgcagttcctgtggatgctggggcaggcgctagtggatgagctgacacgctggctgcaggagttcacccggcaccacggcaccatgagcgacgtgctgcgggcagagcgctacctcctcacacaggagctcctgcagggcggcgaagtgcacaggggcgtgctggatcagctgtacacaagccaggccgaggccacgctgccaggccccaccgaggcccccaatgccccaagcaccgtgtccagtgggctgggcgcggaggagccactcagcagcatgacagacgacatgggcagccccctgagcaccggctaccacacgcgcagtggcagtgaggaggcagtcaccgaccccggggagcgtgaggctggtgcctctctgtaccagggactgatgcggacggccagcgagctgctcctggacaggcgcctgcgcatcccagagctggaggaggcagagctgtttgcggaggggcagggccgggcgctgcggctgctgcgggccgtgtaccagtgtgtggccgcccactcggagctgctctgctacttcatcatcatcctcaaccacatggtcacggcctccgccggctccctggtgctgcccgtgctcgtcttcctgtgggccatgctgtcgatcccgaggcccagcaagcgcttctggatgacggccatcgtcttcaccgagatcgcggtggtcgtcaagtacctgttccagtttgggttcttcccctggaacagccacgtggtgctgcggcgctacgagaacaagccctacttcccgccccgcatcctgggcctggagaagactgacggctacatcaagtacgacctggtgcagctcatggcccttttcttccaccgctcccagctgctgtgctatggcctctgggaccatgaggaggactcaccatccaaggagcatgacaagagcggcgaggaggagcagggagccgaggaggggccaggggtgcctgcggccaccaccgaagaccacattcaggtggaagcgagggtcggacccacggacgggaccccagaaccccaagtggagctcaggccccgtgatacgaggcgcatcagtctacgttttagaagaaggaagaaggagggcccagcacggaaaggagcggcagccatcgaagctgaggacagggaggaagaagagggggaggaagagaaagaggcccccacggggagagagaagaggccaagccgctctggaggaagagtaagggcggccgggcggcggctgcagggcttctgcctgtccctggcccagggcacatatcggccgctacggcgcttcttccacgacatcctgcacaccaagtaccgcgcagccaccgacgtctatgccctcatgttcctggctgatgttgtcgacttcatcatcatcatttttggcttctgggcctttgggaagcactcggcggccacagacatcacgtcctccctatcagacgaccaggtacccgaggctttcctggtcatgctgctgatccagttcagtaccatggtggttgaccgcgccctctacctgcgcaagaccgtgctgggcaagctggccttccaggtggcgctggtgctggccatccacctatggatgttcttcatcctgcccgccgtcactgagaggatgttcaaccagaatgtggtggcccagctctggtacttcgtgaagtgcatctacttcgccctgtccgcctaccagatccgctgcggctaccccacccgcatcctcggcaacttcctcaccaagaagtacaatcatctcaacctcttcctcttccaggggttccggctggtgccgttcctggtggagctgcgggcagtgatggactgggtgtggacggacaccacgctgtccctgtccagctggatgtgtgtggaggacatctatgccaacatcttcatcatcaaatgcagccgagagacagagaagaaatacccgcagcccaaagggcagaagaagaagaagatcgtcaagtacggcatgggtggcctcatcatcctcttcctcatcgccatcatctggttcccgctgctcttcatgtcgctggtgcgctccgtggttggggttgtcaaccagcccatcgatgtcaccgtcaccctcaagctgggcggctatgagccgctgttcaccatgagcgcccagcagccgtccatcatccccttcacggcccaggcctatgaggagctgtcccggcagtttgacccccagccgctggccatgcagttcatcagccagtacagccctgaggacatcgtcacggcgcagattgagggcagctccggggcgctgtggcgcatcagtccccccagccgtgcccagatgaagcgggagctctacaacggcacggccgacatcaccctgcgcttcacctggaacttccagagggacctggcgaagggaggcactgtggagtatgccaacgagaagcacatgctggccctggcccccaacagcactgcacggcggcagctggccagcctgctcgagggcacctcggaccagtctgtggtcatccccaatctcttccccaagtacatccgtgcccccaacgggcccgaagccaaccctgtgaagcagctgcagcccaatgaggaggccgactacctcggcgtgcgtatccagctgcggagggagcagggtgcgggggccaccggcttcctcgaatggtgggtcatcgagctgcaggagtgccggaccgactgcaacctgctgcccatggtcattttcagtgacaaggtcagcccaccgagcctcggcttcctggctggctacggcatcatggggctgtacgtgtccatcgtgctggtcatcggcaagttcgtgcgcggattcttcagcgagatctcgcactccattatgttcgaggagctgccgtgcgtggaccgcatcctcaagctctgccaggacatcttcctggtgcgggagactcgggagctggagctggaggaggagttgtacgccaagctcatcttcctctaccgctcaccggagaccatgatcaagtggactcgtgagaaggagtaggagctgctgctggcgcccgagagggaaggagccggcctgctgggcagcgtggccacaaggggcggcactcctcaggccgggggagccactgccccgtccaaggccgccagctgtgatgcatcctcccggcctgcctgagccctgatgctgctgtcagagaaggacactgcgtccccacggcctgcgtggcgctgccgtcccccacgtgtactgtagagttttttttttaattaaaaaatgttttatttatacaaatgg

SEQ ID NO: 1460 - protein, 2035 aa, Homo sapiens
MDLRPELPTTLGPVSLRQLGLEHTRYPCLDLGAMLLYTLTFWLLLRQFVKEKLLKWAESPAALTEVTVADTEPTRTQTLLQSLGELVKGVYAKYWIYVCAGMFIVVSFAGRLVVYKIVYMFLFLLCLTLFQVYYSLWRKLLKAFWWLVVAYTMLVLIAVYTFQFQDFPAYWRNLTGFTDEQLGDLGLEQFSVSELFSSILVPGFFLLACILQLHYFHRPFMQLTDMEHVSLPGTRLPRWAHRQDAVSGTPLLREEQQEHQQQQQEEEEEEDSRDEGLGVATPHQATQVPEGAAKWGLVAERLLELAAGFSDVLSRVQVFLRRLLELHVFKLVALYTVWVALKEVSVMNLLLVVLWAFALPYPRFRPMASCLSTVWTCVIIVCKMLYQLKVVNPQEYSSNCTEPFPNSTNLLPTEISQSLLYRGPVDPANWFGVRKGFPNLGYIQNHLQVLLLLVFEAIVYRRQEHYRRQHQLAPLPAQAVFASGTRQQLDQDLLGCLKYFINFFFYKFGLEICFLMAVNVIGQRMNFLVTLHGCWLVAILTRRHRQAIARLWPNYCLFLALFLLYQYLLCLGMPPALCIDYPWRWSRAVPMNSALIKWLYLPDFFRAPNSTNLISDFLLLLCASQQWQVFSAERTEEWQRMAGVNTDRLEPLRGEPNPVPNFIHCRSYLDMLKVAVFRYLFWLVLVVVFVTGATRISIFGLGYLLACFYLLLFGTALLQRDTRARLVLWDCLILYNVTVIISKNMLSLLACVFVEQMQTGFCWVIQLFSLVCTVKGYYDPKEMMDRDQDCLLPVEEAGIIWDSVCFFFLLLQRRVFLSHYYLHVRADLQATALLASRGFALYNAANLKSIDFHRRIEEKSLAQLKRQMERIRAKQEKHRQGRVDRSRPQDTLGPKDPGLEPGPDSPGGSSPPRRQWWRPWLDHATVIHSGDYFLFESDSEEEEEAVPEDPRPSAQSAFQLAYQAWVTNAQAVLRRRQQEQEQARQEQAGQLPTGGGPSQEVEPAEGPEEAAAGRSHVVQRVLSTAQFLWMLGQALVDELTRWLQEFTRHHGTMSDVLRAERYLLTQELLQGGEVHRGVLDQLYTSQAEATLPGPTEAPNAPSTVSSGLGAEEPLSSMTDDMGSPLSTGYHTRSGSEEAVTDPGEREAGASLYQGLMRTASELLLDRRLRIPELEEAELFAEGQGRALRLLRAVYQCVAAHSELLCYFIIILNHMVTASAGSLVLPVLVFLWAMLSIPRPSKRFWMTAIVFTEIAVVVKYLFQFGFFPWNSHVVLRRYENKPYFPPRILGLEKTDGYIKYDLVQLMALFFHRSQLLCYGLWDHEEDSPSKEHDKSGEEEQGAEEGPGVPAATTEDHIQVEARVGPTDGTPEPQVELRPRDTRRISLRFRRRKKEGPARKGAAAIEAEDREEEEGEEEKEAPTGREKRPSRSGGRVRAAGRRLQGFCLSLAQGTYRPLRRFFHDILHTKYRAATDVYALMFLADVVDFIIIIFGFWAFGKHSAATDITSSLSDDQVPEAFLVMLLIQFSTMVVDRALYLRKTVLGKLAFQVALVLAIHLWMFFILPAVTERMFNQNVVAQLWYFVKCIYFALSAYQIRCGYPTRILGNFLTKKYNHLNLFLFQGFRLVPFLVELRAVMDWVWTDTTLSLSSWMCVEDIYANIFIIKCSRETEKKYPQPKGQKKKKIVKYGMGGLIILFLIAIIWFPLLFMSLVRSVVGVVNQPIDVTVTLKLGGYEPLFTMSAQQPSIIPFTAQAYEELSRQFDPQPLAMQFISQYSPEDIVTAQIEGSSGALWRISPPSRAQMKRELYNGTADITLRFTWNFQRDLAKGGTVEYANEKHMLALAPNSTARRQLASLLEGTSDQSVVIPNLFPKYIRAPNGPEANPVKQLQPNEEADYLGVRIQLRREQGAGATGFLEWWVIELQECRTDCNLLPMVIFSDKVSPPSLGFLAGYGIMGLYVSIVLVIGKFVRGFFSEISHSIMFEELPCVDRILKLCQDIFLVRETRELELEEELYAKLIFLYRSPETMIKWTREKE

SEQ ID NO: 1461 - DNA, 5717 bp, Homo sapiens
cggccgcggcggtagcgcggaaaacaatggggccggggcggtggggagaggccgaggcttgaggtaggcagcaagcgccggctgggggtcgggccgagcggggcaggaggaaaacccgccgccgcgcgcgagcccgctccgctgccctcgggggcatggcgcggccgtgaggcggagaggggtagccgcggggagcgaagcccgcagtgccagccggccccgagaggcccggccccgggcccggcccgtgcagcccgcggcccatggtgctgcccacctgccccatggcggagttcgcgctgccgcggcacagcgcggtcatggagcgccttcgccggcgcatcgagctgtgccggcgccaccacagcacctgcgaggcccgctacgaggccgtgtcgcccgagcgcctggagctggagcgccaacacaccttcgccctgcaccagcgctgcatccaggccaaggccaagcgcgccgggaagcacaggcagccgcccgccgccacggccccggcgcccgccgccccggccccgcgcctggacgccgctgacggccccgagcacggccgcccggccacgcatcttcatgatacagttaagaggaatcttgacagcgccacttcccctcagaatggcgatcaacagaatggctacggggacctctttcctgggcataagaagactcgccgggaggcccctctgggagttgccatctcttccaatggactgcctccagcctcccccctcggtcagtctgacaagccttctggagccgacgccctgcagtccagtgggaagcactctctggggctagactctctcaacaaaaagcgtctggctgactccagccttcacttgaatggaggcagtaaccccagtgagtcatttcctctgagcctgaataaagaactgaagcaggagcctgtcgaagacctgccttgcatgatcactgggactgtcggctccatatcgcaaagcaacctcatgccagacctcaaccttaacgagcaggagtggaaggagctcatcgaggagctgaacaggtcggtgcccgatgaagacatgaaggacctgtttaatgaggacttcgaggagaagaaggacccagagtcttctggctctgccacacaaacccccttggcacaggacattaatattaagacggaattctctccagcagcctttgagcaagaacagttaggctctccacaagtgagggccgggtctgcagggcagacctttctggggccttcctctgcccctgtgagtacagattcccccagcctagggggctcccaaaccttattccacacctctggtcagccccgggcggacaatcccagtccaaacctgatgccggcatcagcccaggcccagaacgcacaaagagcccttgcaggtgtggtattgcccagtcagggcccaggaggggcctcagagctgtcctctgcccaccagctccagcagatcgctgccaagcagaagcgcgagcagatgctccagaacccacagcaggccaccccggcaccagccccgggccagatgtccacatggcagcagacggggccctcccacagttccttagatgtcccttaccccatggagaagcctgccagcccttccagctacaagcaagacttcactaactccaaactgctcatgatgcctagtgtgaataagagttcccctcggcccggaggcccctacctccagcccagccatgtgaacctgctgagtcaccagccaccgagtaacttgaatcagaactccgcgaataaccaggggtctgtgctggactacggcaatacaaaacccctttctcattacaaagcggactgtgggcaaggcagcccggggtctggccagagcaagccagccctgatggcttatcttccccagcagctgtcccatataagtcacgagcagaactccctgtttctgatgaagccaaagccaggaaatatgcctttccgatcactggttccacctggccaggagcagaacccttccagtgtccctgtgcaagcccaggctaccagtgttgggacccagccgcctgccgtgtccgtggccagctcccacaacagctccccctatctcagcagccagcaacaggccgctgtaatgaagcagcatcagttgcttttggaccaacagaaacaaagggagcagcagcaaaagcatttacagcaacagcagttccttcagaggcaacagcaccttctcgcggaacaggagaagcaacagtttcagcgccatctgacccgcccaccaccccagtaccaagacccgacacaaggcagcttcccacagcaggttggacagttcacagggtcctctgctgccgtgcccggcatgaacaccttgggtccatccaactccagctgtcctcgagtgttccctcaggctgggaatctgatgccaatgggccctggacatgcttcagtttcctctctccccacaaactcaggccaacaggaccggggtgtggctcagttccctggctcccaaaacatgcctcagagcagcctctatggcatggcttctggcataacccagatagttgcccagcccccgccacaggccaccaatggacatgcccacattccacggcagaccaacgtgggccagaacacctccgtctcagctgcctatgggcagaactctctgggaagctctggcctctcccagcagcacaataaggggaccctgaaccctggtttaacaaagccaccggtcccaagggtgtcaccagccatgggaggccagaattcctcctggcagcatcagggaatgccgaacctcagtggccagaccccagggaacagcaacgtgagtcccttcactgcagcctccagtttccacatgcagcagcaggcccacctgaaaatgtctagcccgcaattctcccaggcagtgcccaacaggcccatggctcccatgagctcagcagctgccgtggggtccttgctacccccagtgagtgcacagcagaggaccagcgcccctgccccagcaccacccccaacagcccctcagcagggcttgcctggcctgagcccagcagggcctgagctgggggccttcagccagagccctgcctcacagatgggcggtcgggcggggctgcactgcacccaggcctaccctgtgcggaccgcgggccaggagctgccttttgcctatagcgggcagccaggtggcagtgggctctctagtgtggctggacacaccgatctgatcgactccctgctgaagaacaggacttcagaggagtggatgagtgatttggacgacctgttagggtctcagtaatggaaggatttgtagtgtttttagtgttcattcatcctatatttttattctcagattcaaagaaagagcaactactttggaccaaaagcccatggcctggggagctgggcaggtagagcccaagctccaggtgaggcctggccctgggcagggtctgtggctgcgcccctcaggccagcagttgaggtccatcgggctggccccagcccatctgctggcatcagtacctggtgttgggacagcaggatagggttctaaaggtggttttctatccaaacgaccaaaaaaccaacagtaacaccagtgaaaccccacactgtcgggcttataaaaatctgtgccatcatggtgattttatccaagactgctccacttaccccagtgctggggacaagtttctgttgaaactttagatagcagaattatttgcaatttgtagcatagaaaagatttttaaatttttttacaaaaggtttttaaacagattagggtaggtgatggtttaaatcaattaagtggcattggaaacctagggtttccttttgattaagagccttttttgtttctgctctttgtcagctttcaggggagaaggaggccactggaaaattatttccctaagtgcaggctgttgactgcgtatgccaaaaagggacaggaggcatgggatagcaggtctggtgacacagctagggtcttcctagcagctcctcctcctccctcccaaggcccccaggaatcccttcctcccatgtcctggcagcaggaccccaggctacatatggaaggtagagatgtgggggtcctgtatcctggagtattatgtctccccaccttctgcagttttctctgaacatgtatgttgcccatggtgggagcgtggtcactgtgcagttgtgcacagatgtctttcctttaccgttggcctttctgtctgcctctccttcctctctgcagcccaaatggaaaacaattatttactccattggagggaaaggaagagtcttagaattcctaagggaaccttagcataaaggttttggggaaggaggccgtaggccggcccggaggaagcaattccacttggtttgacaacttctgccactcccatgtcagatgacttgcacttcttaaagagattgctttataacactaagacatcctttctaaagattcaagtggacttgactaagctgagggtccacgaaatagaatatgacatgtgagctgtttttggaaaacgaagatggagagagcacttccccgtaacgaaagcaaagtggtaagcacagggtgagacccttttacacagaatggtggagagaaaagagaatgctgaaaagtggctcagatgcagagtgttctgtggagaaactgcagccccacttctgtttccctggagtctcccaatggatcattcaggagtgtcctatgtgagaattgagccaaggaaaatactcatgcaaccagcctgagtcgcggtgaggggatgagaggttgtacacacattggtagttattttgcaccagcagtgcctttctcactgggggtacttggaccctcagatcttcttttctaatagccatttgccaccccaagtggtatgtcggccatttctccttaaaacaccttccctacctttcccatgtactcagtttagctctcaaagaaggggtgaatcataaagccagtgaaaatttcaccctctgagggagttccccaatctgaaggggaagagggtgacctcagcggcttttctcccaaaaatcggctgaaggctggttgtggatccttgttcctctcctgaccccatctggctgctgccccgtctcccacccctgtccccggggctcgctggccctgcactccgccttagtcctggggccggcgacacagtgggggctcctcacttgctgcagtgtcatagcaataaaatgtgattcttggggtccccccagggagctgcccatggctttatttatgaacctggttttcgggagtcaggggaggagatgactttgcttctgtgcacagccccgtcttccaggagccacaactcagaagaaaagggtgctcagacttttgttatacacatttgctttgtgtaaataaatgtttacaattttatatgaaagatggaataagcgctagagcttccaactgtatattttttacttttatagattttaaaactatgatcctttatatgtgtgttttgggggagctatgataagttttatggcaaacggttggtattgttaactttttattgtcatcaaaagttcataaaagtcctattaatccccatattcttctactgcccttaactctggtatacaccaaaaagaaatctttactttccttgttttatcattataaaaataaagtattttgctagtatgg

SEQ ID NO: 1462 - protein, 1016 aa, Homo sapiens
MVLPTCPMAEFALPRHSAVMERLRRRIELCRRHHSTCEARYEAVSPERLELERQHTFALHQRCIQAKAKRAGKHRQPPAATAPAPAAPAPRLDAADGPEHGRPATHLHDTVKRNLDSATSPQNGDQQNGYGDLFPGHKKTRREAPLGVAISSNGLPPASPLGQSDKPSGADALQSSGKHSLGLDSLNKKRLADSSLHLNGGSNPSESFPLSLNKELKQEPVEDLPCMITGTVGSISQSNLMPDLNLNEQEWKELIEELNRSVPDEDMKDLFNEDFEEKKDPESSGSATQTPLAQDINIKTEFSPAAFEQEQLGSPQVRAGSAGQTFLGPSSAPVSTDSPSLGGSQTLFHTSGQPRADNPSPNLMPASAQAQNAQRALAGVVLPSQGPGGASELSSAHQLQQIAAKQKREQMLQNPQQATPAPAPGQMSTWQQTGPSHSSLDVPYPMEKPASPSSYKQDFTNSKLLMMPSVNKSSPRPGGPYLQPSHVNLLSHQPPSNLNQNSANNQGSVLDYGNTKPLSHYKADCGQGSPGSGQSKPALMAYLPQQLSHISHEQNSLFLMKPKPGNMPFRSLVPPGQEQNPSSVPVQAQATSVGTQPPAVSVASSHNSSPYLSSQQQAAVMKQHQLLLDQQKQREQQQKHLQQQQFLQRQQHLLAEQEKQQFQRHLTRPPPQYQDPTQGSFPQQVGQFTGSSAAVPGMNTLGPSNSSCPRVFPQAGNLMPMGPGHASVSSLPTNSGQQDRGVAQFPGSQNMPQSSLYGMASGITQIVAQPPPQATNGHAHIPRQTNVGQNTSVSAAYGQNSLGSSGLSQQHNKGTLNPGLTKPPVPRVSPAMGGQNSSWQHQGMPNLSGQTPGNSNVSPFTAASSFHMQQQAHLKMSSPQFSQAVPNRPMAPMSSAAAVGSLLPPVSAQQRTSAPAPAPPPTAPQQGLPGLSPAGPELGAFSQSPASQMGGRAGLHCTQAYPVRTAGQELPFAYSGQPGGSGLSSVAGHTDLIDSLLKNRTSEEWMSDLDDLLGSQ

SEQ ID NO: 1463 - DNA, 6449 bp, Homo sapiens
aattctaaggaaaacctggaagcacaatgggagatgacagtgagtggttgaaactgccagttgatcagaaatgtgaacacaagctgtggaaagcaaggttaagtgggtatgaagaggccctgaagatcttccagaaaataaaggatgaaaagagcccagagtggtccaaatttttaggattgatcaaaaaatttgtcactgattccaatgcagtggttcaattgaaaggattagaagctgcacttgtttatgttgaaaatgcccatgtagcaggaaaaaccacaggagaagttgtgtcaggtgttgtaagtaaggtgttcaatcaacctaaagctaaagccaaggagctgggcatagagatctgtcttatgtacatagagattgagaaaggagaggctgttcaagaagagctcctgaaaggcttggacaataagaatcccaagatcatagtggcctgtatagagacactgaggaaagccttaagtgaatttggttccaaaatcatcttgcttaagccaattatcaaagtgttgccaaaactctttgagtctcgagagaaggctgttcgagatgaagccaaactaattgctgtggagatttacagatggattcgggatgctctgagacccccattacaaaatataaactctgttcagttgaaagaactagaagaagaatgggtcaaactgccaacaagtgctcctagacctactcgatttcttcgttcccaacaagaactagaagctaaattggaacaacaacagtctgctggtggagatgctgaaggaggtggtgatgatggtgatgaggtgccacaaatagatgcttatgagcttttagaagctgtagaaatcctttccaaacttcccaaagacttttatgacaaaattgaggcaaaaaaatggcaagagagaaaagaggccctggagtctgtagaagtactaataaaaaaccccaaactggaagctggcgattatgcagatttagtaaaagcattaaagaaggttgttggaaaggacaccaatgtcatgttggtggctttggcagcaaaatgtcttactggcctggctgttgggctaaggaagaaatttggacaatatgcaggacatgttgtgccaaccatcttggagaaattcaaagagaagaaacctcaagtggtacaagccctgcaggaggcaattgatgcaatcttccttactaccacactacagaacatcagtgaggatgttttagcagtaatggataataaaaatccaaccatcaagcagcagacatctctttttattgcaagaagtttccgccactgcactgcttctaccctgccaaagagcttgctaaagcccttttgtgctgcactacttaagcacatcaatgattctgctcctgaagtcagagatgccgcatttgaagcattgggtactgctttgaaggtggttggcgagaaagcagtaaaaccattcctagctgatgtggacaaactcaagcttgataagatcaaagaatgttcagaaaaggtagaactgatacatggtaagaaagctggactagctgctgataagaaggaattcaaacctctgcctggaaggactgctgcttcaggggctgcaggagataaggacacaaaggacatttctgcacccaaaccaggacctctaaaaaaggcacctgctgctaaggctggtgggccaccaaaaaaggggaaaccagctgcaccaggaggcgcagggaatactggaaccaagaacaagaaaggactggagactaaagaaatagtggagcctgagctctcgatagaagtatgcgaagaaaaagcttcagctgttcttccccctacctgtatacagcttcttgacagcagtaactggaaagaaaggctggcttgtatggaagagttccagaaggctgttgagctaatggaccgaactgaaatgccatgccaggcattagtgaggatgctagccaagaaacctggatggaaagaaactaattttcaggtgatgcaaatgaagcttcatatagttgctttgattgcccagaagggaaatttttccaaaacgtcagctcaggttgtattagatggccttgtggacaagattggagatgtgaaatgtgggaacaatgcaaaagaagctatgacagcaatagccgaagcctgtatgttaccatggactgctgaacaggttgtgtcaatggctttctcacaaaagaatcccaaaaatcagtcagaaactctgaattggctatcaaatgccataaaagaatttggtttttctgggttgaatgtcaaagctttcattagcaatgtgaagacagctcttgctgcaacaaacccagctgtgaggactgctgccataaccctgcttggcgtgatgtatctgtatgttggtccctctttgcgaatgttctttgaggatgagaagcctgccctcctatcccagatagatgcagaatttgagaagatgcagggacaaagtccacctgctccaaccagaggaatttccaagcatagcacaagtggtacagatgaaggagaagatggagatgaaccagatgacgggagcaatgatgtcgttgatcttttgccgaggacggagatcagtgataaaatcacttcagagttggtatctaagattggtgataagaattggaagattaggaaagaaggcctagatgaagtggcaggtattattaatgacgcaaaatttatccaaccgaatataggtgaacttccaactgccttgaagggtcgactcaatgattcaaataaaatcttggtacagcaaacgctgaatatcctgcaacaactggcagtagccatgggcccaaatattaagcaacatgtaaaaaatttaggcatccctatcatcacagtccttggagacagcaagaacaatgttcgagctgctgccctagcgactgtgaatgcttgggcagaacagactggcatgaaggaatggctggaaggagaagatctttctgaagagctcaaaaaggaaaatcctttcttgaggcaagagcttctgggctggctggctgagaaactacctactcttcgttccacccctacagaccttatcctttgtgttcctcatctctactcctgcctagaagatcgaaatggagatgtgcgaaagaaggcccaagatgccttgccattcttcatgatgcatttaggatatgaaaaaatggccaaggctactgggaaactaaagccaacttctaaagatcaggtattggccatgctagagaaagccaaagttaacatgccagccaagcctgctccacccactaaagcaacttctaaaccaatgggagggtccgctccagccaaattccagcctgcatcagcacctgctgaagattgtatttccagcagtacagaacccaaacctgatccaaaaaaggccaaagctccaggattatcctctaaagcaaagagtgcacaagggaagaagatgccaagcaaaaccagcttaaaggaggatgaagacaaatccgggcctatttttattgttgttccaaatggaaaagagcaaaggatgaaagatgaaaaaggattgaaggtgctaaagtggaattttactaccccacgggatgaatacattgagcaactaaagactcaaatgtctagctgtgtggctaaatggttacaagatgagatgtttcactcagactttcagcatcataacaaagcccttgctgttatggttgatcacttggagagtgaaaaagaaggagttattggttgcctggatcttatcttaaagtggcttaccctgaggttttttgacaccaatacaagcgtcctgatgaaagcactagaatatttaaaattgctcttcaccttgctaagtgaagaagaatatcatcttactgagaatgaagcatcttccttcatcccctatcttgtcgtcaaggttggagaaccaaaggatgtcattcgtaaagatgttcgtgccatcctgaaccggatgtgccttgtctacccagctagcaagatgtttccctttatcatggaaggaaccaaatccaaaaactctaagcagagagcagagtgcctggaagagctgggatgtctggttgagtcctatggcatgaatgtttgccaaccaaccccaggaaaagccttaaaggaaatagctgttcacataggagaccgtgacaatgctgtacgcaatgctgcactcaacaccattgtaacggtgtacaatgtacatggggatcaggtgttcaaactgattggaaatctttctgaaaaggatatgagcatgctcgaggagaggattaagcggtcagcaaagagaccctctgctgcaccaataaaacaggtggaagagaaacctcagcgtgcacagaacataagctccaatgccaacatgttacgcaagggaccagctgaggacatgtcttccaaactcaaccaagcccgaagcatgagtgggcatcctgaggcagcccagatggtccgccgagaattccagctggatctagatgagattgagaatgacaatggtacagtccgatgtgaaatgccagaacttgttcagcacaaactggatgacatttttgagccagtccttattcctgaacccaagatccgggctgtttctccacacttcgatgacatgcacagtaatacagcatccacaatcaatttcattatctcccaagtagccagtggtgacatcaacacaagtatccaagctctgacacagctgtttcagatagagagccttgcccgggaggcctccactggagtactaaaagacctaatgcatggcctcatcaccttaatgctggattctcggattgaagatcttgaggaaggacaacaggtcatccgctctgtgaacctcttggtggtgaaggttctggagaagtcagaccagaccaacatcctgagtgccctacttgttttgctccaagacagcctgctagcaacagccagttctcccaaattctcagagcttgttatgaagtgtctctggagaatggttcgactgttgcctgataccatcaatagcattaacctagacagaattcttctggatatccacattttcatgaaggtcttccccaaagagaaactgaagcaatgcaaaagtgaatttcccataaggaccctaaagaccctgctacacaccttatgcaaattaaaagggcccaagatcctggaccacctaacgatgatcgacaacaaaaacgagtctgagctggaggcccatctctgccggatgatgaagcacagtatggaccagactgggagcaagtctgataaggaaacagcaaagggagcatctcgaatagatgcaaaatcatcaaaggccaaagtgaatgatttcttagctgagatttttaagaagattggctctaaagaaaacactaaagagggactagcagagttatatgaatataagaagaaatactcagatgctgacattgaaccatttctgaaaaattcctcacagttcttccagagctatgtcgaaagaggccttcgggtgattgagatggagagggagggcaaaggtcgtatttccacttcaacaggcatctcccctcagatggaagtcacatgtgtgcccacgcccacaagcacagtgtcctccataggtaacacaaatggggaagaagtggggccatctgtctacttggaaaggctaaagatcctccgacagcgatgtggtctggacaacacaaagcaagatgaccgacctcctttgacctctttgctctccaaaccagcagttcctactgtcgcctcttccacagacatgctccacagcaaactctctcagctccgggagtcacgggagcagcaccagcattcagacctggattctaaccagactcactcttcaggaactgtgacctcctcctcctccacagctaacatagacgacttgaaaaaaagactggagagaataaagagcagtcgcaaatgaagctgccccactcccccggcaccctgcagctttagtttactaaactagaagtcctcatagtttaaaatggcctcagcaggcctagtgtatacaaactggttgtatgtatcatgccgtggagctagggggaggggtcattgtggcacaagtatttgtacatactctgcttctctctgtcagcgtcctgctgctctagaagactgtccgtggatgagtttagtgtacagacttgtaaacagctgccccctctctgctcagtctagttcccaggtccttttcttttctttttaattgctcatttgtaaaattgtcctaatctttcctagctttttaatagttaatattagaaactctttaatagttttcctttcagtttgtgagctcttctctgtcgccctgaagggtcactgtattctgtatgaatccatggcatgatacaactaatttaagagtcttttataaataaagtttgcattaactaaaaaaaaaaaaaaaaaaaaaaaa

SEQ ID NO: 1464 - protein, 1972 aa, Homo sapiens
MGDDSEWLKLPVDQKCEHKLWKARLSGYEEALKIFQKIKDEKSPEWSKFLGLIKKFVTDSNAVVQLKGLEAALVYVENAHVAGKTTGEVVSGVVSKVFNQPKAKAKELGIEICLMYIEIEKGEAVQEELLKGLDNKNPKIIVACIETLRKALSEFGSKIILLKPIIKVLPKLFESREKAVRDEAKLIAVEIYRWIRDALRPPLQNINSVQLKELEEEWVKLPTSAPRPTRFLRSQQELEAKLEQQQSAGGDAEGGGDDGDEVPQIDAYELLEAVEILSKLPKDFYDKIEAKKWQERKEALESVEVLIKNPKLEAGDYADLVKALKKVVGKDTNVMLVALAAKCLTGLAVGLRKKFGQYAGHVVPTILEKFKEKKPQVVQALQEAIDAIFLTTTLQNISEDVLAVMDNKNPTIKQQTSLFIARSFRHCTASTLPKSLLKPFCAALLKHINDSAPEVRDAAFEALGTALKVVGEKAVKPFLADVDKLKLDKIKECSEKVELIHGKKAGLAADKKEFKPLPGRTAASGAAGDKDTKDISAPKPGPLKKAPAAKAGGPPKKGKPAAPGGAGNTGTKNKKGLETKEIVEPELSIEVCEEKASAVLPPTCIQLLDSSNWKERLACMEEFQKAVELMDRTEMPCQALVRMLAKKPGWKETNFQVMQMKLHIVALIAQKGNFSKTSAQVVLDGLVDKIGDVKCGNNAKEAMTAIAEACMLPWTAEQVVSMAFSQKNPKNQSETLNWLSNAIKEFGFSGLNVKAFISNVKTALAATNPAVRTAAITLLGVMYLYVGPSLRMFFEDEKPALLSQIDAEFEKMQGQSPPAPTRGISKHSTSGTDEGEDGDEPDDGSNDVVDLLPRTEISDKITSELVSKIGDKNWKIRKEGLDEVAGIINDAKFIQPNIGELPTALKGRLNDSNKILVQQTLNILQQLAVAMGPNIKQHVKNLGIPIITVLGDSKNNVRAAALATVNAWAEQTGMKEWLEGEDLSEELKKENPFLRQELLGWLAEKLPTLRSTPTDLILCVPHLYSCLEDRNGDVRKKAQDALPFFMMHLGYEKMAKATGKLKPTSKDQVLAMLEKAKVNMPAKPAPPTKATSKPMGGSAPAKFQPASAPAEDCISSSTEPKPDPKKAKAPGLSSKAKSAQGKKMPSKTSLKEDEDKSGPIFIVVPNGKEQRMKDEKGLKVLKWNFTTPRDEYIEQLKTQMSSCVAKWLQDEMFHSDFQHHNKALAVMVDHLESEKEGVIGCLDLILKWLTLRFFDTNTSVLMKALEYLKLLFTLLSEEEYHLTENEASSFIPYLVVKVGEPKDVIRKDVRAILNRMCLVYPASKMFPFIMEGTKSKNSKQRAECLEELGCLVESYGMNVCQPTPGKALKEIAVHIGDRDNAVRNAALNTIVTVYNVHGDQVFKLIGNLSEKDMSMLEERIKRSAKRPSAAPIKQVEEKPQRAQNISSNANMLRKGPAEDMSSKLNQARSMSGHPEAAQMVRREFQLDLDEIENDNGTVRCEMPELVQHKLDDIFEPVLIPEPKIRAVSPHFDDMHSNTASTINFIISQVASGDINTSIQALTQLFQIESLAREASTGVLKDLMHGLITLMLDSRIEDLEEGQQVIRSVNLLVVKVLEKSDQTNILSALLVLLQDSLLATASSPKFSELVMKCLWRMVRLLPDTINSINLDRILLDIHIFMKVFPKEKLKQCKSEFPIRTLKTLLHTLCKLKGPKILDHLTMIDNKNESELEAHLCRMMKHSMDQTGSKSDKETAKGASRIDAKSSKAKVNDFLAEIFKKIGSKENTKEGLAELYEYKKKYSDADIEPFLKNSSQFFQSYVERGLRVIEMEREGKGRISTSTGISPQMEVTCVPTPTSTVSSIGNTNGEEVGPSVYLERLKILRQRCGLDNTKQDDRPPLTSLLSKPAVPTVASSTDMLHSKLSQLRESREQHQHSDLDSNQTHSSGTVTSSSSTANIDDLKKRLERIKSSRK

SEQ ID NO: 1465 - DNA, 1632 bp, Homo sapiens
ggcacgaggcgggaagtggcgggcggagtcccgggtccagtcgccgcctcagctaccgccgctgccgccgccgccgccgccaccgccagtggtgagaccccgacctggcgggtcagcgctgggcgtgcgtgcgggcaggcgggggcgctgacgagaagcaggaagagggtgcagtgccggcgtgggcggccggccgaggcggaggcgcaggaagggggcggcgagtcgtgcgaggctgcccttctcactcagcattatggatccaagcctgttgagagaaagggagctgttcaaaaaacgagctctttctactcctgtagtagaaaaacgttcagcatcttctgagtcatcatcatcatcgtcaaagaagaagaaaacaaaggtagaacatggaggatcgtcaggctctaaacaaaattctgatcatagcaatggatcatttaacttgaaagctttgtcaggaagctctggatataagtttggtgttcttgctaagattgtgaattacatgaagacacggcatcagcgaggagatacgcatcctctaaccttagatgaaattttggatgaaacacaacatttagatattggactcaagcagaaacaatggctaatgactgaggctttagtcaacaatcccaaaattgaagtaatagatgggaagtatgctttcaagcccaagtacaacgtgagagataagaaggccctacttaggctcttagatcagcatgaccagcgaggattaggaggaattcttttagaagacatagaagaagcactgcccaattcccagaaagctgtcaaggctttgggggaccagatactatttgtaaatcgtcccgataagaagaaaatacttttcttcaatgataagagctgtcagttttctgtggatgaagaatttcagaaactgtggaggagtgtcactgtagattccatggacgaggagaaaattgaagaatatctgaagcgacagggtatttcttccatgcaggaatctggaccaaagaaagtggcccctattcagagaaggaaaaagcctgcttcacagaaaaagcgacgctttaagactcataacgaacacttggctggagtgctgaaggattactctgacattacttccagcaaatagggaacagttttgccctggaacagagttacagatacacaatcaagagtgttcttgctgatgctcggggtctgaagactgtcttcctatctgcttcttgcggctgaggagaggagcagttcagtttacaaaacaagtgcaaattaccaaactcaaagcttatttgagtagaatgggctcatgggcaatgtgatgttccctgttaaccttctgttactccctgggagaaaggcgctgagcgtggcatgcaggtgtctttgctgtgtttttctccacttctaaatggttcctggttcctttcttcctcgtttgttactttagagcaagtttgcccatagtcttgaatgcaatatttgtttattccaaaagaacatatttataataaaatcactgtagaaggatttttaaaaaaaaaaaaaaaaaaaaaaaaaaaaaaaaaaaaaaaaaaaaaaaaaaaaaaaaaaaaattaaaaaaaaaaaaaaaaaaaaaaaaaaaaaaaaaa

SEQ ID NO: 1466 - protein, 291 aa, Homo sapiens
MDPSLLRERELFKKRALSTPVVEKRSASSESSSSSSKKKKTKVEHGGSSGSKQNSDHSNGSFNLKALSGSSGYKFGVLAKIVNYMKTRHQRGDTHPLTLDEILDETQHLDIGLKQKQWLMTEALVNNPKIEVIDGKYAFKPKYNVRDKKALLRLLDQHDQRGLGGILLEDIEEALPNSQKAVKALGDQILFVNRPDKKKILFFNDKSCQFSVDEEFQKLWRSVTVDSMDEEKIEEYLKRQGISSMQESGPKKVAPIQRRKKPASQKKRRFKTHNEHLAGVLKDYSDITSSK

SEQ ID NO: 1467 - DNA, 76798 bp, Homo sapiens
aagcttgaagaattaacaccaacccttcaaaaactcttctaaaaaatagaacaggaagaaatatttttcaactcattctatgaggccagcattaccctgataccaaagacagaaaaacacattataagaaaataaagttacaaagcaatatccttataaatatagatgtaaatatcctcagcaaaatattagcaaatcaaattcagcagcatattaagaggattatacacattgaccaggtaggatttatcccaggagtacaaatgtggttcaatgtacaaaaaccaatccatatagcacttcatattaatagaaagtcacatgatcatcctaatgcagagaaggcatttgacaaaatctaacatccttttatgataaaattactcaacagatgaagactagaaaggaacttcctcagcctgacaaagagcatctatgaaaaacctataaacaccatacttcattccttgtgaaagattgagtgtttcccctcaagatcaagagcaggacaagaatgttcattcatactacttctatttattagggcaattaggcaagaaaaaggaacaaggtggaatccagatcggaaagaaagaagtaaaactatctttagtcacagatgacattataggaactcctaaggaactcacttaaaaaccattagagctcataagcaagttcagcaaggttgcaggatacaagattaatacacaaaaatcaatagtatacatttgcagtaaaggatcaaaaacaaaattaaaacaacactttcatttacaatagcatcaaaaagaataaaatacttagaataactttaaccaaagaaaagcaacacttaaacacagcaaactacaatgtgctgttgaaagaaattaaagaagcaccaccaagcaatctgacctgagaaagcatgcaggttcaacagaatgagtcctgctcttcagcaagcacccatcttgtgttcaagctgggtctgtgaggtaagtctggcaacacagagatggacacacaaccaaatctggaatgcagataaggccaagggaaggtggatcaatcattggaaacattcaacaatccatggaagaaatgttaaaaatagaatctcagggtctaatgaagtcggaatagctctcttctaggtatttctgttgaaaactgttgaataattggataaagtaaaagataagtatcggggattattaggtagcaatgaatgtgtaataaatgtaaaaagaggggcaagtgcatacaaggaagtgtatgctactgggtttctgttgaattgtgcatggaagaccatcagcagttcaagtcaaaaagcttgtcttgagggactgtgccaggctttgcagctacaaacatcatggaggaaggtgtctgcccattagaagcccagagcccagacggacggactagagcaaatcctctccctcatggagctagatgggaaaacaaaactatctgataactaacatgcaattttacatctcttaccttgtttaatcctcacaaccaccctgatgagtagtagtattatccccatttcgtagatgaagaaacaagttcttcaaggggaagggatcctcggagtagcatatgaatgagaggcagaaccagagtcaggacctatatcttgtcttctccttcctaaaactagaaaagtacccacaaccaggcagtgtttttggtgcagaggaagcagtagtgaacaaagtacgcaaaagtctctacctttagtgctcacattattgtggaggaagacaacaaacaataatcccagtagagaaattagaatgttttgctaaaaagtccttaggtggggtgtcatgatgttggtatcttatgttcaaaaaacagtaagttgaaactggggttgcatatattagtgctgttgtactagtcctttcattttctggattttaaatgttttcataatttaaaagttgggggaaaacttaaagaagaccttaataaatggaaagacatcccatgttcatgattggaaggtgtagtaatgttaagatgtcaaattcaacacagtctgcattaaaattccacttggcctgtttgcacaaactgacaaattggccctaaaattcatttggaaattaaagtgactcagaatcttcaaaataattttgaaaaagaaaaagctgtaggactcatgcttcccaatttcaaaacttagtacaaagatactataatcaagacattgccaatcaaaccacaatgagatatcacttcacacactctatgaggggtataacagaaaagacagattaaaagtattgttgaggatgtgtgaagaaattgaaacccttgtgtgctgctgctgagaatgtaaaatgtataaccgctttggaaaacagcttgcagttcctccaaaagttaaacatatatacacatatatataaaatatattattatgtatatataacatattatatatatatgggttagttttgttttgttttttttgttttttttttttttggagacagattcttgctctgtcacccacgctagagtgcagtggtgccatctcggctcactgcaacctccgtctcctggtttcaagcaattctcctgcctcagcctcctgagtaactggaattacaggctggaattacaggcaggcaccaccatgcccagctagtttttgtatttttagtagagacggggtttcgccatgttggccaggctggtctcgaactcctgacctcaggtgatccacccacctcagccttccaaagtgctgggattacaggcatgtgccaccgtgcctggccaacatagaattatattatccagcaattccattcctaggtgtatacccaagacaactgaagacatatgtccagacaaaaacttgtacatgaatgttcatcacagcatggggattcacaatagctgaaaagtagaatcaatgcaaaagtccatcaactggtgaatggataaacagaatgtggtgtatacataaaatggaatataattcagccacaggaagggatgaagtactgttatatgctacaccatgaatgaaccttgacaccattatgttaaatgaaagaagccagtcataaaagctcacatatttcattattaaatttgaatgaaatgtccagaataggcagatacttactgtccacagaggtagaaagtagatgaatggttaccaggggctaggagaagagggaaatggggagtgactgtttaatgggtacagagtttcttttaggggtgatgaaaatgatctagaattagataattgtgatggtgacaaaactttgttaatatactaaaaaccaatgaattggctttaaaccaattgaattttaaagtatattttgaaagagcggatattatggtatgtgaattatacctcataatgaaaatatgattgcattgttcaaaagagtatgaaaggaagcacacaaaaaatatgaaacataaaatatggctctttttattctaaagtgtagaaattgaacattttgtctcaggatataaaacaaaaacaaagaaagctaaaagcccttccatttggccatcttggagtaagacctaccacagtccagtgccttttactcagtcccacagcctagcctattgtttgcgtgaaactctgtagcttccactcctgtttgactgttgggtgtaaagttatgagtgaccacattgggggaagggaggaaaactccccataaaagtatatcctgggggcctgaggacagacgtgggcccagcgacagatgtgggtccaggtatcagaacgtgatatgcctacttgtccctatctcattgtccacacatagggcttggaagatggccatgttttatatcatgtgacctccaaccaatgagctgattggcttcttcaacaagagcccaggtagagattgctgtctagaagagcccatcagattctagagaatcaggcctctggcagtagggcatggtggctcatgcctgtaatcccagcactttgggaggctgaggtgggcagatcacctgagttcaggagttcgagaccagcctgaccaacatggagaaaccctgtctctactaaaactacaaaaaattagctgggcgtggtgatgcatgcctgtaatcccagctactcgggaggctgaggcaggagaatcgcttcaacctgggaggcagaggtcgcggtaagccgagatcacgccattgccctccagcctgggcaacaagagcgaaactccgtctcaaaaaaaaaaaaaagagagagagaatcagctctttgacagtggaaactcccctgggaagatgtcatagggtcctcagggtcagacacagagagaaggagacattaggacagagagaagaggcaagaaaaaaacataccttgcagtctgtgaggaacagagtggcccccaggggcctccagcccaggttttggatcaaagctcctcaaagtttaaggcgcatttggatcatctgaggatcttatgaaaatacagactctgtctgattcagtaggtctgggtttgggggtgggagcctgttagtatatttctaacaagctcccaggcaaggctgctgctgctgctgatctaatgaccacagtttgaggctggacagagtggctcacacctgtaatcccaacactttgggaggacaaggcaggagggtctcttgaggctagaactttgagaccagcctgggcaacgcagcaggacctcgtctctaaaaaacaagagagaagaagaaaaaggaaacaaaaagaagacctcaactagagtaggaagcagccaggccacatatctcttcaatggagaaaagagtttttttcttgagtaaattggagtgtacccatgttccttgtcaatgacggtaactttaaatgccaagaatgtgagagaggccgaggcggcggatcacatctttataatcctagcactttgggaggctgaggtgggaggatcacttgagcccaggaattcaagaccaccctgggaaacaaagtgtgatgccctctctacaaagtcaaaaaattagccaagcatggtggcatgtgcctgtgatccgaactacacaggagggtgaggcagaaggattgtttgagcccaggaggtcgaggctatagtaagctgagtttgcagcactgcactcactccagcctgggcaacagcaggaccctgtctcaaaaaaaaaaaaaaaaaaaaaaaaaaagaatgtgagagaccatggggaaggtgtggccctggggtaggggctaggagactacagaacaactgctagtggccccatcactgcccagaggagacagtgacctgtccaccctcatgacctctttggactccttggacaggactggctacacatgaaaatgtggggacccttatttttaaattgttaagaatgtcaagacagcaacaacaaagttttaaaccaagtgcatggcccttctgcgttgtaggcccacgaggcaggcagactggtattcacatccttgtatagccccctccccttgagtgtgactggggtctgtgctttattgcttggaagcaaggcttatccctaagccttattttcggggaggtggatttgagagctattatcctacctccttgcttggcacccttgtgaataaatctttagtcttttgcaaaactcatgtcacagtgattaatttactgtgcatgggcagaacggacctggtcctggccagtaacacccacgaggcttcctaggagactacactgccaagagagcactgagcaatggttgggagcattctgtctaaatgacttttctcttctttctaggccgggcacggtggctcacgcctgtaatcccagcactttgagaggccgaggctggcaggtcacttgaggccaggagttcaagaccagcctggccaacatggtgaaaccctgtctctactaaaaatacaattagctgagcatggtggcacatgcctgaaatcccagctacccgggtggctgaggcacgagaatcgcttgaacccaggaggcagaggttgcagtgagcagagattgcaccactgcacttcagcctgagtgacagagaggggcaaagtcaaaaaacaaacaaacgatcatcccacacactctcacttttatcttgtttctataaattaataaatacagcctttgtgagttggtttatgtgagtcagacccaaagaaaatgatcaatcctgaaacgtggaccaaattagttgttttgttttttagttggagttactctcttgtcgcccagcctggagtgcaatggcgcagtcttggcacacggcaacctctgcctctagagttcaagcgattctcctgcctcagcctcctgagtagctggaattacaggtgcatgccaccacgcccagataatttttatatttttagcagagatagggtttcaccaagttggccaggctggtctcaaactcctgaactcaggtgatccgccggcctcagcctcccaaggtgctggggttataggaatgagccaccactcccgccccaaattaggttttgaacttaaaagacaggctgagccttgaaccagaatcctgacagctcctccttgggcctctgactggagttatccagaggtgaggataaggcagccattgccttctctgagtgtctacctcctttcaaaactttaacatggaaatctgaatttctcatctttccttaattttttttccagttaaaaatcattattactggccagttgtagtggctcacatctgtaatcccagcaggtggcagaggtgggaggatcagcctaggcaacatagtgagaccctgcctctacagaaaaaaattttttttaactagctgggcgtctttgtgcgcacctgtagtcccagctacttggggaggctgagatgggaggatggcttgagcccaggagttggagtctgtagtgagctgtgatcatgccactgcattctaccctgggcaagagagtgagactctatctaaataaaataaaacagttgttacttccactttatttgcagaaatgttccttattctctagaaaacattatgcgttggctgacacactttcagtgggattcgttttagaaaatgacatgtgaccctgatactatttgacaggctccatggcagcaaggggcaggcctgggcttacggctcagcagatgaatccaggggggtggacttgcaaggactctggagggctctagcttccctgtcattttaaagatggagaaacacaggcctggagaaaggaagaaataaacccagggaatgcgatagatggcactgtgctggcaggggcaggaagaccaaggctgtgacattccagggagtgcgactgcagtgaagcgagtgaccacaaaacactgaacgtaagccctgaggctttgccacttgctggcaccaaggactctgcagtgttgagccaagaggatggactttggagccagactttctgggtctataatcattcagtgtctgtctcctcctctaaaatgcggacggtgggaaattctgacacacgcttcaacacagatgcaccttgaagacattatgctaagtgaaatgagcgagccaggcacgaaagggatgggactggggcctctctgtgcgtccccctgagagacaacggtctcttggccacccaccctgatcccacaggagccaggcgggcccagccctgagacaggccgcccgccgcccgcaattggactaaagagtgtcccaggcgtccgtgccgcccaatggggcacagcggtcggggtgcgtagccgcaggggcgtggtctgaggtccgagacccgagtcctggcactggagtttgctgactccctctggtttccggtcaggtcggtcggtccccactatgggcctggagctgtacctggacctgctgtcccagccctgccgcgctgtttacatctttgccaagaagaacgacattcccttcgagctgcgcatcgtggatctgattaaaggtaggtccagcctcgggtttggggaaccgaaaagtcaggaaggggacaggtaggcatacatagcttagggaacttctcccagcgccaccttcttcctggggccattgctggtctggtttggagaccgaacagagaaaggtgagccagcagggagatccaagagtcagggctccccaaaactctgctcggtctcacggaatagaccacggggttcccctgaggccgaataaaggggtggggatcatgaagagaagccagacaggaggacaaaaacgggcgcagctgggtgcaggggcacacgcctgtagtcccagcaactcgagaggctggggtgggaggatcgcttgagcccaggaattccaggccgcagtgcactatcatggtgcccttgaatagccactgcactcccgtcagggcaatctagcgagaccccgtcttaaaaaaaaaaaacaaaaaaaaacaaaatgaaagcaggtgtgacctcggcctagggaaaggtgggatgagagaggtcaagggtgccaagtgtagagactgggacagcgtcaagtcccttctttatggcccagctgctgagattctgcaacagcaaacagctcaggacgtgactttccatccctgccctctgcactcgtccagtctgcattggggtccctctttgtcccttccttcctctgttcctcctgttttgcctctgaccttgtccttgtccttttttttttgagacagagtcttgcttttgctttgttgcagtgcagtggcacggatctcgaatcactgcaaccaccacctcccgggttcaagcaattctcctgcttcagcctcctgagtagctagattacaaatgtgtgccactatgtctggctaatttttttgtatttttaacagagatgggatttcacaattttggtcaggctgttctcgaactcctgacatcaaatgatctgccggcttagcctcccaaagtgctgggattacaggcatgagccactgtgcctggcccaaggcattttgtttatttgtttgtttgtttttgagacggagtctcgctctgtcgcccaggctggagtgcagtggcaggatcacagctcactgcaacctctgccgcccgaaaccttgtcctctgcctcttgttcctgctggggaggtaggttgccccaggctgctgatgctggaagcagcagggggaccctggggcttgatgagccctacaccctgttttgtttctctagcatgcctccaaggcccttgaggactcagctggcaggcccaggcccaggcccagtgcagggtggggtagtaggaggggttggaagcagaatccaggtatggctggtggggcaagtaaggcgactctacttggctaagccttctgcccagggctcccactccatggctggccctctgcctgaaacttctccacataatctcttctgcaaactgcccactgtcctgcgcaaggacttcctctgcagagtgtggagtagaggaaagggaatgggggacaggacaagaggacgtccaagctggttgtcaaatgtagtggtgcagagggaagtgtgttttcccaggagacagaggagggttttcctggtgaaggaacagtctgaagggagggtgaagagagggtagcaggctgggcatggtggctcacacctgtaatcccagcactttgggaggccgaagtaggaagattacttgaggccagtagttcaagaccagcctgggcaacatagtgagaccccaactgtaaggggaataaaagtttggggcacagggggtggtagcaggtatgctacacacagctccacagtgcccagggcagggtgaacaaagggacatggtggggccagtagaagttgcttctaagtaggtagataccagaaaaagaccacttctctgtgtttcatgaccctgccttagaattaatggtggaagggacaaggtagtcagtcccctcaggtgacctatcgtgcagcttggggtgctctgattgtgagttcatgaagctggcaatagtggaaagaggagatgggtagggtgcatgcaaaggtccaggaaccacaccctgcacagtgagctctgttgcagaggggcagcctgtgggaggaggctgtgcctacatgacttagcaaggggtgttgtctattttgtaccagccggtggagtggtctcctcctcctcccgcaggggcccttccagtctttgccaaccaggagtgcagactggtgggaagaagaactgtgaaactggggccagagcattgcagggaggggcacaggccatggcgggctcagcgttctcctcccaccacccaccatgctggactcttcccaggtcagcacttaagcgatgcctttgcccaggtgaaccccctcaagaaggtgccagccttgaaggacggggacttcaccttgacggagaggtaactgggaccctaggactgctgccaggcctgctggaaccatcctgttctaaccctctatttcatagacaaggaaactaaagtcttcagaggcagagagtctctgtgccccgcatcctgcagagagtcagtactggaccccaggcccttgccttcctgctattccagttcaccctgatgattagaaaagcaaatatctactttacttccacaccagtgctttggttgctggtgagtggtgagagtatccttgagacagggtaggccagaggacgatggcagctttgcccaccatggggcaggcctctggccaagcttgtgtggcgatggctcagtggcatctgggctgcccggtggctccatctctgggctgcagcttcccaggatgggtcttccccatggaagagccaccagatatggacgtcttacatcacagctggtcccaagaagttgaatcctcttcaggaaaagccaatctttccccagttctgccccttttgtcaccagagtcacccttcccctaacaagaacctggagtttgtgctttaaagctcatctctgaaatctcaggatggacgcacctccgatgaattcctctgacattctgccagggcccttcttcctccctggtgccccaggtgtcctgagtccttgtgtcactcagcgttgtgacccccaggtaccagccagagtcaatgtgcaatctctgcctctgtcactactctcaccttcaggtctgtggctcacagagacctgcagccctcctcagaggtggcttgaacaattggctgggagcaaaaggagctcctgggcaccctgcacagacaacggagtcgttaagctgggacacgtgtgtagccccagcttaaaagagaatataggcccgtggcagatacagaggttttctgcccttttggcctgcatgcccaacctttgggaaaccccaagttcctgaaagcttttctgtgtctccaaatggacacatcctgtgtccttccaggtccatgctcatctcatcaccatggcggccctcaaaacccagggaaggaggagagtgccagggggccttgtctgttctgttgttctaggatcctgcagctgcaggagtgcttcctgagtggtactttaggaagccaaactaccccagtcagcttagataggagctgattcttggcagaaagaatgacagaaagaacaaagggacacggaagcctttttgaacagtcaggccatcagaggctggtcggaatcccagcagatgagagtggataccgaatggaaagaactgagcttctttaaagctcagctttgatgccccgttctcctggaagctctctctggttctctgatcagaaactgtctctaaacatttggcaagacattctgttgtgggattttgcctggtggtaggaaaagcttgggtattagcctcagaaagattctcagctctgccattaagagctgtgtgccctagggcaagtctctgcctttctaagcctggttttcttctctggaaaatgaggctaatactttggcaaattgtcagaaaggttaaagaagtgtgctgggcacagtggttcatgcctataatgccagcgctttgggatgccaaggctggaggattgcttgaggataggagtttaagaccagcctggcaatacagtgagatcccatctctacaaaaaagaaaaaaggtagccaggcatggtggtgcactcctataaaaattgaagctgcagtgagctgagactgcaccactgcactccagcctgggtgactgaggaagaccttgtctccaaaaaaaaaaaaaaaaaaaaggccaggtgcggttgcttatacgtgtaatcacagcactttgggaggccgaggcaggcagatcacaaggtcaggagttcgagaccatcctggctaatatggtgaaaccccatctctactaaaactacaaaaaattagccaggcatggtggcacgcacctgtagttccagctacttgggaggctgaggcaggagaatcacttgaacccgggaggtggaggttgcagtgagccaagatcgcaccactgcactccagcctgagcgacagagcgagactccgtatcaaaaaaaaaaaaaagcgactatgtatgaaatacccagcacagtgcccttcccttacccatcatgacccccacacccacagtgtggccatcctgctctacctgacgcgcaaatataaggtccctgactactggtaccctcaggacctgcaggcccgtgcccgtgtggatgagtacctggcatggcagcacacgactctgcggagaagctgcctccgggccttgtggcataaggtgaggctgggaatgtggggggcggcagcgagagcattccccaaaggtgttcaggcaccagtctcttcttttcagttttggattatttctactgacctgtctttgccttcacagattctttcctctgttgtgccaaattgctattaagcccatccaatacattctttgtttgagatatgtatttttcagctctggaaattccatttggttgttttttagaatttccacttctctgatgaaattcaccatctgttcatccattttatctgtcttttcttgtaaattctttaacatatttatcactgttacctaaaaatctttgtcaactaatttcaacacgtaggtgttctgtgggtctggtttttttgttttgttttgtttttgagatggggtctcactctgtcacccaggctgagtgcaatggtgcgatctcagctcactgcaacctccacctcccaggctcaagcgattctcctgcctcagcctcctgcgtagctgggattacaggcacccaccagcacacctggctaacttttgttatttgtagtggagaccaggtttcaccatgttggccaggctggtttcgaactctccacctgaagtgattcgtcctccttggcttcccaaagtgttgggattacaggcatgagccaccatacccagcctacgggtctatttctattgattgttgttttctccctcttgattatgggtcacatttgcctgcttctttgcatgtctcatgatgtattatcattattttttatttttttgagacggactctcactccattgcccaggctggcgtgcaatggcacgatcttggctcactgcaacctccgcctcctgggttcaagcgattctcccacctcagcctcccaagtagctagaattacaggcacctgccatcatgcctggctaatttttgtatttttgtagagacagggtttcaccatgttggccaggctggtcttgaactcctgacctcaggtgatcctcccatctcggcctcccaaagtgctgggattgtaggcatgagccaccatgcccggcctcatgatgtatccttgtgtgccagacattatgataaaagaagagcagagattgaattgcataataaacacccccaagaaagggcttgcacttccctgtgtcaggtagccaggatgtgaggctgttctcttctaagctaatcaggaggtgggctgggttgcaggtttagttggtttcagtttatctttggtttcaaatatcttgaatgtgagatcaggtcactagctcagtctagcatggctttggaatctaatcaccaactacgatgttgcctgtaagatctctctgcttttcatccctgcccccagttcccaaactgctgctcagtcagaaaagcccatgcctgtgacagtctttctcccagcctgcttgggcccaaggaaatgaaattggaatgaaagtagctcatctaggaacggcttatgcctctctggaatttagttcatttagtcaagtgctgtccgatagaagtataaagtgagccacatacgtaattttaaattttctagtaggcacatttaaaaagtaaaaagagtccaggcacagtggctcatgccaataatcctagcactttgggaggccaaggcagtggatcacctgaggtcaggagttcgagaccagcctggtcaacatggggaaaccttgtctctactaaaaccacaaaaattagccaggcttggtggcctgtgcctataatcccagctactcaggatgctgaggcaggagaattgcttgaacccagggggcaaagttggcagtgtgccgagatggtgccacttcactccagcctgggtgacagagctgaacactgtctcaaaagaaaaaaaaaaagtaaaaggaaattgatatattttacttaacccaatgtgttgagaatattatcattttggccaacaagtacaagaaaagatgcttggccgggcgcggtggctcacgcctgtaatcccagcactttgggaggcggaggcaggcagatcacaaggtcaggagattgagaccatcctggctaacacagtgaaaccctgtctctactaaaaataaaaaaaaaattagctgggcgtggtggcgggcacctgtagtcccagctactcgggaggctgaggcaggagaatggcgtgaacccaggaggcggagcttgcagtgagccgagatcaccccactgcactccagcctgggcgagagagcaagactcagtctcaaaaaaaaaaaaaaaagaaaagatgctcagcatcactaatcattagggaaatgcaaatcaaaactaactccctaccccagtaactcccgactttgcctgcccaatccccaggtgatgttccctgttttcctgggtgagccagtatctccccagacactggcagccaccctggcagagttggatgtgaccctgcagttgctcgaggacaagttcctccagaacaaggccttccttactggtcctcacatctccttagctgacctcgtagccatcacggagctgatgcatgtgagtgctgtgggcaggtgaacccactaggcagggggccctggctagttgctgaagtcctgcttatgctgccacaccgggctatggcactgtgcttaagtgtgtgtgcaaacacctcctggagatctgtggtccccaaatcagatgctgcccatccctgccctcacaaccatccatccccagtctgtacccttttccccacagcccgtgggtgctggctgccaagtcttcgaaggccgacccaagctggccacatggcggcagcgcgtggaggcagcagtgggggaggacctcttccaggaggcccatgaggtcattctgaaggccaaggacttcccacctgcagaccccaccataaagcagaagctgatgccctgggtgctggccatgatccggtgagctgggaaacctcacccttgcaccgtcctcagcagtccacaaagcattttcatttctaatggcccatgggagccaggcccagaaagcaggaatggcttgcttaagacttgcccaagtcccagagcacctcacctcccgaagccaccatccccaccctgtcttccacagccgcctgaaagccacaatgagaatgatgcacactgaggccttgtgtcctttaatcactgcatttcattttgattttggataataaacctgggctcagcctgagcctctgcttctaactctaatgtgtgatttatttgactttcctctgtcccagacctggtcatggtctctatgcaaaagacaacccccttcccaggccgtgtgggtcagcttccccctgatgtttgccaagagtgaaattaataaatgtggctgaggccgggtgtggtggctcacgcttgtaatcccagcactttgggaggccggggcagggggatcacgaggtcaggagatcgagaccatcctggctaacacggtgaaaccccgtctctactaaaaatacaaaaaattagccgggcgtggtggtgggtgcctgtagtcccagctactcgggaggctgaggcaggagaatggcatgaacccaggaggcggaccttgcaatgagccgagatcgcgccactgcactccagcctgggcaaccgagcgagactccatctcaaaaaaaaaaaaagtggctgagtgtggtagctcatacttataatcctagtactttgggaggtccaggttggggggattgcttgagtccaggatttcaaaacaaacttttttttttttttttttgagatagtgtcttgctctgttgcccaggctggagtgcaatggcatgatcacagctcactgcaacctccacctcccaggttcaagcgattctcttgcctcagtctccccagaagctgggattataggcacgcactatcacacctggctaatttttgtgtttttagtagaaacagggtttcaccgtgttgtccaggctggtgtcaaactctgtacctcaaatgatctgtgcacctccacctctgaaagtgctgggattaccatgagccactgtgcctggctccccaaaaaaatattttttcagagatggggtctcactctgttgcccagcctggagtgcagtggcacagtcatggctcactgcagccttgacatcccaggctcaagcaatattcccacctcagcctcctaagaagctgggacaacaggtgcaccccaccacgcccagctcatttcttttttatttttgtagagacagggtcttgccatgttgcccaggctagccctgcactcctgtgctcaagagatgctcccacctctacctcccaaagtgctgggattacgggtgccaagacaccgcacgcaaccaaaagaaattttttttttaattagtcaggcgtggtgatgcatacctgtagttctagctacttgggaggctgaggtgggaggattgcttgagcccaggagttcgaggctgcagtgagctctgattgagccatagcactccagcctggggcaacagaacaagatcctgtctctaaaaacacacaaagaaacccaaaacaaaacaaaacaaaacatttcctgtagccttctaattatcagagaaagtagtttatctgaccgctcagggcccagcagcatcccacatttcttggctataagcatggtgacctaacagtcggctgagttagcctcccaggacatgacccttactggtttttggattgtgtgtgtgtgtgtttttttttgtttgtttgtttgtttgtttttttgagaaggagttttgctctttttgcccaggctggagttcagtggcaaaatctcagctcaccacaacctccgcctcccgggttaaagtgattctcctgcctcagccttctgagtagctgggattacaggcatgcaccaccacgcccagctaattttgtatttgtagtagagacagggtttctccatgttggtcaggctggtctcgaactcccaaccacaggtgatctgcctgcctcggcctcccaaagtgctggaattacaggcataagccactgcgttgggacgactcttactgtttttgttttgttttcttttgcttgttttttggtatttttttgagacagtctcgctttgtcgccccggctggtgtgcagtagcgcaatttcggctcactgcaagctccgcctcccgggttcacgccattctcctgcctcagcctcccgagtagcggggactacaggcgcccaccacgtccggctagttttttgtatttttagtagagacggagtttcaccgtgttagtcaggatggtctcgatctcctgacctcataatccgcccgcctcggcctcccaaagtgctgggattacaggcgtgagccaccgcgccctgcctgactcttactgttaatcactagttttgcatttctcttgaggaactggtcaggaagagaaaacctagacagcagctctcctggtcaagacccagtcattcagaagcctaaatggcctgcctaggtgtttggctttaaactgttagcaggaatggagtactctgattgtgttttagaataatattccgggcctactacccctgcgcaccggtcctggcccagggctagctccttggtgagaaactcaaagaagtgggcactgtggctgcggttgtcctcggcggtgcccactacgccgatggaggagatggacagctgcgcgcagggctcggtggacccgctcagcgccctggccaggcccggccgtaccgtcacgttcacaagctgaggggaacatgaaaagttttacccgaagctggagccagtcgggctacgtctggggtcccgacccgagcgcgcgaaagccgaaacgcgcagtgttcgcggggacagggatcccagtacaggccgaggtccctgaaggtcacgtccgggtcatgactggggagggcgacaagggaaagacgtgcggagggggagccgcgggatcgtgaagcacggaaagtcagagcttggcctgcggaatggggtggggggtggtccctggggaaagggatcggggtcgctgttgcggaggcagagcagggacaaggccggacccctggcccaccaacttcccctcgcccagtgctgcccggcccacgctcacgtctgcaggtttgcccaagatggaggcagcgacggcgcacagccgtttctccagccccgcgggcactcggttggcggggaaattcgtgtgcagctctaggaacggcatggcgggcagaggaacggaaacagctctggcggaaaaaagctggagatacccaaggctcgcggaccggagaggaggggcgaggcgctaaaacaacctggcttctcattggctggacagagactcagcgctccccgattggctgcctagggtaccttcccacttctgcaaacaaaagtcacgtgtgccggctctgatttccggaaatccggtcgtctcggccctacgtgtagccccacccactacaagtctttaacccggtagtggccccaccctgtctcttccctgaccctcctgcttggcgtctggtggatttccctctcctcaagctttccgcggtgtggttgcctggtttctagccctattaaaggtctgaacacccctaacatacagacacacacacacctgtaggggtcttccccaagttcgaccctaataaccaatgcaaagtgagtttaaaattttttttaatgatttgccaccatttcgaagtcaggcaatttcatgttcagtatggaaatctgcgcttctcttgggcagtcaggagatgtggttacacgttgcggacgcgggtggggctgggcagggaccgttgggttcacgacatttcccgtccccgcctggttcccattgactgcctatgtagccccttgtgccggtggtgagccactgtccactagggggtggcaaaatatgttatttaaaacatggaaatccgttggtgtggcttaaacatgagtctgtggttagtgtggcaaaatcacttgaattgtacattttaaatatgattgaaattgtggtcacgcaaagtggctgacacctgtaatctcagctctttgggaggccaagaagggaggattgcttgagcccaggagttcaagaccaggctaggcaacatagcaagattcccttcgttgttttctacaaaaaaaaagaaaaaaaaaaaagaatcccagtgttgtggtgtgcacctgtagttctagctacctgggcggaggcaggaggatcgcttgagcccaggagatctagaatgcagtgagctatgactcatttttttcctgtctcttgtctgatgggtttctcttatttttctttgtttgcttttgagacagtctcgctctaagtggagcttgagtgcagtggtatgatgtcagctcactgcaacctccgcctcccaggttcaagtgattctcctgtctcagtctcctgagtgtgccaccgcacccaactaatttttgtatttttaatatagatggggtttcatcatgttgcccagggtggtctcaaactcctgacctcaagtgatctgcccaccttggcctcccaaaatgctgggattacaggggtgagccaccataccaggcctctcttaagggtttctaagagcatcttaaagaacattacctccttctgacatatcttttatcaagatccttcccggttttttgcttgttttatgtttaatccattttttcttacacaacatgtccttgtatatgtttttttgtttgtttgttttttgagacagagttttgctcttgttgccaaggctggagttcaatggcgtgatctcagctgactgcaatctctgcctcccagattcaagcaattctcctgactcagcctcccgagtagctgggattacaggcatgcgccaccatacccggctaattttgcatttttggtagagacggggtttctccatgttggtcacgctggtctcaaactcccaatctcaggtgatctgcctgcctcggcctcccaaagtgctgggattacaggtgtgctcattacagatgctaccgcagctggcatgtagtggttatttctttgttgagttctcccactgttctgagggttagaaagtcctttcataccgagacatcagacaaacgtttattgaaatgtctcctcacttcttcctagtttgacttttttcacttcatacttctccatctacgaattatgtgtgtagcaaagtgagggtttgtttattttctccccctaaaggcaagattcccaggcaacctggagtatgcaaaagagcataggattaactgctcatagctctggaattaaggcatattaggggaatccttccttggctctggtccttggtttccctcctaggaaacaagttgggtgaattaggcagtctctggcattccaggatttggtctcaggtctaaacaggattttgtaaagtgaaagcagcatcccttggcatcttgggagatgtccctgccctccatggctcgccttctgccacatggcccagcagcagctactctgcagggccatgtgctgccatgacaggtactcatccccacgggcgcgggcctgcaggtcctgggggtaccagtggtcaggtgctttgtacatgcagttcatacacagcaagctagccacactggggggacatggcaggggcagaaaacatgccctgaacactcttcagccattttctggggcattttcactatccccatgatgcagaggagggatgtgaggctcagagaggttaggtaagtgcccagggtcacacagccctacacggggccagactatcatctcaactaagggcagcaagtaagaaacaaaatgtcatgaacttcagcaggggctcagggaaggcttccaggaggaaggggcatccactgtgagtctgaagaacgagagcatgttggatatctccccaacatatccaaagcgtggacagggccaggagcaaggccagcagggagagagccttccaggtgacatggcagcattgctccccaccctgtcccatctcctgttcacctatggtgaagggttgtgcagtctgacccccagagctcatcatgcctctatgggtgttggaccatccagtgatcccaggctctgaatgtgaatccagctccaccaaggaggcactatttggcctcggtaaaggacgccaccatgcagccaccaacctagaggctggttttggctttcatttttcccacccacctccaacccttcagcaaaccctgcagttagatttcaataaaagtcagaactgaccacaatccccaccaaccctgcaccaccaccaccttggtctggggctccagcgctgcatgccagatgactgcagtggctttctcacccctgccagggggatcctttacgacgtaagtcagatcacagttcccctctgctcaaaaccctccagcgactcaatctacctgtggtaagagccaaagccttcccagtgtcccatgctcccctctgtcatgacctcctgctcttcctgctcactgcacccaccctggcccgttgctctccagtctgaaccccatgcattgtcccacctggagccttcgccctcactcttccctccagtgagaacacccttcccctcatgccttgcacattcctacagctctctgctcagatgccacctcctccagggagtcttccctcaacatcctactcataatgacacacacccccactcttaccctgtttattttttccatggcatccatcaacatccgatatgttccatgtttacatgggttactgtcagctcccccttctattaatggaatgtgagctccatgaggagaaggacgtagacacgttcactgctcaagccccagggcttaaatggggtctggccctggtggatgtttagcaaatagccactgaagctcgctgagtggtccctcgactctccagggaaacagcacttgccccacaggatttgtgggcaaaatggtagcactaagatgcctggtacagccgctcctcgaaacttagcactctctttttttcggaggggaagactggcggtgaggaggcccggaagcagactgggccctgtggccttgtgcaagtccctcccctcctccagcctcagtttcctcacttgtacaatgcaggaggggacttctatagcccttgtcaacactgggcacctctgcctgcctccacccattcttcaccctggggctggtgcagggcccacagtccatgatccaagccatcagcagtaaacagacagctgactgactggccccacaaggcccggcagcagcccagggaccggttacctctcagccaaggtgaagtccccatccttcaaggcctggcaccttcctcagggcattcacctgggcaaaggcatcactgtgctgctggcctgcaggcgagatcagagaggtgagtggggagaaccctgagttctctgatgtctctgcccacccccactccaaactcccagcagcagctttctgaggcccctatctgggaggcatcagggaagaggaagcctctctgttagtcactgggtcacagaccctgaccctatcagagggccacctttcctgtgtccagttccttgaagcatggctcaaggacaattccctggagctgtaattcacaccccacccccagccagttccatccataggtcagacccctccagcctcctccctgggctctaggcttgccccctctgattcagcttcctatcccagctggggccttaggccctactggccaggctgggtgacctgtcaataccccagagtcccagccaaacatgttcccaaccctcagaccaacctcattcttgctgggaatccctgccccattcagccactcagcccccggtggctcagctcttcttcctttcttgtgccaaactctcaaggctccctccccactgggggttcccaggtctgactcactttagcactctaggccagtgctagaggccgcattaggtgcctggtgtttggatcagagggcatcagtcaagccaggctccagtctgatcataggcctacatgtgggcctctctggccttctactgaatggacatgcacacccctgcccattctccctccacagactgcttctgtgtccagcccctgttctgtagcaggtgactcaagctggttgtaccaagggcagcagttgggaagagtcagctgagcaggttcctccttctggcctgcccagggggctctggctctgctctctgccctactgcttagttatagccctgcctcctccactgaattgtgctccagctgcatctctgtatgccagccagaccagcaaacgctggagctcagggtgagggtgctggcctcccccactgccctgccacagggccctccagcctctagcctctaggagcagccccttcagctgggtgagaagccccatgggatagagcaagtcagatgcaggaaaagaaaaggcagaagaatgccaagaaatacataaaagtggaagagacccagggccagacatggtagtgcatgtctgtaatctcaacactttagaaggaggaggcaggaggatcacttgagctctggagttcaaggtcagcctggtctacatggcaaaatcccgtctccacaaataccaaaaaaaaaaaaaaaaaggaaaaaaaagaaattgctggatgtggttgcgtgcctgtggtcccaactactctacttgagaggaggaagtgggaggatcacttgagcctgagaggtcaaggctgcagtgagccgggatcatgccactgccctctacctgggctgcagagtgagaccgtgtcaaaaaaagaagaggcaagaagggaagagacccaggcagaggtaaacaaggactactccacttaggaaacaaggaggtagtttcattgttttttccaagcacatggggtgaagatattctagccccactccatttccctgccctcctgctgcatctgctctgccccctcttaacctgtattttgaagaatgctttgtattcactaagcaaagatgaagcctcttttaaaataaacaaccagcagggcatgacagctgatgcctgtaatcccagcactttgggaggccaaggaaagaggatcgcctgagctcaggagtttgagacctgcctgggcaacacaggaagacctcctctcaatagtaataataataataataataataataaattggccgggcatatcggtgggcatctgtagtcccagctacttgaggggctgagatgggaggatcgcttgagcctggaaggtcgaggctgcagtgagccatgattgtgccactgcactccagcctgagtgacagagttagctcctgtctccaaaaagtaaaaataataacatagataattacgtaatagtttccacaccagagagtctgattcttcatgttagtctgcattctcggcccgactgcaaagcagtggggacaggtggggatccgcagccaatatcccctgggcctgcctgcccagcccagctttggtcagctccactttgcgaagctcgaaggggatgccgttcttggtgaagatgtagactgaacggcagggctgggacagcaggtccaggtacagctccagacccatggcgagggcgatggggtggggcgagggagggtagacctaaacccaggggacgggccctggggacaaacccggggacaggcccgggaacaggaactgtgggcaggaacggctggttgggggcagcgggcaggaacggctgggtcaccaagcctgcagtggtgcacctcactaggagactggagcccagccacgccctccttgctcaaaggttggctccggagaactttgggccaatcaatggcgcgtctgctctcgcctttctgggatcctcggctgggggtatctttctctctaaaagggaagaggagaaaggaggtgcagcagccttcttacccagtgcctggctcagtgcccaggatggaggccagaggggaagggtggctggctgcctgcaaggctgccagccccacacctcatgaaggaatgagctgtttctccccagtcctgagggtcatatttattacactccagctaatgcctcccacagatggctaaggccctgtaagccctacccagaggtttccaacagtgcctggcattgcacagaactttctacccactattcaagtgcaactctagggcttttgatgcctgtggctgtgacactcccatttcccaagggagcctcccaaggcaggaaaatcctattcccaaatccaagattcagagaaagaccattggcaagaggatggttactggaaaacttgagaatagctttgcttctctggttccccatggttcccacctgtcgccttttttgagataagagtctcactttgttgcgcaggctggagtgcagtgggatgatcatggctcagtgtagccttgacctccagggctcaagtgatcaagtgatcatctcacctcagcctcccaagtagctgggaccacaggcatcacatctggctagtttttaaattgtcttttttttttttttttgagacagggtctcactatgttgcccaggctggtctccaactcctgggctcaagtggtcttcctgcctcagactcctgaagtgttgagattacaggcatgagccactgcacccaatcccatggtccccatttaagacctatccccccgcagaagagtgccttcctggcctagtgctgcagctctctccagactgagaggggccacattctcctgccccttcagttgcccaccccttttcacaagtcgcctttggccaggattactgcagtatccaatgtccttgcttcctccctggctgccttccagcagcagccagaatattattcttttttttttttttttttttttgagatggagtctcgctctgttgcccaggctggaatgagtggcgcaatctcggctcactgcaagctccgactcctgggtttacgccattctcctgcctcagcctcccgagtagctgggacgacaggcgcccaccaccacgcccggctaattttttctatttttagtagagacgggtttcaccatcttagccaggatggtctcaatctcctgacctcgtgatccgcccgcctccgcctcccaaagtgctgggattacaggcgtgagccaccgtgcccagcccagaatattattctaaaacacaatcagagcactccatacctgctaacagtttaaagccaagcacctaggcatgccatttaggcttctgaatgactgggtcttgaccaggagagctgctgtctaggttttctcctcctgactagttcctcaagagaaatgcaaaactagtgattaacagtaagagtcaggccgggcgtgggccggcctctctggtgttgctggaaatccttggtattccttgacttgtagacttgttttaaaatgtacctgggattttggctttattcaggtatggcgaggccacagatcagaggtgatagccatgtaaaagaaagtttgttactcacagttcccaagacaataggggggacatgccacaccatgcagggccatggggaagcaccagggtcagtcaggtggcagaatgagtgagggcaaaaggtggacaaaaggctttactgtgttttttgcaagaaggcaagacagggtaaacagacttaggactggctagttttaataattgtgatgggctctgggttataggagtggtcctttgttacctggtacctgtccctggagtgatttggggcaggaacctgctgaaaggtggctggtaaagttatgttggagatacgaatcggttgattggcccatcgaaggcacaccataagcaaatcatttattctctgtaggaattagctggcccagggaggggcagtctctcctggatcagtaaggcctcaagatgtcaaagcaatctgggcatggtggctgaggcctctaatcccagcactttgaaagtctgaggagggaggatcacttgagcccagaagttcgaggccagcctgggcagcatagtgagactgtctctacaaaaagtttaaaaattagtagggcatagtagtagttccagctactctgggggctgaggtgggaggatcacttgagcccaggaggctggggatgcagcaagccatgatcgcaccactgcactccagcctgcactcaacaaagtgagattctgtctcaaaacaacaacagcaaccacaacaaaagaagttaatagcttagcttctgctgtattccaaaattgttgcaccctggacacactgacagcctcaaaaggaggagtttgtgtgatcattggtggataaggctggtctgtgtaaatccactgggacaaatagtgcctaagctgcacctgttaaagaacaagctaaacactctccatcaaacaaaagaggtgcattccttctgctgtactgaccttgtcccagcaatgggatgtgtgtttaacaggataaggggaaatgtgctcagacctgttcctttcagcttattcattcctattcttatctatgttcttctccccatttgtagatccctcgttatgaatctggctcttatctccatagccaccaactcagcttttaatatctgaaacttctaggaaagtctgcagcaggggaaatgaaggaattaaaaacacgtcaccccaaatatgctgctttggagtattaattattttgagttgaaggcacttgagaaatagcacatgcaggaaagactctctgacctgcccttttctatctaagaataggccacacaatttcccataagaaagcaccctccctttaccaggaagagaagaacattgtcatcacaagtgactgtgaatcaaggttccaatggatctgtataaacacacgactaaaaataatccttatcttctaattttgctccgcatgtatgtcctagtcccttctccacaatttactccctataatccaagccgctttgtcttgtcattttttttttttgaggcagagtcttgctctgtcacccaggctggagtgcagtggtgcgatctccgctcactgcaagctccgcctccaggattcatgccattctcctgcctcagcctcctgagtagctgggactacaggtgcccgccaccgcacctggctaatttttttgtatttttagtagagatggggtttcaccatgttagccaggatggtctcaatctcctgaccttgtgatctgcccgccttggcctcccaaagtgctgggattataggcatgagccaccgcacccgtccttgtcttaaaaaaaaaaaaaaaaaggtattgtttttctactttagtgacttctttaggccttcattctcttgtgaaagtacccatgtacactgaaaatttagcaaaacttgaatgattttcttctgttaatctgtcttatttcagttttattcttagttccagatctccagagaccctaagaatgtagaggagaatttttttcctccccaataatagcatggcatacagcatagatccctgcttgtttaggtgaactttaatcgctttcaaaaactttctatgacattcttcataaagatcatgcaggccaggcgaggtagctcatgcctgtagtcccagctacttgggaggctgaggtgggaggatcacttgagcccaggaggtcgaggctgcagtgagccacaatcgtgccactgtacttcagcctggatgacggagcaagatcctgtctgtaagtgttttcttttttaagtaatgcatgtttcagctcagacttattccatggtgagatatatatattatatgtgtgtatgtatatatgtacatatgtatgattgcaaatgatatctgttgcattttacatattgaaggaagtatcttcttgaaaatattataaatttgtgtcaatgttgctactgctcaaaacccatttcagaattggtaatctacttacattcaaaatgagtggggtggccgggcgtggtggctcatgcctgtagtcccaacactttaggaggctgaggtgggcaggtcacttgagccaggagtctgagaccagcctggccaacatggcaaaaccccgtctctactaaaaatacaaaaattagcagggcatggtggcgcatgcctgtaatcccaactactcgggaggctgaggtacaaacttgggaggcagaggtagcagtgagccaagatcacaccactacactccagcctgagcaacagagcaagactctgtctcagaacaaactaaccaaaaaaaccaaaccaaacaaaaaaatacaacataaaggagtcacccagaaggagggtgatgcgaagacacataggggaatgccagaacagaggcaaagattgtagtgatgggtgttagattaatcatggtctttatgtcctgtactttatcatgctttgacattttttaagtttattttacatttttgtagagacagggtctcactctgccaggctggagtgcagtggcacaatctcggctcactgcaacctctgcctcctgggctccagtgatcctcccacttcagcctcccgagcagatgggactaacagacacgtgccaatgcctagctaaatttttttgaatttttggtaaagacggggtttcatcatgttgcccaggctggtctcaaactcctgggctcaagcaatctgccttccttgacctcccaaagtattgggattacaggtatgagccaccatgcccggcccagtttttacagatattttaaaaattatgtcttacagtggacctataagtgtcagaactctcatctcctttgacagcaaggataccaggattcaaagtagttaatggcatacttgaggtcaggagctaatgaatgacagagtcaggatttaaattcagggtcttggctgggcacggtggctcatgcctgtaaccccaataaggtaggagaccacccctcatattgtcttatgcccaatttctgcttccaaagaaagaggtaaaaactaaaaggcagaaatgaaatccacaggcagacagcccggcgctgcaccttgggcttggttaaagatccacccctgacctaaccagttatgttatctatagactccagacattgtatggaaaagcattgtgaaaatccctgtcctgttctgttccattctaattactggtgcatgcagcccccagtcgtgtaccccctgcttgctcaattgatcatgaccctctcacacagaccccttagaattgtaagcccttaaaagggacaagaattgctcactcagggagctcggttgttggagacgtgagtcttgctgaagttcccggccgaataaagcccttccttctttaacttggtgtctcagaggttttgtctgcagcttgtcctggtacaccaacactttgggaggccgagatgggcagataacttgaggtcagaagttcaataccagcctggccaacatggcaaaaccccaactctactaaaaatataaaaattggagagggatttcgggatcatggcagacgggaggcatagccagattgcagctccggacagagcagcatgtggaggcttgcattgtgaattttagctgcagatccactgaaagaacaaaccagcaatcctgagaggatccacagaccctctgaaggaagcagacttgctcctgtagggcccaggagacaccccaaatactgtgagtgccccagctgtggaagtgggaaagggagacccgcttctcctgagcacacacccccactggagaagctgaaggcctgtttgtggaagaagtttccgacttttcctggagctgagtcaagttacaaaactcagccgagcaaaatacagggtcagaggaagcagcagaaaggccctgggagctcactggatccccaagcagcccattcctgcctggcaccacagggatccatcaggagggtggccagaaagcaaggggtaaaactccacagctccacagggagaaggaattctctagctgaactttgtaacaatttgaatggggtgagaagcctctggaccagaacccaggggagggtgtgaatctggcttgcagatttcacaggcagaggaagaactaaagcccttttctttggcagctgggaggtggaaagcctcaggcaagttttcaattcgtctggccctccatctggaaacacactgtttgctgtttccagatggagggctgtttgcaggacatggtgggagtgagaccgccccttcagtttgcatgggagctggatgaggcctgtgacttccggctttcccccacttccctgacaacctgcatgactcagcagaggcagccataattctcctaggcacacaactccaatgacctgggcatctcacccccatcctccacagcagctacagcaacacctgcccaagaagagtctgatctcagacatgcctagccccgtcctcacctgagggtcctttcctacccaccctagtagtggtagacaaaggacgcataatcttgggagtcctagggccccacccaccactggcccctctccacactactacagttgatgctttctggagagagccacctcctggcaggaggccaaccagcacaaaaatagagcattaaaccaccaaagctcacggagtgcactgcaccgtccgccgcctccaccagaataggtgctggtatccatggctgagagacccatagacggttcacatcacaggactctgtgcagacaacccccagtaccagcctggagctgactagactcactgggcagctagacccagaagagaaacaacaatcactgcagtttggctcacaggaagccacatccacaggaaaagggggagagactacatcaagggaatagccctgggacaaaaaaaatcttaacaacaaccttcagccctataccttccctctgacagagcctaccccaatgagaaggaaccagaaaaccaactgtggtaacatgacaaaacaagggtcgtcaacacccccaaatatcacactagttcaccagcaacggatccaaaccaagaagaaatccctgatttacctgaaaaagaattcagaggccgggcgcggaggctcaagcctgtaatcctagcactttgggaggccgaggtgggcggatcacgaggtcgggagatcgagaccatcctatctaacatggtgaaaccccgtctctactacaaatacgaaaacaaaattagctgggcatggtggctggcacctgtagtcccagctactcaggaggctgaggcaggagaatggcgtgaacctgggaggtggagcttgcaatgagcagagatcgcgccactgcactccagcctgggcaacagagcgagactccatatatatatggaatatatagggaatatatatatagggtgtatatatatatatatatatatatatatatatatatatggaatatatagggaatatatatatagggaatatatatatagggaatatatatatggaatatatatggggaatatatatatggaatatatatggggaatatatatatggaatatatatggggaatatatatatggaatatatatggggaatatatatggaatatatatggggaatatatatggaatgtacatggggaatatatatatggaatgtacatagggaatatatatagggaatatatatatagggaatatatatagggaatacacacatggactatatatatggaatacacacatggaatatatatatggaatacacatggaatatacacacatggaatatacatatatggaatatacacacatggaatatatacatctggaatatatatgtggaatatatacatctggaatatatatatctgggatatacatatggagtatatatctggaatatacgtatatggaatatatatgtggaatacatacatatatggaatatatatgtggaatacatacatatacggaatacatatatatggaatacatatatattccatatatggaatataaatatggaatatatctgaatatatatggaatctatatggaatatatatggaataaatgtatggaatctatatggaatatacggaatatatgtggaatatatggaatgtatatggaatatatgtggaatatatggaatgtatatgggatatatatggaatatatggaatttatatggaatatatggaatatatatggaacatatggaatacatatggagtacatatggaatatatacatacggaatacatatatggaatatagatatacggaatatatacatggagtatatacatacagaatatatacataaggaatatatatggaatatatacatatggaatatatacatggaatatatacatatggaaaatatacatggaatacatacatggaatacatacgtatggaatacatacatggaatacgtatatggagtacatacgtatggaatacgtatatggagtacatacgtatggaatacgtatatggaatgagtatatatggaatatgtatatggaatgagcatatatggaatatgtatatggaatgagcatatatggaatatatatatggaatgaatatatatggaatatgtatatgtggaatactactcagtcatgaaaaggaattaattaacagcatttgcagtgacctggatgagtttggagattattattctaagtgaagtaactgaggaatggaaaaccaaacatcttatgttttcactgatatgtgggagctaagctatgaggacgcaaaggcataagaatggactttggggacttgaggggaagagtgggaggagggtgagggataaaagactacaaatatggtgcagtgtatactgctggggtgacaggtgcaccaaaatctcacaaattgctacaaaagaacttactcatgtaaccaaataccacccataccccaataacttatggaaaaataaaataaaataatacataaataaataaaaatacaaaaattagcaggtcatggtggtgcgcacctgtagtcccagctacttgagaggttgagctgggagaatcacttgaacctgggagacagaggttgcagtgagcagagattgcgccactgcactccagtctgggtgacagagggagactttgtctcaaaaataaataaataaataataaggctgggcatggtggctcatgcctgtaatcccagcaccttggaaggccgaggctggtggatctcctgatgtcaggagtttgagaccagcctgatcacctgaggtcaggaatttgaggccagcctgaccaacatggtgaaaccccatctctactaacaatacaaaaattagctgggcatagtggtatacgcctgtagtcccagctactcgggaggctgaggcaggagaatcgctcgaaccaccctggaggtggaggttgcagtgagctgagatcgtgccattgcactccagcctgggcgacagagcaagactccgtctaaaaaataaacaaataaattcaaggtctttccactgtgctcccccaaccttgctacacacacacacacacacacacacacacacacacacacacacacacagagttcaagcccatagaaatctggttgtctatggatacaagtcttgagtgatccccaggacagggatagagttgtgttttccaaacagcgaatcttctaattttagcatcttttgcaatctgcacaggctgataatttcccaaatcatcaaaccttggtttctttttgcttaacagctttttcctcattttatcactttcctcttgcttttcaccataaacagcaagaagaaatgaggcttcaccttcaacgctttgcttggaagtctcctcagctaaatatccaacttcgttgctttaagttcacccaccatataactatcggacacaattcaactaagctttctacctccctacgggctccttttctgggaaatgatcctccttcctccagtttccagaaacacgttcctcatttcttcagagtcctcagcagcaggatttttaatatctattttttctttttttgaggcagattctcgcttggtcgcccaggatggagtatagtggcgcaatcttggctcactgcaacctccgtctcccaggttcgagcaattctcctgcttccgcctccctagtagctgggatgccaccacgcctagctaatttttgtatttttagtagagacggggtttcactatgttggccaggctggtttgaactcctgacctcaggtgatccacccacctcagcctcccaaagtgctggcattacaggcgtgagccactgcacccagccaatatctatatatctacctacagctgcctatgatgacttaggtatgctgtaaggcaatgtagacttgctctgaccatgtttagttgatactcgtgagccctccctatagtctttaacatccatatttctaccaacaatctgtgcaaggcaatctaggttttctctatcatgggcctcataatttttccggcctctgcacatcacccaaatttaaagctacttccacatttttagatttttgtttgtttgtttgtttgagacagggtctgactctgttgcccaggctggagtgcagtgtcacagtcacaggtcactgcagcctagacttcccagcctcaagcaatcctcccacctcggtctccccagtagctgggactacaagcatgcactaccatccccaactaattttttttttttttgagacggagtcgcgctttgttccccaggctggagtgcagtggcgcgatcttggctctctgcaagctccgcctcctgggttcatgccattctgctacctcagcctcctgagtagctgggacaacaggcacccgccaccacgcctggttaattttttgtatttttagtagagactgggtttcaccatgttcgccaggatggtctcaaccttctgacctcgtgatccgcctgcctttgccacccaaagtgctgggattataggcgtgagccactgctcccggcccatccccagctaatttatatatttttagtagagacggggttttgccatgttgcccaggctagtctcaaactccagggctcaagtaatccacccaccttggcatccgaaaatgttgaaattacagacatgagccactgtgcccagcctagattttcttttttatagcagcaccctgcttcctggcaccaaaatctgtgttcctctcctctggatggtataacaaattaccaccaccttggtggcttaaaacaacataaatctattctcttacagttatggagaccagaactttataatctatttctctgggccaaaacccaggtgccaatagggttgcacaccctccagaggctctgagaggggaattggtttcctcaatttttccagcttttggagctgcctgtcttgggtcatgtagccccttcttccatcttcaaagcccacaatgtagcatcttcaaatctctctgcttccatcttctcctgtcttctgtttcaaatctccgtctgtctcctcttacacagatacttgtgactgcatttagggctcactcagataatccaagacaatgcctccatctcaacattcttaatcaattctgcaaagtcccttttgccacagaaggtaatattcacaggttccagagatcaggacttgtatatccttaggggtcattattcagcatatcacaggaaggaaagagaaggtgtccctgtgctgtggtttgaatgggtcccccacaaagcatgtgttggaaatgtaatccccaatgcaacagtgttgggaggtggggcctaatgagaggtgtttatctcatgaggcctccaccgttacagatggattgatgtggattataaaaggactttgaggctgtgagttcagcctcttgctctctcttaccctctctttatcctttcaccaggggatgatacagcaagaaagctctggccagatgctggcccctcgatcttggactttccagccttcaggaccatgagccaacaaatgtccaccccttataaattaccaccaggcttggtggctcacgcctgtaatcccagcactttgggaggccaatgcaggcagatcacctgaggtcaggagttcgagaccaacctgtccaatatggtaaaaccctgtctctactgaaaatacaaaaattggccctgcatggtggctcacgcctgtaatcccagcactttgggaggctgaggcgggctagtcacgaggtcaggagatcgcgaccatcctggctaacacggtgaaaccccatctctactaaaaacacaaaaaattagctgggtgcagtggtgggcgcctgtaatcccagctactcgggagactgaggcaggagaatcgcttgaaactgggaggggtccctgtgccagggaccttacatgtttccaggtgtcaccccaacccagaaaggactgcgccccgccgtcctggaaaggccccagcgcatggacatctgagggttcgttcagagctctgtttctcggagctggaaggtggcagaagggagggagcgaatgggatcctctaaaagggatctcagactttcacccagcgggatatgacacttgcaggtgtcccagacttgtgggaaccttgactggaaggctggggttaaggatgaactttctgccgtccagactgtcccctgcagagcagctgctgccagacagcgggagctcccacctcgtgcacaggatgggggcagggagcccgcagccgcaggaggcaggaatgactgtgcagggagcccgcagccgcaggaggcaggaatgactgtccgggaacctcctttcttctccctgaatcccagccctggcatctaaccagggtgcacagtgatggtccagggctgggcccgggactctagctgaatctttcagagtatcccatccctctggccagtggcccaagcgagtgaaccagaatgcttccttgggagttttgaaattggaactggagagaggagctccctatggggaggtaaatgggagctggggccacctgtagtgacatttcctgagttcatggagtaggctagtctgagagagaaaagctgactcagagaaagggagtgataacagggcgtggtagcccacacctgcaatcccagctaatcagctcgggaggctgagacccaaggatcactttaggccagaagtttgtgatcagcttggacaacatagtgagaccctatctgtctctctctcttttttttttttttgagacagagtctggctctgttgcctaggctggagcgcagtggcgtgatcttggctcactgcaacctctgcctcctgggctcaagtgatcctgccacctcagtctcttgagtagctgggactacaggcatgcgccaccatgcccagctaatttttgtattttttgtagagactgggtttcggcacgttgcccaggctcgtcttgatgtcctgggctcatgtgatcagcccatcttggcctcccaaagggctgggattgtaggcacgagccgccctgccaggcccaagggtttttttgtttttgtttttgttttttttaactagtggggtatggtcatgtgcacctgtagtcctaggtactccagaggctgtagtggaatgactgctggagcacaggacttggagattgcagtaagccatgatcgtgccactgaactccaggctgggtgacagagcaagattctatgtcaagaaagagacagagaattaaaagaaaaaagtgtagggagacagagatcctgtctcaaagaaagaagggaggaaaggaggaagggaaggaaggaaagggaagggaggggaggggagaggaggggaggggacaggaggggaaggaggggagaggaggagaggggaggaaaagtggggagacagaaacaggttctgattccagttctcttagtggcttctacacccctcccctcctatgactggagaagttttctgagaaatctccccacccaccccactccctttgttttttttttgttgttttttgtttgtttgtttgtttttgctaagccaattgtcattgagtttctatctgaaacccccaaagggacactggccacccctgcctccactctacagaggtggagaaaaggggagaggggcttggcaggcctcccagccagtcatggagggaataggcttcaggaggagtacagagttctggccccattttgggggaaggcactggccgagaagggctgagcaactcctggaggtacagacctctggggagggcaggtgggaggagcagcaatggggcccaagctgttcctggacatgcactcagccccctgccatgctatccacttttgccaggcagaatgacatcccttttcagctgcagacagtggagttggcttggggtgagccaggtggctgggctgggccccatggagtgggtgccaaggaccaggccctgcactgagccttctctcctttctgcccaccaggggagcacctgaagcctgagttcctgaaggtgaaccccctggggaaggtgcctgccctcagagatggcgacttcctactagcagagaggtaatggtgacctggtgcccacccagggtcagagccaggatctgcctgggttctggggctcagagttgtagggggaggcagaggcgagaggggagatctttccttgggttggagatctttccaaatcactgtggccccttcctcatttcagcctgtgtagctccgatgcagaggctggacccaggggcacctttgggctaaagctggaggctggaacctggctagagtctaagccagctggagctgcccagatggggaaaggacgtaggtcacccagataaacctggacaacctgaagccagcgggcaaggcccaggcttgaggctggctcctccccaaatgtccccagctcatcctttcagagtcctaggagctgggcagacccaggggagactccacattcaatcccagctcaccacttcctcaatccatgcccttggggaaatcacagaactttgtgtgccaggtttctcctctgtaaaacggagtgggaggaataatgtatccacctcccagggcttacctgaggatagaaaatgggcacctagtgttctggggcactaggaagggaacttggagaccttttgggcagggcccacacggcaggcactctgagtggggaccctgatgccagggagtggggcctgggcacagagggcaggatggtatggtaactgggaggggaggtggaaacatgggcccagggaggatcagagttggaaatggagaaacagagtggtttggtcgtggggagatactgcctggagggagttgcagtataggggaggtcctcccctgaaggtgaaggtggggagaaaacctggtcaaatcaccctgagtatgagcaatgaagccacctggccctgacaggctggagaaaagatctctgacaccccctgcccacagcatggtcatcgttttatacctgagtcgaaagtaccagatacggggacactggtacccacctgagctgcaagcccgcacctgcgtggatgagtacttggcgtggaagcatgtcaccatccagctgcctgccaccaatgtctacctgtgcaaggtgagcttcctaggccctgtcatgcaggctggggcaggggcctggacccccagagatggaaggtaccagttggtacatattacatattagcttcacttccactgtcctcagcagacataactaatctatcacagtactccttcccctaagcctgaatgaatccttagaaaccttctgaacacagagccccagaggacatcactaatgaatggcagccgggaagggatggagaggaggcccaagaggcttccaagagtctgggttaagttgctcctctcctcacagcccagtctctcctgccccacttctccagacagcctgcagatgctgcacagctggagcggctgttggggaggctgacgccagccctgcagcacctggatgggggggtcctggtggccaggcccttcctggcaatggagcagatctccctggaagacttggtgctgacggaggtgatgcaggtgaagctttcctacccacctgccctcggggggactctgggcatggggctgagccccaaccccagctgccctgtcttcccagcccactgccgttggctgcgacctcttccaagactggccctggctggcagtgtgacaggcccatatgaaggctgcccttggtactgagctcttcctggaggcccacaagctcatactccagcctctgaaccacagtgaggctcggcaggacccccagctggcccagaagcaggtgcagttgctgcaggagtggctccactgagtgggtacagcccactgcactgcaccctgctgtctgcaataaacacactgcatgctcttcgcttgtctccaggcttactctgtcactggaagtgggatcagtcccatttctgagcctagacctattaaatcacaaagcatagagtgagtggcactcagtcctctacgtggggctctagttaccttcctgggccaccaggtgcacagtctggccactgcagccccaacccaggccaggaagtttctgggctcctctgcatggcatacactggaggattaattagtataggaagggtataaccaacattttcagggtatgggcccaatagcttacttagctgtccttactgtggggtgtgataggatgtggtgtattatgtagcacggagaattttggattctcatgggtaggttcaattcctgtaattctagaaacaaaagggtttaaacctctgtaatttattctatcaaagtaactcttttgtgagacatatttcttatgtttggggtgggatgctggaggttaggactggcatgaagatatgtcatatgaaagtactagtgtgagtggtagaaaattttttcaaggagatatatgagctgatcataatggaatcaggaatatgatgttcgaattcataaaaaaagacttgttaaaatgagagtttgggtgacgaaatttgtggtatagagttctggtatatatatgttatgcagtgctcctaggaagacaatagtgattacgggatttattatttatttattttttgccctagggcgaaggtggcttttatttcctctcttagggaagagggggaggtgagctttcccaggcacgtcaacctaaggaaggggtcgtggggcccccagcaggggctggaagagctgatcatttggaagaaagggttcattcttgtccacttcctggccctcagctgcagggtgtgctggcaggggttactccccttggggcagctgctcctgcatcagcggaggcacaaggaggtacctgctggtgttcacaaagaggagggggcaggtgccgcgagtgagggagagagggctggggtgactggccccacaccaatgcctgcctagtatgatcactttcataaggcctggctggtgggactcctccaggaagggcctgaggggtcccttggcagtgctccatgcgatggctggtgctttaaatgtccatctcaaaactgtgcttcttcactgcccgccctgcttatcttctggactattgctcaggtggctctggctggcttccgttggggggatcatcactggcagggctggtgaccccgggaatggtgggcagatcccttgggagtgttttggtcacgggtaagtttcaacactccatcaggaatttccagtggtagatgatcctggtacctcctggggtggtgctgaagagcatgccgccgggggtcgcgctgtattccccgggcgggtgggagctgcttgccttcgccaagcaccacctggcaagtggcagggatggcccagcttggggtctgctgcagctgctgtccccagatatggtctcctgtgcactgcacccacgaacctcttgcggccttcagggcatttattataatgatatttatatagtctgctataaagaacagggcaaatgggcctgcagcatattcgacgttaaagcccgagattaattctgattccccctctgttaggtctaaagaggctcggctggtttctgctagtgtggaaataagtcatattatggccagaggtcatgatggtaggagcagccagagaaattcttctgttccaatgagtatatacaaattaaatgaaccacttattaataggactgataggaggataatagctagagtgacttcatatgagactgtttgggccactgtacatagtgcaccgatgagtgcatatttcaaattagatgctcatcctgatcacaggatagagtagacagctaggcttgatgtggctaatataaacaggaggcctagttaagattaactagagaatggggtatggggagagggattcatatgaggagggcaatagatagagctagagttggaacaataatgtatagggggtgtatttttattacattattgtacattatacaacaatatgttaaaagttttattgcatctgccactttcattgccgagtgccccctgacttcctggtggtggtgtccccactgctcccgaagctcccaggttcctgtgtctctttctcccaattcctttctagtcatagttcaggctccattcacctgtggatgctcccagcctctacttctagaatcctccagggataattctcattgcctcctcctcattctggaccctgcaaagcccctttcgtcaggttctgcaatcaaagtccggccctgggaattcccaggcataatcccttctcagacagggtgtctgtgaggtggcgccacgggacacagacacacgtgagagggggagagtagggtcacggctgccacacctttgccacgggcctctgccagcctactcctgggcctccttagaatccttgatgctgtgagaattgcaggcttcctggccttatgacaacacaaagggaaacaagaggttccagaatgcagggtcctgggcccagatcggagagggcacagggccagggactctggccagacataggcccaggtctgtggctggctagctgcagctgtggggcctggcatgtgtctcaacatggccctggagctctacatggacctgctgtcagcaccctgccgtgccgtctacatcttctcgaagaagcatgacatccagttcaactttcagtttgtggatctgctgaaaggtcagctcccactgctgcctggcaggcctggtcctggggggaggcaggacacacagattggagctttttttttctttttctttttggtagagcctcactttgtcacccaggctggagtgcagtggtgctatcttggctcactgcaatctccactgggttcaagtgattctcccagctcagcctcccgagttgctgggtttataggcaaacgccaccatgcccggctcattttttgtatttttagtcgagatggagtttcaccatgttggccaggctggtctcgaacccctgaccaaaagtgatctgccccgcctcagcctccaaagtgctgggattacaggcgtgagccaccacgctcagattgataggggcatttctgagaagcagggacagagacaagggaatcaccccagaggtccacagggaaggaaaagatgccacggggcttgtaggctgcgtccctgcctagcctaccttagccactccccactaatgatagtccccacgccacagatgaacaggctttttgaggagaagggggaatgaacagcagctgggactccctgggctcccaccaggcaccctggcttcgttgtgggattctaggaccttgtgaactcagcacctgcccaccaggttggcaaagggggcagaagtgcacagtccgtctacacccatcctccccagtgttcagaaaggctcagggctccactgctcccgagtgagggtcagaggggtgggctcccactccatcccgagcacagagggactccaaaactcagcctgcaaaagcagaagcctctagaacacagaggaagagacaggaaagctgtggaaatgaacgggctgcgagtggagcccccagaaatgtttccaactggaggcggctggtccaggaagagtttcagttcctgcccccacctcaggttccctgttaagatgaccctgattgtgtccgagaagcttccctttggatgtccagctgtgtgctgggcctggcttccttaaagtggagacagagtgagagcgatgggattgcggatgggacccaggccctcagggcttcaggtgattcaaaggctgtgttttcagatccagctttgggggtgggcactggaggcctccggcttctgggtaaaagggtcgtcctggtcctgggacacaggtaggaggcacgggagtcaccaaacctagggtggagcaggctgggagccagcagttctgatcccagtccggttctgcaactgccttgccctgtgacctggggtgagccgccatgtccctccgggcctcagtcctctcttcttgagaaaatagagagggaggcgtttgtgtctctgggagtctcagttctctctcccctggagtcccacagcctcagaccttccctgctcctcccaggtcaccaccacagcaaagaatacattgacatcaaccccctcaggaagctgcccagcctcaaagatgggaaatttatcttaagtgaaaggtaagtcttccctggggcccttgcaccatctgtctctgctcctcctgggaggttcagtgcgagcatttgtctgtttgaccatggaaaatctcacacgtgcactaaaggagagtgaatactaactaatgagggacacgaggaaccccacaaatccatcgcccagctctgactcttgccaacttggggtccagtttacatcatttctattcccctgcctcccagacaccccatcattccattcataaatgtttaggggccagctcatgcctgtaattctagcactttgagaggctgaagtgaggggatggcctgagctcacgtgttcaagaccagcctagcctagacaacatggcaaaacccccatctctacaaaaaatacaaaagttagccagcatggtggtccgcacctgtagtcccagctactcaggaggctgaggtggagggattgctggagcccgggaggcagaggttgcagtgagcaaagattgagcttcagcctgggcaacagagtgagaccccatctcaaaaataaaaataagtaagtaaataaatcaataaacgttcaggaacatacctcttagagataagcgttctttaaaaaaaaaaaaaaaaaaaaaaaaagcaacaggctgggcgcggtggctcatgcctgtaatcccagcactttgagaggctgacacgggaggatcgcttgaggccaggagttcacgactgcagtgaactccgattgtgccactgcactccagcctgggctaggatagagcgtagcatcactacgataccattaagatacctcataaaattaacagtaattcctggatttcatctaatacgtggctcctgttcaaaactctctgattatctcctaaatattttcttggcagtttgtttggatcaggatccaaagaagttctgagtcttgcagccagttgctgtctctcctgccactttttaaccgatagctctctccatgccctgacctttttaccttggcatggttgctgttggtgatgataaaggagcccttgtgctgcggaggttcccacaccagccatcaatcagcaaggcctaggacatcccctccgaagcatgtctcccctccgtccccttccctctgtccccatggcctccaccatccccagacaccacaaccttcccgatagttgctggcctccccactatccattctgccccctcgggctcaccctccatccagcaccagagagatggatcctttcatgccctggcttatataatgcctaatcttaagcattaagtccataacctccctgcacctccaggggctaccctccgtggactccacagtgtctctggctgcctcatcactccccaatcacccccacccttcttccagttgcaaccccctactctcttttcttcagatttaccttgctccctttaccctcgtatttcagcatgtgtttttctttgttggttttttgagacagagtcttgctctgtggcccaggctggagtacagtggcacaatcttggctcactacaacctctgcctcccaggttcaagtgactcccgtgcctcagcttcccaagtagctgggattacaggtgtgtgccaccacaagtagctaatttttgtattttcattttagtagagacagggtttcaccatgttggccaggctggtctccaactcctggcctcaagggatctgcccccattggcctcccaaagtgccgggattacaggtgtgagccatcgtgcccccccgtttttgtttttgaaaaaggatcttgatctttcacccaagctggagtgcagtggtgtgatcttggctcacagtagccccaaattcctgggatcaagtgatcctcccacctcagcatcccaattcaacacgtgttgttccccctgctggcctactctttgttataccaccagcccccaactcctactcaccccgcagggctccttcccagcccttactgactgtcagacagacagctctggtgaaggtctttctcggggccgtttgggctcctctttgctctggaagccccagcagttgggcccaggccacaccggggtggttgacgtagtggcactcaggaaggcaagggcagtgcccctgaccggccccttctgcagcgcggccatcctttactacctgtgccgcaagtacagcgcaccatcgcactggtgcccgccagacccgcacgcacgtgcccgtgtggatgagttcgtggcttggcaacacacggcctttcagctgcccatgaagaagatagtctggctcaaggtgagcagggccacttctggggcttggggacacgggcacagggaagtcaggaaggctggaggccagttctggccctgctgactgccggcgacctcaagcaagtctccctccctctctgggcctcatttcctcagctccttctcctgcccgccttacagagccgtcaggagtgtggactgaaacaatgggcatgaaagagtcttattagggcgaggggaagggcatacgggaggggctgatgtgactcacccaggacagcattcgaggcatttcattctgaactagagaatctcagcgtcaaaaggcccacagaaggccgggtacggtggctcacaactgtaatcccagtactttgggaggccgaggcgggcggatcacttgaggtcaggagttcaagacctaccttgccaacattgtgaaacaccatctctactaaaaatacaaaattattagctgggtgtggtgatgggcacctgtaatcccagctactcaggacgctgaggcaggacaattgcttgaacccaggagttggagttggcagtgagccaagattgtgccactgcactccagcctgggcaacagagtgagactccatctcaaaaaacaaaaacaaaaaagagtatggcctatagaaaattagaagatgacaaataaccagtacatgtgtctctactttgaattctatgcctgtgacagacatcactaatcaatcacaggacttatgcctgctgagctccccaaatccttgtgaacacatggttcccagcaacttccaccaatcagaactgctaaaagaggtgaaactgctttatatcctgggaagtgttcaatatctatccagcagacaagagtacagagacctggcagggcaggtggccctggagtgcagcctcctcttccctcctcttcccaaccctggccagttgctgatcccaaagataacaggggaggaagtttcagctgagaagatggagcatgcagtggaagaggtgaagaacagcctgcagctctttgaggagtattttctgcaggataagatgttcatcaccgggaaccaaatctcactggctgacctggtggccgtggtggagatgatgcaggtgtggagtggattggaggagggttagaccctgggcagaggtaggactcctctgtgaccaatggggccatcacttgaggataggctggtgaggcgggaaaggcaggcagagctgccatgggggctgcgggaaccaggcctgggggcctggactcaatcggggcaacaggaagcacagaatgttatgaatcaggaaggatcacagttctccacacttgacaaagattcttcggtgtgggaggacccggagggtgagcctgggatagagaagaacactgcatttcctgctcaatccaccagcatcccagatacctcctcctcttgctggactctccaggaaatgttcactggcttcctgggtgtccttctggccctgcctgtttcccagagctccagacagacagctctggaggacagctctcgtggctgggtctgaggggcatccactgtgcatttggaggcacacctgagtgtggggcatttatgtggcctctacatgcaggggagggtgaccagttctgcttgtcaagacactggccagggtctcaactggccatcctgcacaccagctagggcactgcacactgaccaaagagactaatttgcatatcagccagagatatgcccgagaggagggacctggggtcctggtggattgaccagaaaatgcagtattcttttccttatcccagagatctctggctgatatgaaaattagtctccttggtctgtttgcagggcagaccagcaccaggaaaaatcattctggcctgccccaagggttcagccatatgcttcgtccccaccccttacatttcacccacacacacccattcttgggcttcccaaagatcttgggtgcaaaccaaactcttagtaagccagcgaaactgcagggtagactgcccgccaggtctcccatcctagcccctgagcttgatcacagtgggaggctaaacatggaggaaaaaacctgagttctctccctcatccacatatacacacctgggataaggggtctccctggaagaaggcaggattcatgcgaggtcgcaggctggagaagtgggaagtgcctgggccaggagccctctcagcatggttcagaaggcttggagcaagaagaccagtgactgaggactctgagggattctggatcctccatccccacctacatctattacatagtctgtgaccccttgctcaggccttgggggtcagcagcctaattctttgcataggtagatgttagggacgtgggcctgaggctgtgggagaggacccaggtggggctggtccccaggctgaccacgtctttgtcttcgtctatccacagcccatggcagccaactataatgtcttcctcaacagctccaagctagctgagtggcgtatgcaggtggagctgaatattggctctggcctctttagggaggcccatgatcgactaatgcagttggccgactgggacttttcaacattggattcaatggtcaaggagaatatttctgagttgctgaagaagagcaggtgaccctaggcgcagcctgtcccgcagggcctggctggcttagcaatctgagccaccttccttaaaggaaatgttaaaaaaaaaaaacaaaaaaacaaaaaaacaactgttctttgcctaataaagaactggaacaaccatcacagctgctgagcagcagacagttggcatatgcatagggtctgatgtgggagtgggtggtggttacagatccttccagtttccaaaaagaattttaaaagtaaagggttaaatatggttacattgtgagtaataatagttggtgacttcaataccccactttcagtaatagaaaaactacagaagaccatcaaggaaatagggaatttgaaaagcacgattaaccaatcgcatacactagacatgaacagaacgttccacccgacaggagcagaataagcattcttctaaagagcacatggaatattctccagtatagagcatatatttggtcctaagtctcaaatttaagatgattgaaatcacacaaagtatgttctctggacacagtggaataaagttaaaaatcaagaacagaaggaaaactagaaaactcacaagcacatagaaattaaacagcacactcttaaacaacaaatgggttaaagaagaaatcacaagggacatcaaaaagtatcctgaacaaataaaaatgaaaacacaacatgcccagatttataggatgcagcagaagcagttctaagagcaaaatttatagctgtaaacacataagttaaagaagaatgatcttgaatcaataacctaactttacaccttaaggaactagaaaaataagagcaaactcaacccaacaccactagaaaacaggaaataataaagattagaatggagataaatgaaatagaaaatagaaaagcaataaaatcaataaaaccaaaaattggatctttgcaaagatcaacaaaattggcaaacctttacttagaatagccaagtgaaaaaaataagggtcaaattattcaccaagaaagaaagtggaggctgggtgcaatggctcacacctgcaatcccagcactttggaaagcagaggcagaaggatcacttgaggccaggagattgagaacagcctgggtaacacaatgagacttttttctaaaaaatatattttttaaaaaaattagcttggtgtggtggtgcaagcctgtagtcttagctaactgggtggccgaggtgggaggatcactcgagtccaagagttcaaggttacaccgagctatgattgcaccactgcactccagcctgggcacatagaagaaccttatctcaaaaaacaaacaaaaacaaaaatgaaaaaatgaaatggaaaccagaaagaaagaaaatggagacatcacattggtcatagagaaattcaaaagtttagaaatactatgaataactatatgtggacaatttagacaacctagatgaaatgggaaaattttagaaacacacaatctaccaaaactgacttaagaagaaagataaaattttaataggcctgtaacaaataaagagattaaaatattaattatttttaaaaattccacaaagaaaagcccaggaccagatggcttccctggtgaattcaaccaaaagcttgaagaactaacacaaagccttcacaaactcttccaaaaaaataaaacaggaagaaatatttttcaactcatactatgaggccagaattactctgataccaaagacagaaaaagacattacaagaaaataaagttacaaagcaatatccttataaatatagatgtaaaaatcctcagcgaaatattagcaaatcaaatccagcagcatattaaaaggatcatacaccttgaccaggtaggatttatcccaggagtacaaatgcagttcaacatacaaaaatcaatcagtgtagcataccatgttaatagaaagtcacatgatcatcctaatgcacagaaggcatttgacaaaacctaacatccttttacgataaaattactcagcagatgaagacgagaaaggaacttcctcaacttgacaaaaagcatctatgaaaaacctataactaacaccatacttcatccattgtgaaagatcaagcgtttcccccctaagatcaggaacaggacaagaatgttcattcacactacttctacttattagggcaattaggcaagaaaaaggaacaaggtggaatctagatcagaaagaaagaagtaaaaccatctctattcacagatgacattacagaaattcttaactcacttaaaaaccattagagctaataaacaagttcaaggctgggcacggtggctcacacctgtaatcccagcactttgggaggccaaggcgggcagatcatgaggtcagaagtttgagaccagcctgtccaatatggtgaaaccccgtctctactaaaaatacaaaaattagccgggcgtggtggcgcatgcctgtagtcccagctactcaggaggcaaaggcaggagaatcaccagagcccaggaggtggaggttgcagtgtgccaagatcaagccactgcactccagcctgggtgactgactgagactccatctcaataaaataaaataagttcagcaaggttgcagggtacaagattaatacacaaaaatcaatagtatacatttgcaataaaggatgaaaaacaaaattaaaaccacacttccatttataataccatcaaaaagaataaaatagaataaatttaaccaaagaaaagcaacatttcaacacagcaaactacaatgtgctgttgaaagaaattaaagaagcgccaccaagcaatctgacctgagaaaacatgcaggttcaacagaatgagtcctgctcttcagcaagcacccatcttgtgttcaagctgggtctatgaggcaagtttggcaacatagacatggacatgccaccaaatctgtaatgtagaaaaggccaagggaaggtggatcaatcattggaaacattcaacaatccatggaagaaatgttaaaaatagaatctcagggtctgatgaagttggaatatcactcttctatgtatttcggttggaatctgttgaacgattggataaagtaaaagtatagggaattattaggtagcattaaatgtgtaataaatgtaaagagagggtgcaagtgcatacaaggaagtgtacgctactgggtttctgttgaattgttcatggaagaccatcagcagttcaattccaaaagcttgtcttaaaattagctgggtgtggtggcgtatgcctgtaatcccagctactcaggaggctgaggcaggagaatcgcttgaatccgggaagcagagattgcagtgagccaagatcgcaccactgtactccagcctggtgacagagcgatactctgactcaaaaaaaaaacaaacaaacaaaaaaaaaacttgtcttgagggactacgccagccttaacagctacaaacatcatggaggaagctgtctgcccattagaagcccagagcccagagggacagactagagcaaatcctctccctcattggagctagatgggaacacaaatctatctgataactaacatgcaattttacatctcttaccttgtttaatcctcacaaccaccctgatgagtagtagtattatgcccattttgtagatgaagaaacaagttcttcaaggggaagggtagcatatgaatgagaggcagaaccagagtcaggacctatatcttgtcttctccttcctaaaactagaaaagtacccacaaccaggcaatgcgtttggtgcagaaaaagcagtagtgaacaaaataggcaaaaatgtctgcctttagtgctcacattgttgtggagaaagacaaacaataagcacagtagagaagtaaaaattagaatgttttgctaaaaagtccataaaattgaatattattcagccataagaagggatgaagtaccgttatatgctacaacatggatgaaccttgacaccattatgctaaatgaaagaagccagtcataaaaggccacatatttcattattccatttgaatgaaatctccagaataggcagctacttcctatccacagaggtagaaagtagatgaatggtaaccaggggctaggggaagaggggaatggggagtgactctttattgggtacagagtttctttttgggtgatgaaaatgatctagaattagataactgtgatgttgacaaaactttgttaatatactaaaaaccactgaattggctttaaaccaattgaattttaaagtatactttgaaagggtggatattatggtatgggaattatatctgataatgaaaatatgattacattgttcaaaagcatagggaagaagctacaaaaaatatgaagcataaattgtggctcttttttattctgaagtgtagatttgaacattatatctcaaaatataaaacaaaaacaaagaaagctaaaagcccttccatttggccatcttggagtaagacctaccacagtccagtgccttttactcagccccacagcctagcctattgtttacatgaaaccctgtagcttccacccctgtttgactgttgggtgtaaagttatgagtgaccatattgggggaagggaggaaaactccccataaacgtgtatcctgggggcctgaggagagacgatggaccaggtagcagaacatgatatgcctacttgtccctatctccttgtccacacataaggcttggaaggcagccatgttgtatatcacgtgattgccaaccaatgagctgattggcttcttcaacaagagcccaggtagagattggtgtctagaggagcccatcagtttctagagaatcaggcctttggcagtggaaactcccctgggaggatgtcacagggtcctcagggtcagacacagagagaaggagacattgggacagagagaagaggcaagaaaaaaacataccttgcagtctgtgaggaacaaggtggcccctaggggcctccagcccaggttctgaatcaaagctcctcaaagtttaaggtgcatttggatcacctgaggatcttatgaaaataaactctgtctgattcagtaggtctgggtttgggggtgggagcctgttagtatatttctaacaagctcccaggcaaggctgctgctgctgctgatctaatgaccacagtttgaggctggacagagtggctcacacctgtaatcccaacactttgggaggacaaagcaggagggtctcttgaggctagaactttgagaccagcctgggcaacacagcaggacctcgtctctaaaaaacaagagagaagaagaaaaaggaaacaacaagaagacctcaactagaatatgaagcagctaggccacatatgtcttcaatggagaaaagagctttttcttgagtaaattggagtgtacccatgttccttgtcaatgatggtaactttaaatgtcaagaatgtgagagaggccaggggtggtggatcacacctataatcccagcactttgggaggctgaggtgggaggatcacttgagccaaggaattcaagagcaccctgggaaacaaagtgcgaccccgtctctacaaagtcaaaaaattagcccagattggtggcatgcgcatgtggtctgagctacatgggagggtgaggcagaaggattgtttgagcccaggtcgaggctgcagtaagctaagtttgtaccactgcactcattccagcctgggcaacagcaagaccctgtctcgaaaaaaaaaaagaatagtagagaccaggggaaggtgtgtccctggggtaggcgctgggagactggagaacaactgttagtggtcccatcactgcccagagcagacagtgccctgtccaccctcatgagatctttgaactccttggacaggactggctataaatgaaaatgtggggacccttatttttaacttgttaagaatgttaagatggcaacagcaaagctttaaaccaagtgcatggcccttctgcgttgtaggcccacaaggccgacactgttattcacatccttgtatggtcccctccccttgagtgtggctggggcctgtgctctactgcttggaagcaaggcttatccctaagccttattttcgggaaggtggatttgagagctactatcccacatccttgcttggtgccctgtgaataaatcttttctcttttgcaaaactcgtgtcatggtgattaatttactgtgcaatgccaggcactgttggaaacctctggataggcctcacagggcctcagccatctcagggaggcgttagctagagtgtaacaaatacgaccccagcaactggggagggacagctcattccttcatgaggtgtggggctggcagccccgcaggcagtcagccacccttcctctctggcctccgtcctgggcactgggcccaggcactgggcaaggaggctgctgcacctcctttctcctcttccttttttttttttttttttttttttttttttgagacggagtatggctctgtcgcccaggctggagtgcggtggcgtgagctcggctcactgcaagctccgcctcccgggttcacgccattctcctgccccagcctcccgagtagctgggactacaggcgcccgccaccccgcccggctaattttttgtatttttagtagagacgggtttcaccgttttagccaggatggtctcgatctcctgacctcgtgatccgcccccctcggtctcccaaagtgctgggattacaggcgtgagccaccgcgcccagcctctcctcttcccttttagtgggaaatatacctgcagcctagattcccagaaaggggtggtgagagagcagacacgccactgattgacccaaagttctaggatccaagggatgagtgaagagggcgtggccggactcggggctcctggtgaggtgcaccgctgcaggctgggtgacccagcagttcctgcccaaccctcacctacccccagccgttcctgtccgccgcccccaaccagccattcctgcccgcagttcctgttcccgggcctgtccccgggtttgtccccagggcccgtcccctgggtttaggtctgccctcccacgccccaccccattgcccccgccatgggtctgctgtcccagccctgccgttcagtctacatcttcgccaagaatggcatccccttcgagcttcgcaaagtggagctgaccaaagctgggctgggcaggcaggcccaggggatattggccgcggatccctgcctgtccccgctgctttgcagttgggccaagaatgcagactaacacgaagaatcagactctccggtgtggaaactattacataattatctatgttattatttttactttttggagacagcatctaactctgtcactcaggctggagtgcagtggcacaatcatggctcactgcagcctcgaccttccaggcttaagcgatcctcccgcctcagcccctcaagtagctgggactacaggtgcccacctacatgcctggccaatttattattattattattattgagaggaggtcttgctgtgtttccgaggctggcctagaactcctgggctcaagtgatcctcttgccttggcctcccaaagtgttgggattacaagcatgagccgccatgccccactggttgtctattttaatagaggcttgatctttgcttgtgaatacaaaacattcttcaaaatacaggtttagagagggcacagcaggcacagaacgagggtagggaaatggagtggggcaagaatatcttcaccccatgtgcttggaaaaaacaatgaaactgcctcgttgtttcctaagtaaaatagtccctgtctacccctgcctgtgtctcttccacttttgtattatttgtttatttatttatttatttatttattacagtgtctcaatctgcagcccaggctagagggcaatggcatgatcccggctcactgcagccttgacctctcaggatcaagtgatcctcccaacttactcctcctaagtagaatagttgggactacaggcacgtccccgtgcccagctacttttttctttggtgtgtgtagacgcatgattttgccatgtagaccaggctgaccttgaactcctgagctcaagtgatcctcctgcctcctccttctaaagtgttgagatcacagacatgcaccaccatgtctggccctgggtctcttccacttttatgtatttcttggcattcttctgccttttctttttcctgcatctgacttgctctatcccatggggcttctcacccagctgaaggggctactcctagaggctagaggctggagggccctgtggcagggcagtgggggaggccagcaccctcaccctgagctccagcgtttgctggtctggctggcatacagagatgcagctggagcacaattcagtggaggaggcagggctataactaagcagtagggcagagagcagagccagagccccctgggcaggccagagggaggaccctgctcagctgactcttcccaactgctgcccttggtacaaccagcttgagtcacctgctacagaacaggggctggacacagaagcagtctgtggagggagaatgggcaggggtgtgtatgtccattcagtagaagggcaaagaggcccacatgtaggcctatgatcagactggagcctggcttgactgaggtcctctgatccaaacaccaggcacctaatgcggcctctagcactggcctagagtgctaaagtgagtcagacctgggaacccccactggggagggagccttgagagtttggcataagaaagcaagaagagctgagccaccggaggctaagtagctgaatggggcagggattcccagcaagaatgaggttggtctgagggttgggaacatgtttggctgggactctggggtattgacaggtcacccagcctggccagtagggcctaaggccccagctgggataggaagctgaatcagagggggcaagcctagagcccagggaggaggctggaggggtctgacctatggatggaactggctgggggtggggtgtgaattacagctccagggaattgtccttgagccatgcttcaaggagctggacacaggaaagatggccctctgatggggtcaaggtctgtgacccagtgactagcagagaggcttcctcttccctgatacctcccagataggggcctcagaaagctgctgctgggattttggggtgggggtgggcagagacctcagagaactctgggttatccccactcacctctctgatctttcctgcaggccagcagcacagcgatgcctttgcccaggtgaaccccctgaggaaggtgccgggccttgaaggatggggacttcaccttggctgagaggtaaccggtccgtgggctgctgccgggccttgtggggccagtcggctgtctgttcactgttgatggcttggatcatggactgtgggccctgcaccagccccaggttgaagaatgggtggaggcaggcagaggtgcccagtgttgacaagggttatagaagtcccctcctgcattgtacaagtgaggaaactgaggctggaggaggggagggacttgcacaaggccacagggcccagtctgcttccgggcctcctcaccgccagccttcccctccaaaaaaaggagagtgctaagtttcgaggagcggctgtaccaggcatcttagtgctaccattttgcccacaaatcctgtggggcaagtgctgtttccctggagagtcgagggaccactcagcgagcttcagtggctatttgctaaacatccaccagggccagaccccatttaagccctggggcttgagcagtgaacgtgtctgcgtccttctcctcatggagctcacattccattaatagaagggggagctgacagtaacccatgtaaacatggaacatatcggatgttgatggatgccatggaaaaaataaacagggtaagagtgggggtgtgtgtcattatgagtaggatgctgagggaagactccctgaaggaggtggcatctgagcagagagctgtaggaatgtgcaaggcatgaggggaagggtgttctcactggagggaagagtgagggcgaaggctccaggtgggacaatgcatggggttcagactggagagcaacgggccagggtgggtgcagtgagcaggaagagcgggaggtcacgacagaggggagcatgggacactgggaaggctttggctcttaccgcaggtggattgagtcgttggagagttttgagcagaggagaactgtgatctgacttacgtcgtaaaggatccccctggcaggggtgagaaagccactgcagtcatctggcatgcagcgctggagccccagaccaaggtggtggtggtgcagggttgtgggggattgtggtcagttctgacttttattgaaatctaactgcagggtttgctgaagggttggaggtgggtgggaaaaatgaaagccaaaaccagcctccaggttggtggccgcatggtggcgtcctttaccgaggccacatagtgcctccttggtggagctggattcacattcagagcctgggatcactggatggtccaacacccataaaggcatgatgagctctgagggtcagactgcacaacccttcaccataggtgaacgggagttgggacagggtgggaagcaatgctgccatgtcacctggaaggctctgtccctgctggccttgctcctggccctgtccacgctttggatatgttggggagatatccaacttgctctcgttcttcagactcacactgggtgccccttcctcctggaagccttccctgagcccctgctgaagttcatgacattttgtttcttccttgctgcccttagttgagatgacagtctggccccgtgtagggctgtgtgaccctgggtagttacctaacctctctgagcctcacatccctcctctgcatcatggggatagtgaaaatgccccagaaaacggctgaagagtgttcagggcatgtcttctacccctgccatgtccccccagtgtggctagcttgctctatatgagctgcatgtacaaagcacctgaccactggtacctccaggacctgcaggcccgtgcccatggggatcagtacctgtgatggcagcacatggccctgcagagtagctgctgctgggccatgtggcagacggtgagccatggagggcagggacacctcccgggatgcccaagggatgctgctttcactttacaaaatcctgtttaaacctgagaccaaatcctggaatgccagagactgcctaattcacccaacttgtttcataggagggaaaccaaggaccagagccaaggaaggattcccctaatgtgccttaattccacagctaccacctgcacacttacactcacacactgttcgacacacagccacactcacacacacatctacccacgtccacccacagtcacacgatgtatcacattcacacatatacacccacacacacaatcataacatttacacacagtcacacagttaactcctatacacacatatacacccacacaatcacacaactcactcatattcaacaaagtcacacaactcactcacattgacacacatacacaccaaccccacacacaattcacatacatacacacacatatacacccacatacacaaccacaccattcactgacattaatacaaagtcatcacacagttcactcccacacacacacatacacctcacacacacaggcacacaattcacaccaacaaaatcacacagttcactcattcacacacatacacccacatacacaaattcacactgctcagtcacatttacacgccattcaaattcacacacatatacacctacatacacacagttcactcacatcacacacatatacacccacatacacacagttcactcacatcacacacatatacacccacacataaacacagtcacacaattcactcacgttcacacacacagttcactgacattcgcacacatacacacacaccacacacaggcaattcagtcacatggccgaaagccagtccttaccttcctacagttcctttcccagtgtcacctcagcctttggccctcagcgtccccttcccatgcctggactgctggagagccctgaacacaccccatcttcatgcctccagcgctagcccgagcccttccctctgccaagagcactaagtgcaactcaagatcacctctagggacccttccctgcccctgctgccaggtgacctgaggatcctgctggtcccgcttgacaatgatgcacagcatggttagttcagctgaggtcgctctcccagacttactgccacctacacagcactaggactgactgtttaactttattctttatttcgtgtactttattggagtgtctgttgaaagcaaaaccatccaataaggaacaatcccaaggcagccagcatggatcaagaaggcacaggctgtggccgccatccccagtgcctgatggggagagggggtggtaatggaaaaggcccaggaaagcaggccagagtgtcccccaaagtatgagaaatcactggaagagagagccagaatgggacctaagacagaagccaccaccaggcacccttaaggcaggacagttgcaatggttacttggaatacttccggctaggagtggtgttgcgggaagtcagggaccccaaacagagggaccggctgaagccatgacagaaaaacgtggattgtgaagattttatggacatttattagttccccaaattaatacttttataatttcttatgcctgtctttactgcaatctctaaacataaattgtaaagatttcatggacacttatcacttccccaatcaataccgttgtgatttcctatgcctgtctttactttaatctcttaatcctgtcaaccaaggaggatgtatatggcctcaggaccctgtaataattgcattaactgcacacattgtacaggatgtgtgtttgagcaatatgaaatgtgggcaccttgaaaaaagaacaggataacagcaattgttcagggaataagagagataaccttaaactctgactgctggtgagccaggcggaacagagccatagttctcttctttcaaaagcaaataggagaaatatcgctgaattctttttctcagcatggaacgtccctgagaaagagaatacgcaccaggaggtatcagcttataaacagcccccctgggcgtggcctgtctcttatggtcgaaactgcagagatgaaatatactccagtctcccatagcactcccaggcttattaggaagaggaaattcccacctaataaattttggtcagaccagttggtctcaaaaccctgtctcctgataagatgttatcaatgacaatggtgcccgaaacttcattagcaattttaattttgcctcggtcctgtggtcctgtgatcttgccctgcctccacttgccttgtgatattctattaccctcttaagtacttgatgtctgtcactcacacctgttcgcacactccctccccttttgaaaatccctaataaaaacttgctggtttttgtggcttgtggggcatcacggatcctaccaacgtgtgacgtctcccccggatgcccagctttacaatttctctcttttgtactctctccctttatttctcaagccggctgacggttaggaaaaataggaaagaacctacgtgattattggggcaggtcccccgatagagtggcacatgatgggcacagggcaggcttgggaaatggggggccgtaaggccacaagacatgtgggcaggtagcccagagtgtgtctggaacatcctgtttattggtcggcagtgacatctactgtcacatttgagaactgcatccacagccacatgacctcctgtgaagacctcagggcaaactggggaaacctgcccttcttggaaggtgatactaggggggatgagcaacacctttcttggaggtttgaattcctcagggcccctccagcatcttggtcttcctaattcctcccttgatcccccagccctaggggtggtagcttcttgtagtgtttacctccgtgttaatctggattctctctgtcttcggagttctctaatgcctggttaccaattctttatatcaagttctctccgttaaaatcattgtggtggggtccatcccatggatatacatggaggtctgtgtgacaatgtataatcttactatttgcagttattacaaaactgtcctagaagacatgaatgcttgttaaaagaaatcttttaagtttcctagacttcaaagaccgttgctatgccccgtgaaacatcgcctatatcctttaacagtttgcaattcgaattggttacttacttaacattttgttgccctggtgatacaattatgttgactcgttattgtgaggttactttgttattaaccatgatgaggattactagcacatacttttactccatatgtataacacaacaatgtagtaaaaccaataactcttggttctctattcaaagtgtttggaatctttattctgtttaaaacactgatgacatttgccaatttttgagtgttcttcatgttactgatttgtaggagctctttatatattgcagatttagtctcttactggttatgtatgctgcacctgaggagtagaagcactgccaaggacactgagtgtcttgtctgtgcagagcttcacatgaagctggagagaagggactggggcaagagggaaagataaaaaggggcaagtaagtaacagaatgaatccttgttgctaatctcctggcccccatcccagacccttcaggggatcctggcgattcgaagcagcatagcctgataggcctctggtgagggtgttgggagggttttcttggccgcctgttccaggatgctcaagatgatgctgtgggcctcctggcatagctcagcacccaggaaagcctccactcgtccacgccatgctgccagtcgtggccgtccctcaaacagttcatagccgagagccaccggctgtagggacaaggatgaaaaagttgtgggcatacaactttcccagttgtcactgccgacccgaatgctggaaccatgggcagaagtatcagagacatggtccattccccagcccctaagtgaatggaccacaggggcccaggcagtatgttcagccttagagcccaagagcagccagggtgagaccccacacccaggcaggaggcagaagttcagggttctggccccagatcatccagagacttgctctatgattctgggcaaagttctggctttctccaggcctcagtgtttctgtctgcctcatgggtgtgacacgaagagggacactgcccacaggctgagctcacacctgcatcagctcctccagggccatgagatcagccagtgtcacctgctggccagcgaggaagggcctgtcccccaggaacttgtcctccagccattgcagggcctggtccatggcagtcctgttgcgttccaccttctcctcgggcacctggaccccaatgagtggccccaacacctgatgggggcagacagtgggtcagtctatggccccgacctactgccaactactctctgatggccaatcactctccagatggctctcctcacctggacccacaggggtataccaaaggtgccacggatgcagtcggcatgccagcccaggtactcatgaacacgggcacgagcctgcaggtcagatggataccagtggtccggcgtctggtacttacagctcaggtaaatcaggatggccgagctgggaacaaatgggcagtggctataaggacactggcaccaggcatttacccctaactgctcccatctgccagtggggcccgggggcttctctgcatttgaaggactgccctccagcctcgccctccatctccagctccccaacaccacccactcctcctacgagtctcctcctgtctttgttgccttgggcaccgactcttggctggaccttctgctttgcattttgagaacctcatctctgtgatatgccagcagccgccctgtgaggtagagactcctgttagccttttagcacaagagaaaactcaaggtcagaatggtcaagtgacttgtccgaggcggtgcagctcagaataggctccctggacccctggaaccctgcatggggctggcacacagtggatgctccgtggagtcccttgcatgtccacgcgcttgggtcagggatcacgaggggaggaatgtctttggcccccgtctgacaggcccccagccatcacttctgcagccacctgacctcttgtccttttcctgcccagcagctggacctcaccatgagctgtgcccttgggccatggcattggcctctaggcccggcctgggtagattgggtagtctgcgacaagtcactagaggctcttttcagctagcatttgttgaacaaatgcgcaacagtggaaaaatgttcccttgtcttctcttctaatacccttcagtctgggagtggagaggccctgcggctcagaaaaggctgaagatgagagctggggggacatgttctgtcagcccctgctcatcccggacacaccccaagctgtaccttctccccagatacctctcctttctttctttccttttttttttgagacggagtctccctctgtcgcccaggctggagtgggctccctctgtcacccaggctggagtgcagtggcgcgatctctgctcattgcaagctccgcctcctgggttcacgccattctcctgcctcagcctccccagtagctgggactacaggcggccgccaccacgccctgctaatgttttgtatttttagtagagacagggtttcaccgtgttagccaggatggtctcgatctcctgacctcgtgatccgcccacctcggcctcccaaagtgctgggattacaggcgtaaaccaccgcgcccggcctttttgagacggagtctagctctgtcgcccaggctggagtgcagtggcgcgatctcagcacactgcaagctccgcctcctgggttcacaccattctcctgcctcagcctccagagtagctgggactacaggcgcccgccaccacgcccggttaactttttttccatttttagtagagacggtgtttcacggtgttagccaggatggtctcggtctcctgacctcgtgatccgcccgccttggcctcccgaagtgccgggatgacaggcgtgagccaccgcgcccggccagatccctcgcctttcccctccctcgctgccccatggggtatgggagggccactggggcccggggccagtggggagagccaaggtcacatgggctccggatgcggtgaggggtgagggaaggagggcacctttcggtcaagatgaaatcaccatccttgagcgtcggcagtttccccaggctgttgatctgcaagaactccttgctcttgtgctgccctgaagaggaagaagtcagaaaaggtcttcagagtaaaaacgctgcacctctacaccctccctcctcctccccaagcggagccccacagccctgagaaacagcaaggtctgggactagaggcctggatcagcctcactccctggctgggcctccctgccctgccacattccggggcagctggggggttttggtgggtggggccaggtgcagcaggtggataaagagaagttttctagccggactctggtgggccaggggaggggaggcaaactggggtggctcatctcttcccatctcttaattctcacaacagcatgtccttcttcccgaggtcttctgggctttgtgaatttatatgcgtgcattccacgcaagaactctgtcaactccattcagtattttctttccatccctacagagcagaaggtaacgttatcctccttttcagaaggcaagctaaggttcagagaggctgtgatccctccaaggccactcagtccacagcattctctggtggcagacgctgcaggaggaggtgagggggctgtgcgggcggcgagacgctcagggcagagcagggcgggggcctgggggtgcactgggtttgtggacacgcggggaaacgggctgggcccacctttgaccaaatccacggtgcgcagctctaaggggatgccattcttcttggcgaagatgtagacggcgcggctgggctgggacaccaggtcaagaaacagctctaggcccatggcgggggcggcaaggacagcggggatggcagtgaaggcgctgagcgcggtgtgggcagcagctgtggcaggatcccggcgcgccgggaaataggggatcaggccccaccccctggggacagcacccaattggagcgcaccacccccggacccgcctcgccccttcggttcctgtccagtcctgccggccaagactccaccaccagatccgtgcgtccctacagggagggcggtcgctatgaacgcacagctgggagggtggagttggagctggggaccctcgactggcagggaggacgcggatgcagggggccgactgcaaggggaaggggaaccggctggacagggagaagcaggtctgcttttcgggatcccggtgccagggaccctgcccagttccaggcgtcgccctgacccagaaacgactgggcgccgccgtcctggaaaggccccagcgcacggacatctgagggttcgttcagagctctgtttctcggcgctgcatggtggcggaagggagggagcgaatgggatcctctaaaagggatcttagagtttcacccagtgggatgtgacacttgcaggtgtcccaaactggtgggaaccttgactggaaggctggggtcaaggatgaactttctgccgtccagactgtcccctgcagagcagctgctgccagacagcgggagctgccagacagcgggagctcccacttcgtgcacaggatgggggcagggagcccgcagccgcgggaggcaggaatgactgtccgggaacctcctttcttctccctgaatcccagccctggcatctcaccagggggcacagtgatggtccagggctgggcccgggactctagctgaatctttcagagtatcccatccctctggccagtggcccaagcgagtgaaccagaatgcttccttgggagttttgaaactggaactggagagaggagctccctatggggaggtaaacgggagctggggccacctgtagtgacatttcctgagttcgaggagtagacgagactgagagagaaaagctgactcagagaaagggagtgataacagggcatgctggcccacacctgcaatcccagttactctcacgggatctgtttctctgatgtctgggtatgaaaggactttctaagcctcagaacagtgggagaactcaacaaagaaaaaaccaatacatatacaaggttactttgtggaggaaaaaatggattaaccttaagcaaaaaactgggaaggatctcggtaaaagatacgtcagaaggaagtaatgtcctttaagatgttcttagaaacccatcagacaggtggggtgtggtggttcacgcctgtaatccctgtactttgggaggcagagatgggcggatcagttgaggtcaggagtttgagaccagcctgggcaacacggtgaagccccgtctctactaaaaatacaaaaattagctgggtgcggtggcacactcgggaggctgagacaggagaatcacttgaaccttggaggcagaggtttcagtgagctgagatcataccactgcactccagccgggccactgagcgagactgtctcaaaacaaacaaacgaacaaacaaaaagaagagaaactcatcagacgaagacacaggaaaaaaatgagcgaaggaaatcagcagaggtttcattgaaggacaaagagaaatggtcaatacatggatgaaaacatgtttaacttcagtaataatcaaggaagcacacaccaacacaacatgcacatactgtttttatttatcaaaggcacacatatttttgaaatgagtactcctaattaatatgtacagagcacttacccagtgcccagcacaggggtggcaccctgtgtgtgagacagcatgaaacaggtagacacgcgccctgctgaaagtaagggaccacctctctggaggatccatcgggcaataaggaggtttccacaccttaactgtgtctgccttgacctctggggcctgggagcagagccccctccagctggtggggaaggaagcgtggtgtgtttgaggacagaatggagagaagttgagtagagcaagtgtagactcttcctatccaaagtgtggtcaatggactgggagtatcagcatcaccagggagcttgttggaaatgcagaggctcaggccccactctgaccttactgattgggagcataaactgtaaccagattccagggaggattcatacacacattcccgtttgataagtggggggtagtaggaggtgaggtgaaaagtggggaggggatggctaccgcactggagaaggctggctttgtgttgaggcctttctcatgagggcagtggggagccatggaaggctttatgcaagagagggtacgggcagattgagattacagaaggatcccactggttgccttgtgtgaggacccagggagaagggggaggctgtccctgtttgagtaggagatgagagctactggtggctatgagtggaaagaagtgagcagaggtgagcagaaatcccaaggactggtgatgataggatgatggtgggaaccaggatgggctttgggcagaccctgacccctctctctgcctgtcggcccaccagataataatccctgtgttcctgggcgagtcagtgccacccgagatgttggcggccactttggctgagctggacggatgcctgcagctgctcgaggacaagttcctgcgggaccaggccttccttactgggccccgtatctctgtggctggcttggtggcaatcacggagctgaggcatgagagtgccatggggtgcggtggcccgctgggcagtggtgtatccgggaagggagctgacatcccagctcatgttgtcttttctggctgtgggaccctgtgtgagtcacttctccttctgagcctcagtgtcctcatctataaaatggggctttacaaacccctcaccgcagctatattaagaggcttccaagtgtccccagggagggggacatcctagcccatcacacacatggtggaggagggaaaatccaatcagagaacccctaaagcaggtcatgctgccttacacttggctatgcccagcccctccgctgactctgtcttcccctagcccatcagtgctggctgctgagtctttgaaagcggacccacggtggcagcatggtgcccaacacgtggaggctgcagtgcgggaggacctcttccaggaggccctcccagctgtcctgaaggccaaggacctgcctccagtagaacctgctgttaaagagaatctgaagaccttaatgcagcttttcttgctgtgagtgcgtgtcccacacttgctgagccactgaggggatgctgtgttggtagaataaagacatggagctgtccgtctccttggttgaagagaagacatatctgcaaaggctctggtccacagttcctccagatatcatgcctgcattccttttgtctcctaccccattccattctagcttccatgtgacctctgaaaagagcttgggcaaacgcttacttgaccctgaccttctgtgtggaactttgtatggttcctcactgcccagaagctaaagtacaagtcattgaactttgcattcaaggccttgctcccactcctccaggtggccccttctgcctgcacactcctaacccctctctgggctcccaccttggcctcttggcctccgctcatgctgttccctcctcatcttcgcctggtgcccttcctggtcttttggcatttggcaccctgtctcttctccagggagacttccctgacctccccagccccagtccaggtcaggcgacctctctgggctcctcagccccagtgtttccttgcgggggatacccccggactgagcatgtatcatcgatgaggggtgacctggtggaaagatgtctgaatcaggatcagccttggtctcctcggtctctctcctcactgtggggcgatgttgtgttccacaagtggggtgcagggctggttcatgaacctccttgcaggaagggaagtccctggttatttcctggccctctcccatgcctcctcataaccttgaccacagtcttctctacaccccactcccggaccactggcttgtccatgccccacacctggtcccagacttgccacctgtccctgccctctccccttaggactgtcatatttacctgtcgtgtgtctcagaccttctgatatctgagtcatctaataaacaaactgctaataggacaagatcatgacagacagagactctgtcggcctttcagtggaggctcctttaagtatgcacacttatagagaattttatacacgtagttgaaattgtacatataaacttgcaaattttttctttcttttttgtgggggaggggggagcctgggtctcactctgtcatctagggtggagtgcagtggcacagtcatagctccctgcagcctagatctcctgcgctcaagcaatcctcctgcctcagccgcccaggtagctaggactacaggcacacaccacagcacccagatttctttcttttttttttttttttttgtagaaaataaagaagagaatcttgctatgttgcctagcctgatctttaactcctgggctcaagcaatcctcccttcttagcctcccaaagtgctgagattacaggtgtgagccacattgctcgaccacaacttcagtcatatttgtaatgtacaattcaagtgattttgccacactgaccacactcatgtttaagccacgccaacagagttccatgttttctgatgttttttcgagatggagtctcgctctgtcacccaggctggagtgcaatggcgcgatctcggctcactgcaacctccacctccccggttcaagcgattctcctgcctcagcctcccgagcagctgggattacaacgtctgccaccacgcccggctaatttttgtatctttagtagagacggggtttcgtcatgttggccaggctggtctcaaactcctgacctcaggtgatccgcccgcctggacctcgcaaagtgctgggattacaggcgtgagctaccgtgcccggcctttccatgttttaaagaacatattttgccaccccctggtggacagtggctcaccaccggcacaagaggctacacaggcagatgtcaatggggaccaggcagggacaggtattgtcgtgagcctagccctacccgcgcccccgcgagtaaccacatctcctgactgcccaagcgcagatttccatactgaacatgaaattgcctgacttcgaaatggtggcaaatcattcaaaaaaactttaagctcccgttgtattggttattagggtcgagcctggggaagacccctataggtgtgtgtgtgtccttgtgtgtcgggggtgtggtgttcagacctctaatagggctaggaaccgggcgaccacagcgcggaagcttgagagggaaacccacctggcgccaggcaggagggtcgggggagacagggtgggtccactaccgggttaaagacctgtagtgggtggggctacacgtagggcggagacgatgggacttccggaaatcagccggcacacgtgacttttgtttgcagaagcgggaggtaccctaggcagccaatcggggagcgccgagtctctgtccagccaatgagaagccaggttgctgtggcgcctcgcccctcctccctggtccgcgagccttgggtacccccagcttttcttccgccagagctgtttccgttcctctgcccgccatgccgttcctggagctggacacgaatttgcccgccaaccgagtgcccgcggggctggagaaacgactctgcgccgccgctgcctccatcctgggcaaacctgcggacgtaagcgtgggccgggcagcacggggcgaggggaggttggtgggccaggggtccggccctgtccctgctccgcctccccgacagtgaccccgaatcttttccccagggaccactccccactcctttcctcacgccaagctctgactttccgtgctccacgatcccgcggctccccctccgcacgtctttcccttgtcgccctccccagtcatgacccgggcgtgaccttcagggaccgcggcccgtatcgggatccctgccccgcgaacactgcgcgtttcggctttcgcgcgctcgggtcccgtccccagaggtagcccggccggctccaacttcgggcaaaacttttcatgtccccctcagcgcgtgaacgtgacggtacggccgggcctggccatggcgctgagcgggtccaccgagccctgcgcgcagctgtccatctcctccatcggcgtagtgggcaccgccgaggacaaccgcagccacagcgcccacttctttgagtttctcaccaaggagctagccctgggccaggaccggtgcgtaggggtagtaggggatccatgtgggactgccgcagactggagccactgatcctgcctcagggggaaaaacccatttcttgccctgcccagtaaggacacatcagggtctggagctttggggccccctgaccccttaggttcctgctgttaggaccatcttcaaagtgcgagcaggattgaatgaatttctggctctgctcctcagtgtgtaagtctgtgaaccgggaaggctctcttttaacacccccggggcagtgcaagggtcatgtgggattgtctgtgtgctgtacctgccttggcacctgacaggtggctgaagtgtgattttctagaacttttccaggctggtcagaaggaattctgggtatgttctgaagttacgtattttggacctgtgtcccagccaggttccaggtgaagttcacgggagactcacagagtagtgaaagaccattggcctggatgtctagacatctgctttctgggtcctgcatagctgggggaccccagacaaacttggaaatgaaccatctccagttggcaacctcctcttctgtgaatacaggggaaaagacctccctcccccacaagaagcgtctgcaacccaaacctggcgttctgtgaccgagttaaagtttcctcttgggtaaaagatattcttgagccacatccatgtctaggaggaagtaagggcatgagaagctt

SEQ ID NO: 1468 - DNA, 14014 bp, Homo sapiens
ggaggcggcgctggaggagaagagcgccctggagcagatgcgcaagttcctttcggacccgcaggtccacacggtgctggtggagcgctccacgctcaaagaggacgtcggtgatgaaggagaagaagaaaaagaattcatttcctataacatcaacatagacattcattatggggttaaatccaatagcttggcattcattaaacgtactcccgtgattgatgcagataaacccgtgtcttctcagctccgggtccttacactcagtgaagactcgccctacgaaactttgcattctttcattagcaatgcagtggctcctttttttaagtcctacattagagagtctggcaaggcagacagggatggtgataaaatggctccttcagttgaaaagaagattgcagaactcgaaatgggactccttcacttgcagcaaaatattgaaattccggagatcagcctgccgattcatccaatgatcacaaatgttgcaaaacagtgttatgagcgtggagaaaagccaaaagttacagactttggtgataaggttgaagacccaacatttcttaatcagttacaatctggagttaaccgctggatccgagaaattcaaaaagtgaccaaactggatcgagatcctgcatcaggaactgccttacaggaaattagtttttggctaaacttggaacgtgcgttataccgcatccaggagaaacgggagagcccggaagttctcctgactctggatatcttgaaacatggcaagcgcttccatgccaccgtcagttttgacactgacacaggtctaaaacaggctttggaaactgtgaatgactacaatcctctgatgaaagatttccctctgaatgatttgctgtctgccacggagctggacaaaataagacaggcgcttgttgccattttcacacatttgagaaagatccgaaacacaaaatatcctattcagagggcactgcgtttggtggaggcaatttcaagagacttgagttctcaattactcaaagtattgggcactaggaaattgatgcatgttgcttatgaagaatttgaaaaagttatggtagcatgctttgaagtttttcagacttgggatgatgagtatgagaaacttcaggtattgttgagagacatcgtcaaaagaaaaagggaagaaaatctgaagatggtgtggcgtatcaaccctgcccacaggaagctgcaggcccgccttgaccagatgagaaaatttagacgccagcatgaacagctaagagctgttatcgtcagggtcctgaggccacaggtcacggcagttgcacaacagaatcaaggagaggtccctgaaccccaagatatgaaagtggctgaggttctctttgatgctgcagatgcaaatgccattgaggaagtaaaccttgcttatgagaacgtcaaggaagtggatggactggatgtttccaaagagggcacggaagcctgggaggctgctatgaagaggtacgatgagaggatcgacagagtggagacccggatcaccgctcgccttcgggatcagcttggcacagccaagaatgccaacgagatgtttaggattttctccaggtttaatgcactgtttgtcaggcctcacatccgtggggccattcgcgaataccagacccagctgatccagcgcgtgaaagatgacattgagtctcttcacgacaagttcaaggtccagtacccacagagtcaggcttgtaagatgagtcacgttcgtgacttgccccctgtgtcagggtctatcatctgggctaaacagatcgacaggcagctgacggcctacatgaagcgggtggaagatgtccttggcaagggctgggagaatcacgtggaggggcagaagctgaagcaggatggagacagcttccgcatgaagctcaacacgcaggagatctttgatgactgggcaaggaaggtgcagcagcgcaacctcggtgtctcggggcgcattttcaccatcgaaagtactcgggttcggggccgaactggaaatgtgcttaagctgaaagttaactttcttcctgagattatcacactatccaaagaagtccggaacctcaaatggcttggtttccgcgtcccactggcgattgtgaacaaagcccatcaagcaaaccagctttacccgtttgccatctcactgatcgagagcgttcgtacctatgaacggacctgcgagaaggtggaggagcggaacaccatttcccttttggtggctggcttgaaaaaggaagtgcaggccctgatcgcagaaggcattgcgttggtgtgggagtcctacaaacttgacccatatgtacagcgcttagcagagactgtcttcaacttccaagaaaaggtggatgatctgctgatcattgaagaaaaaatagacctagaagtccgttccttggaaacttgtatgtatgaccataagacattctcggaaatcttgaacagagtccagaaagcagtggatgacttaaatctgcactcctattccaatttgcccatctgggtcaacaagcttgacatggagattgaaagaatattgggcgtccgtctgcaagctggcctgagagcttggacgcaggttcttcttggacaagctgaagataaagcagaagttgacatggacacagatgctccacaagttagtcacaagcctggtggagagccaaagatcaaaaatgtcgttcatgagctaagaataaccaatcaggtaatctacttgaatccaccaattgaagagtgcagatacaagctgtatcaggaaatgtttgcctggaagatggttgtactgtctctccccaggatccagagtcagaggtaccaggtgggtgtacattacgaattgactgaggaagagaaattctatcggaatgctttaacacggatgcctgatggccctgttgccctggaagagtcgtattctgctgtcatgggcattgtatctgaagttgaacagtatgtcaaggtttggcttcagtatcagtgtttatgggatatgcaagctgaaaacatctataacagacttggagaagatctcaacaaatggcaggctctcctggtccaaataaggaaggccagaggaacctttgacaatgcagaaaccaagaaagagtttggaccagtagttatagattatggcaaggtacaatctaaggtgaacttgaaatatgactcttggcataaggaggttcttagcaaatttgggcagatgctaggatcaaacatgacggaattccattcccagatctcaaagtcccgccaagagttggagcagcactcagtagacacggccagcacctccgatgcagtgaccttcatcacctatgtgcagtctttgaaacggaagatcaagcagtttgagaagcaagttgagctctaccgcaatggccagcgcttactggaaaagcaaaggttccagttcccaccttcctggctttatattgacaacatcgagggagagtggggagccttcaatgacatcatgcggcgaaaggactctgccattcagcagcaggtggcaaacctgcaaatgaagattgtccaggaggatcgggccgtggaaagccgcaccaccgacctgctgactgactgggagaagaccaagcctgtcacgggcaaccttcgcccagaagaggcacttcaggctctcaccatatatgaggggaagtttggtaggctgaaggacgacagagagaagtgtgcaaaggccaaggaggcgctggaattgacagatactgggcttctcagtggcagtgaagagcgcgtgcaggtggccttagaagaattacaggacctcaaaggcgtttggtcagaactttctaaggtttgggagcaaatcgatcagatgaaggagcaaccctgggtttcagtacagcctcgaaagcttcgacaaaatttggatgccctcctgaaccagctgaaaagcttccctgcccggttgcgacagtatgcgtcctatgagtttgttcagaggcttctgaaaggttacatgaagataaatatgctggtgattgaactgaaatccgaagcacttaaagaccgccattggaaacagctcatgaaaaggcttcacgttaattgggttgtttctgagctaacccttggccaaatctgggatgttgacttgcagaaaaatgaagcgattgtcaaggatgtactgcttgtggcacaaggggagatggctttggaagaatttttgaagcagataagagaagtgtggaatacttatgaactagacttggttaattatcagaacaagtgccgcttgatccgtggctgggatgacctcttcaacaaggtcaaagaacacatcaacagcgtctcggccatgaagctctctccgtattacaaggtttttgaagaggatgctctcagctgggaagataagctgaacaggatcatggctctctttgatgtgtggattgatgtgcagaggcggtgggtctacctggaaggtatcttcacaggcagtgcagatatcaagcacctgctgccagtggaaacccagcggtttcagagcatcagcactgagtttttggctctaatgaaaaaagtgtccaagtctccccttgttatggatgttctgaacatccagggagtacagaggtctctggaaagattggcagacctgctaggaaagatccagaaagcattgggagaatatctggaaagagagcggtcatctttccccaggttctattttgtgggtgatgaagatttgcttgaaatcattggaaacagcaagaatgtcgctaaattacagaaacacttcaagaagatgtttgctggagtttcgagcatcatcctgaacgaggataactctgttgttttgggtatttcatctcgggaaggagaggaggttatgtttaaaactcctgtgtcaattactgaacatcccaaaatcaatgagtggctcacattggtagaaaaggagatgagagtcaccctggccaaactgcttgctgagtctgttacggaagttgagatttttggtaaagcaacttcaattgacccaaatacctacatcacttggattgataaataccaggcccagcttgtggttttgtcagcccagatagcctggtctgagaacgtggagaccgcactgagcagcatgggcggaggtggagatgccgcgcccttgcactctgtgctgagcaatgtggaggtcaccctcaatgtgttagcagactctgtcctcatggagcagcccccactccgaaggcggaagctagaacacttgattacagagttggttcaccagagagatgttacaaggtccttgatcaaaagcaagattgacaacgccaaatcttttgaatggctcagccagatgcgattttactttgaccctaagcaaactgatgtgttacagcagttgtcaattcaaatggcaaatgccaaatttaactatggctttgagtacctgggtgttcaggacaaactggtccagacccccctcactgaccgctgctatttgacaatgacacaagccttggaggccaggctggggggttccccatttggacctgctggaactgggaaaacagagtctgtcaaagctcttggccatcagcttggacggtttgttttagttttcaactgtgatgaaacctttgatttccaggcaatgggccggatctttgtgggcctttgccaggtgggtgcctggggctgctttgacgagttcaaccgcctggaggagcggatgctctcggctgtgtcccagcaggtgcagtgcatacaggaagcactgcgtgaacattccaaccccaactacgacaagacctctgcccccattacttgtgagctgctgaacaaacaagtcaaggtgagcccggacatggccatcttcatcaccatgaaccctggctacgcgggccggtctaaccttcctgacaacttgaagaagctgttccggagcttggccatgaccaagcccgaccggcagttaatcgcccaggtcatgctgtactcacagggtttccgcactgctgaagtgcttgccaacaaaatcgtcccgttttttaaactatgcgatgagcagctctcttcccaaagccattatgacttcggtcttcgggctttgaagagtgtgctggtgagtgcaggcaatgtgaagagagagagaatccagaagataaagagggagaaagaggaacgaggggaagcagttgatgaaggagaaattgctgaaaatctccctgaacaagagattctgatacagagcgtctgtgagacgatggtgccaaagctggtggcagaggacatcccgctgctcttcagcctcctgtcggacgtgttccctggagtccagtatcacaggggtgagatgactgcccttcgagaggagctgaagaaagtgtgtcaggagatgtatttgacatatggagatggagaagaagttggtggaatgtgggttgaaaaggttctccagctctatcagatcacccagatcaatcatggcctgatgatggtggggccctcgggaagtgggaagagcatggcctggcgtgtcctgctgaaggcattggagagactcgagggtgtggaaggtgtggcccatatcatcgaccccaaggccatcagcaaagaccacctctacggaaccctggaccccaacaccagggaatggacagatgggctcttcacacacgtgctgagaaagatcatcgacagcgtgagaggcgagctgcagaagcgccagtggatcgtcttcgatggcgatgtggatccagagtgggttgagaacttgaactcagtgctggatgacaataagctcctaactttgcccaatggagagcgcctcagtcttccacccaatgtgagaataatgtttgaggtacaggacttgaaatacgcgaccttggccacagtgtcgcgctgcggcatggtctggttcagtgaggatgtgctgagcaccgacatgatcttcaacaacttcctggccaggctgcgcagcatcccgctggatgaaggggaggatgaggcacagcggcggcgtaagggcaaagaggatgagggggaggaggccgcttcccccatgctgcagatccaaagagatgcagctacgatcatgcaaccgtacttcacgtccaacggcctggtcaccaaggcgctagagcacgccttccagctggagcacatcatggacctaacacgcctgcgctgcctgggctcgctcttctccatgctgcaccaggcctgccgcaacgtggcgcagtataacgccaaccatcccgacttccccatgcagatcgagcagctggagcgctacattcagcgatatctggtttatgccatactctggtccctgtctggagacagccggctaaaaatgagagcagagctgggtgaatacatcagaagaatcacgaccgtgcctctgcccactgcgcccaacatacccattatcgattatgaggtgtccatcagcggagaatggtctccgtggcaggccaaggtgcctcagattgaagtggagacgcacaaggtggcagcccctgatgtcgtcgtgccaacgctggacacagtccgccacgaagccctcttgtacacttggctggccgaacacaagcccctggtcttgtgtggccctcctgggtctggcaagaccatgacactcttcagcgccctccgggccttgcctgacatggaggtggtgggtctcaacttctccagtgctactactccagagctgcttctgaagacttttgatcactactgcgagtacaggcgcacacctaatggggtggttttggctcctgttcaacttggaaagtggctggtgttgttctgtgatgaaatcaacttgccagatatggataaatatgggacccagagggtcatatccttcatcagacagatggtggagcacggaggcttttaccgtacctcagatcaaacatgggtgaagctggagagaatccagtttgttggggcttgtaatccccccacagaccctggaagaaagcccctctcacacaggttcctgcgccacgtgcctgtcgtgtatgtggattacccgggccccgcctccctcacacagatctacggcaccttcaaccgcgccatgctgaggctcattccatccctgcggacgtatgcagagccgctcactgctgccatggtggagttctacaccatgtctcaggagagattcacccaggatacacaacctcactatatctattcaccccgtgaaatgactaggtgggtgagaggcatctttgaagcgctgagacctctggagaccctgcctgttgaaggcctcattcggatttgggcacatgaagctctgcgtctcttccaagatagactcgtagaggatgaggagaggcgttggactgatgagaacatcgacacggttgctctgaagcacttccctaacatcgacagagagaaggcaatgagccgacccatcttgtacagcaactggctgtcaaaggattacatcccagtagaccaagaagagttaagagattatgtcaaagctaggctgaaggtcttttatgaagaagaacttgatgttccgctggtgctgtttaatgaagtcctagaccacgtgctgaggattgacagaatattccgtcaacctcaaggccacttgcttctgattggtgttagtggagcaggaaaaactaccctgtctcgtttcgtcgcctggatgaacggtttgagtgtgtaccagattaaggtccataggaagtacacaggggaagactttgatgaagatctacggacagtgttgagacgttctggctgtaaaaatgaaaagatagcatttataatggatgaatctaatgtgttagattctggattcctggagcgaatgaatacccttctggccaatggagaggtgcctggtctctttgaaggagacgagtatgccaccttgatgacgcagtgcaaagagggggcacagaaggaaggcctgatgctggactcgcacgaggagctctacaagtggttcactagccaggttatccgcaacctccacgtcgtgttcaccatgaacccgtcctcggagggactcaaggaccgggcagctacatcaccagcacttttcaacaggtgtgtgttgaattggtttggagactggtccaccgaagcactgtatcaggttggcaaagaattcacaagtaagatggatctggagaagccaaattacatcgtgcctgattacatgccagttgtgtatgataagctgccgcagccaccatcccatcgggaagccattgtgaacagctgtgtgtttgttcatcagactcttcaccaggcgaatgctcggctagcaaagcgaggcggcagaacgatggccatcacccctcgccactacctggacttcatcaatcactatgccaacctgttccacgagaagcggagcgagctggaggagcagcagatgcacttgaacgtggggctcaggaagatcaaagagacagtcgaccaggtagaagaactgcgtcgtgacttgaggataaagagccaagagctggaggtgaagaatgcagcagccaatgacaagctgaaaaagatggtgaaagaccagcaggaggctgaaaagaagaaggttatgagccaagaaatccaggaacagctgcataagcagcaggaggtaattgcagacaaacagatgagtgtcaaagaagatcttgataaggtggaacctgccgtcattgaggcccagaatgctgtgaagtcgatcaagaagcagcacctggtggaggtgaggtccatggccaaccctcctgctgctgtgaagctggcgctggagtccatctgcctgctgctgggggaaagcaccacagactggaagcagatccgctccatcatcatgcgggagaacttcatccccaccatcgtcaacttctctgcagaggagatcagtgacgccataagggagaagatgaagaaaaattacatgtccaatccaagttacaattatgaaattgtgaatcgggcttccctggcttgcggccctatggtgaaatgggcaattgcacagcttaactatgcagacatgttaaagagagtggagcccctacgcaatgagctgcagaagctggaagatgacgccaaggacaaccagcagaaggccaacgaggtggagcagatgatccgagacctggaagccagcatcgcccgctacaaggaggaatacgccgtcctgatctcagaggcccaggccatcaaggcagacctggcagctgtcgaggcaaaagtaaaccggagcactgctcttctgaagagcttgtctgctgaacgtgaacgatgggaaaaaacaagtgaaactttcaaaaaccagatgtccaccattgctggggactgtctcttgtcagctgcgttcattgcctacgcgggttactttgaccagcagatgcgtcagaacttgttcactacctggtcccatcacctacagcaagccaacatccagttccgtacagatattgccaggacggaatacctttccaatgctgatgagcgtcttcgctggcaggccagctccttgcctgctgatgacctttgcacagaaaatgccatcatgctgaaacgattcaataggtatccgctgatcattgacccctctggacaggccacagaattcattatgaatgaatataaggatcgtaagatcacacggaccagcttcctggatgacgccttcagaaagaacttagagagtgcactgagattcggtaacccccttctggtccaggatgtggaaagctacgatccagttttgaacccggtgctgaaccgtgaagtgcggcgaacaggggggagagtgctgatcactctcggggaccaggacatagacctgtcgccatcgtttgtcatcttcctgtccacccgggatccaactgtcgagttcccaccagatctctgttcccgggttacttttgtaaacttcacagttacccgtagcagtttacaaagccagtgtctaaatgaagtacttaaagcagaaagacctgatgtggacgagaaacgatctgatcttcttaaacttcaaggggaatttcagctccgtttgcgtcagctggaaaaatctctactacaagctctgaacgaggtgaaagggcgcattttggatgacgacacgatcataaccactctggagaacctgaagagagaggctgcagaggtcaccaggaaagttgaggagacggacattgtcatgcaggaggtggagaccgtgtcccagcagtacctcccgctctccaccgcctgcagcagcatctacttcaccatggagtccctcaagcagatacacttcttgtaccagtactccctccagtttttcctggacatttatcacaacgtcctatacgagaacccgaacctgaagggtgtcaccgaccacacacagcgcctgtccattataacaaaggacctcttccaggtggcgtttaaccgagtggctcgaggcatgctgcatcaggaccacattacctttgccatgctgctggcaagaatcaaactgaagggcaccgtgggggagcccacctacgatgcagaattccagcacttcttgagaggaaatgagattgtcctgagtgctggctccacccccaggatccagggcctgactgtggagcaggcggaggcggtggtgaggctgagctgccttcccgcgtttaaggacttgattgcaaaggttcaggcagacgagcaatttggcatctggctggacagcagctccccggagcagactgtgccctacctctggagtgaagaaacacctgcaacacccattggccaggccatccaccgcctgctcctgatccaggctttccggcccgatcgcctgttggccatggcccacatgtttgtttcaacaaaccttggggagtctttcatgtccatcatggagcagccgctcgacctgacccacattgtgggcacagaggtgaagcccaacactcctgtcttaatgtgctctgtgcctggttatgatgccagtggacatgtcgaggaccttgcagccgagcagaacacgcagatcacttcaattgcaatcggctctgcagaaggctttaaccaagcagataaggcaataaacaccgctgtaaagtcgggcaggtgggtgatgctgaagaatgtgcatctggccccagggtggctgatgcagctggagaagaagttgcattccctgcagccgcatgcctgcttccgactcttcctcaccatggagatcaaccccaaggtgcctgtgaatctgctccgtgcgggccgcatctttgtgttcgagccaccgccaggggtgaaggccaacatgctgaggacgttcagcagcattcccgtctcacggatatgcaagtctcccaacgagcgtgcccgcttgtacttcctgctggcctggtttcatgcgatcatccaagaacgcttacgatacgcaccactggggtggtcaaagaagtatgaatttggagagtctgacctgcggtcagcttgcgatacggtggacacgtggctggatgacacggccaagggcaggcagaacatctcaccggataagatcccgtggtctgcactaaagaccttaatggcccagtccatttatggcgggcgcgtggacaacgagtttgaccagcgtctgctcaacaccttcctggagcgcctgttcacaaccaggagtttcgacagtgagtttaagctggcatgcaaggtcgacggacataaagacattcaaatgccagatggcatcaggcgagaggagtttgtgcagtgggtggagttgctccccgacacccagacgccctcctggctgggcctgcccaacaacgccgagagagtcctccttaccacacagggtgtggacatgatcagtaaaatgctgaagatgcagatgttggaggatgaggacgacctggcctacgcagagactgagaagaagacgaggacagactccacgtccgacgggcgccctgcctggatgcggacactgcacaccaccgcgtccaactggctgcacctcatcccccagacgctgagccacctcaagcgcaccgtggagaatatcaaggatcctttgttcaggttctttgagagagaagtgaagatgggcgcaaagctgcttcaggacgttcgccaggaccttgcagatgtcgtccaggtgtgcgaaggaaagaagaagcagaccaactacttgcgcacgctgatcaacgagctagtgaaagggatcttgcctcggagctggtcccactacacggtgcctgccggcatgaccgtcatccagtgggtgtccgacttcagcgagaggatcaaacagctgcagaacatctcactggcagctgcatctggtggcgccaaggagctaaagaacatccacgtgtgcctgggtggcctgttcgtgcctgaggcgtacatcactgccaccaggcagtatgtggcccaggccaacagctggtccctggaggagctctgcctggaagtcaacgtcaccacctcacagggcgccacccttgacgcttgcagcttcggagtcacgggtttgaaacttcaaggggccacgtgcaacaacaacaagctgtcactgtccaatgccatctcaaccgcccttcccctgacgcagctgcgctgggtcaagcagacaaacaccgagaagaaggccagtgtggtaaccttacctgtctacctgaacttcacccgtgcagacctcatcttcaccgtggacttcgaaattgctacaaaggaggatcctcgcagcttctacgagcggggtgtcgcagtcttgtgcacagagtaaacttttctagctgcccctttctgtaatagtgaaagttggtatttaacatttattcatttttaaaatatttggaaggtctgagcttgtgaaaagaaagtggttggtctgaggttggaggaagctgaatggaatctgacggttgggagtggtggaaattggaaggataccaggaggtatttgggaaggccaatggcgtggctcctttgaggaaataaaacactaagcatg

SEQ ID NO: 1469 - protein, 4594 aa, Homo sapiens
EAALEEKSALEQMRKFLSDPQVHTVLVERSTLKEDVGDEGEEEKEFISYNINIDIHYGVKSNSLAFIKRTPVIDADKPVSSQLRVLTLSEDSPYETLHSFISNAVAPFFKSYIRESGKADRDGDKMAPSVEKKIAELEMGLLHLQQNIEIPEISLPIHPMITNVAKQCYERGEKPKVTDFGDKVEDPTFLNQLQSGVNRWIREIQKVTKLDRDPASGTALQEISFWLNLERALYRIQEKRESPEVLLTLDILKHGKRFHATVSFDTDTGLKQALETVNDYNPLMKDFPLNDLLSATELDKIRQALVAIFTHLRKIRNTKYPIQRALRLVEAISRDLSSQLLKVLGTRKLMHVAYEEFEKVMVACFEVFQTWDDEYEKLQVLLRDIVKRKREENLKMVWRINPAHRKLQARLDQMRKFRRQHEQLRAVIVRVLRPQVTAVAQQNQGEVPEPQDMKVAEVLFDAADANAIEEVNLAYENVKEVDGLDVSKEGTEAWEAAMKRYDERIDRVETRITARLRDQLGTAKNANEMFRIFSRFNALFVRPHIRGAIREYQTQLIQRVKDDIESLHDKFKVQYPQSQACKMSHVRDLPPVSGSIIWAKQIDRQLTAYMKRVEDVLGKGWENHVEGQKLKQDGDSFRMKLNTQEIFDDWARKVQQRNLGVSGRIFTIESTRVRGRTGNVLKLKVNFLPEIITLSKEVRNLKWLGFRVPLAIVNKAHQANQLYPFAISLIESVRTYERTCEKVEERNTISLLVAGLKKEVQALIAEGIALVWESYKLDPYVQRLAETVFNFQEKVDDLLIIEEKIDLEVRSLETCMYDHKTFSEILNRVQKAVDDLNLHSYSNLPIWVNKLDMEIERILGVRLQAGLRAWTQVLLGQAEDKAEVDMDTDAPQVSHKPGGEPKIKNVVHELRITNQVIYLNPPIEECRYKLYQEMFAWKMVVLSLPRIQSQRYQVGVHYELTEEEKFYRNALTRMPDGPVALEESYSAVMGIVSEVEQYVKVWLQYQCLWDMQAENIYNRLGEDLNKWQALLVQIRKARGTFDNAETKKEFGPVVIDYGKVQSKVNLKYDSWHKEVLSKFGQMLGSNMTEFHSQISKSRQELEQHSVDTASTSDAVTFITYVQSLKRKIKQFEKQVELYRNGQRLLEKQRFQFPPSWLYIDNIEGEWGAFNDIMRRKDSAIQQQVANLQMKIVQEDRAVESRTTDLLTDWEKTKPVTGNLRPEEALQALTIYEGKFGRLKDDREKCAKAKEALELTDTGLLSGSEERVQVALEELQDLKGVWSELSKVWEQIDQMKEQPWVSVQPRKLRQNLDALLNQLKSFPARLRQYASYEFVQRLLKGYMKINMLVIELKSEALKDRHWKQLMKRLHVNWVVSELTLGQIWDVDLQKNEAIVKDVLLVAQGEMALEEFLKQIREVWNTYELDLVNYQNKCRLIRGWDDLFNKVKEHINSVSAMKLSPYYKVFEEDALSWEDKLNRIMALFDVWIDVQRRWVYLEGIFTGSADIKHLLPVETQRFQSISTEFLALMKKVSKSPLVMDVLNIQGVQRSLERLADLLGKIQKALGEYLERERSSFPRFYFVGDEDLLEIIGNSKNVAKLQKHFKKMFAGVSSIILNEDNSVVLGISSREGEEVMFKTPVSITEHPKINEWLTLVEKEMRVTLAKLLAESVTEVEIFGKATSIDPNTYITWIDKYQAQLVVLSAQIAWSENVETALSSMGGGGDAAPLHSVLSNVEVTLNVLADSVLMEQPPLRRRKLEHLITELVHQRDVTRSLIKSKIDNAKSFEWLSQMRFYFDPKQTDVLQQLSIQMANAKFNYGFEYLGVQDKLVQTPLTDRCYLTMTQALEARLGGSPFGPAGTGKTESVKALGHQLGRFVLVFNCDETFDFQAMGRIFVGLCQVGAWGCFDEFNRLEERMLSAVSQQVQCIQEALREHSNPNYDKTSAPITCELLNKQVKVSPDMAIFITMNPGYAGRSNLPDNLKKLFRSLAMTKPDRQLIAQVMLYSQGFRTAEVLANKIVPFFKLCDEQLSSQSHYDFGLRALKSVLVSAGNVKRERIQKIKREKEERGEAVDEGEIAENLPEQEILIQSVCETMVPKLVAEDIPLLFSLLSDVFPGVQYHRGEMTALREELKKVCQEMYLTYGDGEEVGGMWVEKVLQLYQITQINHGLMMVGPSGSGKSMAWRVLLKALERLEGVEGVAHIIDPKAISKDHLYGTLDPNTREWTDGLFTHVLRKIIDSVRGELQKRQWIVFDGDVDPEWVENLNSVLDDNKLLTLPNGERLSLPPNVRIMFEVQDLKYATLATVSRCGMVWFSEDVLSTDMIFNNFLARLRSIPLDEGEDEAQRRRKGKEDEGEEAASPMLQIQRDAATIMQPYFTSNGLVTKALEHAFQLEHIMDLTRLRCLGSLFSMLHQACRNVAQYNANHPDFPMQIEQLERYIQRYLVYAILWSLSGDSRLKMRAELGEYIRRITTVPLPTAPNIPIIDYEVSISGEWSPWQAKVPQIEVETHKVAAPDVVVPTLDTVRHEALLYTWLAEHKPLVLCGPPGSGKTMTLFSALRALPDMEVVGLNFSSATTPELLLKTFDHYCEYRRTPNGVVLAPVQLGKWLVLFCDEINLPDMDKYGTQRVISFIRQMVEHGGFYRTSDQTWVKLERIQFVGACNPPTDPGRKPLSHRFLRHVPVVYVDYPGPASLTQIYGTFNRAMLRLIPSLRTYAEPLTAAMVEFYTMSQERFTQDTQPHYIYSPREMTRWVRGIFEALRPLETLPVEGLIRIWAHEALRLFQDRLVEDEERRWTDENIDTVALKHFPNIDREKAMSRPILYSNWLSKDYIPVDQEELRDYVKARLKVFYEEELDVPLVLFNEVLDHVLRIDRIFRQPQGHLLLIGVSGAGKTTLSRFVAWMNGLSVYQIKVHRKYTGEDFDEDLRTVLRRSGCKNEKIAFIMDESNVLDSGFLERMNTLLANGEVPGLFEGDEYATLMTQCKEGAQKEGLMLDSHEELYKWFTSQVIRNLHVVFTMNPSSEGLKDRAATSPALFNRCVLNWFGDWSTEALYQVGKEFTSKMDLEKPNYIVPDYMPVVYDKLPQPPSHREAIVNSCVFVHQTLHQANARLAKRGGRTMAITPRHYLDFINHYANLFHEKRSELEEQQMHLNVGLRKIKETVDQVEELRRDLRIKSQELEVKNAAANDKLKKMVKDQQEAEKKKVMSQEIQEQLHKQQEVIADKQMSVKEDLDKVEPAVIEAQNAVKSIKKQHLVEVRSMANPPAAVKLALESICLLLGESTTDWKQIRSIIMRENFIPTIVNFSAEEISDAIREKMKKNYMSNPSYNYEIVNRASLACGPMVKWAIAQLNYADMLKRVEPLRNELQKLEDDAKDNQQKANEVEQMIRDLEASIARYKEEYAVLISEAQAIKADLAAVEAKVNRSTALLKSLSAERERWEKTSETFKNQMSTIAGDCLLSAAFIAYAGYFDQQMRQNLFTTWSHHLQQANIQFRTDIARTEYLSNADERLRWQASSLPADDLCTENAIMLKRFNRYPLIIDPSGQATEFIMNEYKDRKITRTSFLDDAFRKNLESALRFGNPLLVQDVESYDPVLNPVLNREVRRTGGRVLITLGDQDIDLSPSFVIFLSTRDPTVEFPPDLCSRVTFVNFTVTRSSLQSQCLNEVLKAERPDVDEKRSDLLKLQGEFQLRLRQLEKSLLQALNEVKGRILDDDTIITTLENLKREAAEVTRKVEETDIVMQEVETVSQQYLPLSTACSSIYFTMESLKQIHFLYQYSLQFFLDIYHNVLYENPNLKGVTDHTQRLSIITKDLFQVAFNRVARGMLHQDHITFAMLLARIKLKGTVGEPTYDAEFQHFLRGNEIVLSAGSTPRIQGLTVEQAEAVVRLSCLPAFKDLIAKVQADEQFGIWLDSSSPEQTVPYLWSEETPATPIGQAIHRLLLIQAFRPDRLLAMAHMFVSTNLGESFMSIMEQPLDLTHIVGTEVKPNTPVLMCSVPGYDASGHVEDLAAEQNTQITSIAIGSAEGFNQADKAINTAVKSGRWVMLKNVHLAPGWLMQLEKKLHSLQPHACFRLFLTMEINPKVPVNLLRAGRIFVFEPPPGVKANMLRTFSSIPVSRICKSPNERARLYFLLAWFHAIIQERLRYAPLGWSKKYEFGESDLRSACDTVDTWLDDTAKGRQNISPDKIPWSALKTLMAQSIYGGRVDNEFDQRLLNTFLERLFTTRSFDSEFKLACKVDGHKDIQMPDGIRREEFVQWVELLPDTQTPSWLGLPNNAERVLLTTQGVDMISKMLKMQMLEDEDDLAYAETEKKTRTDSTSDGRPAWMRTLHTTASNWLHLIPQTLSHLKRTVENIKDPLFRFFEREVKMGAKLLQDVRQDLADVVQVCEGKKKQTNYLRTLINELVKGILPRSWSHYTVPAGMTVIQWVSDFSERIKQLQNISLAAASGGAKELKNIHVCLGGLFVPEAYITATRQYVAQANSWSLEELCLEVNVTTSQGATLDACSFGVTGLKLQGATCNNNKLSLSNAISTALPLTQLRWVKQTNTEKKASVVTLPVYLNFTRADLIFTVDFEIATKEDPRSFYERGVAVLCTE

SEQ ID NO: 1470 - DNA, 1702 bp, Homo sapiens
ccggcagtcccgagtgcttcccgcagagggctggtggtgggagcggagtggagtcgggcggggccgaagccgggccgtgggcgtagatgggggccgggcggcggcggagcggcggaacgcgggatgggctgcaccgtgagcgccgaggacaaggcggcggccgagcgctctaagatgatcgacaagaacctgcgggaggacggagagaaggcggcgcgggaggtgaagttgctgctgttgggtgctggggagtcagggaagagcaccatcgtcaagcagatgaagatcatccacgaggatggctactccgaggaggaatgccggcagtaccgggcggttgtctacagcaacaccatccagtccatcatggccattgtcaaagccatgggaaacctgcagatcgactttgccgacccctccagagcggacgacgccaggcagctatttgcactgtcctgcaccgccgaggagcaaggcgtgctccctgatgacctgtccggcgtcatccggaggctctgggctgaccatggtgtgcaggcctgctttggccgctcaagggaataccagctcaacgactcagctgcctactacctgaacgacctggagcgtattgcacagagtgactacatccccacacagcaagatgtgctacggacccgcgtaaagaccacggggatcgtggagacacacttcaccttcaaggacctacacttcaagatgtttgatgtgggtggtcagcggtctgagcggaagaagtggatccactgctttgagggcgtcacagccatcatcttctgcgtagccttgagcgcctatgacttggtgctagctgaggacgaggagatgaaccgcatgcatgagagcatgaagctattcgatagcatctgcaacaacaagtggttcacagacacgtccatcatcctcttcctcaacaagaaggacctgtttgaggagaagatcacacacagtcccctgaccatctgcttccctgagtacacaggggccaacaaatatgatgaggcagccagctacatccagagtaagtttgaggacctgaataagcgcaaagacaccaaggagatctacacgcacttcacgtgcgccaccgacaccaagaacgtgcagttcgtgtttgacgccgtcaccgatgtcatcatcaagaacaacctgaaggactgcggcctcttctgaggggcagcggggcctggcgggatgggccaccgccgaatttgtaccccccaacccctgaggaagatgggggcaagaagatcacgctccccgcctgttcccccgccgcttttctcctctttcctctctttgttctcagctccccctgtcccctcagctccaaacgtaggggaggggttcgcacaggcctccctgtttgaagcctgcccttgtctgagatgctggtaatggccatggtacccccttctgggcatctgttctggtttttaaccattgtcttgttctgtgatgaggggaggggggcacatgctgagtctcccaaggctgcgtctggaggggcccctgcttctccagcctggacccccagctttgcccaacaccagcccctgccccagcccaagtccaaatgtttacgggagcctcctgcccagtcccccaaccccagccgctcggaggccccaaaggaaaaagcacaagaagcgtgagacgccaccattcctggaaaccacagtcc

SEQ ID NO: 1471 - protein, 355 aa, Homo sapiens
MGCTVSAEDKAAAERSKMIDKNLREDGEKAAREVKLLLLGAGESGKSTIVKQMKIIHEDGYSEEECRQYRAVVYSNTIQSIMAIVKAMGNLQIDFADPSRADDARQLFALSCTAEEQGVLPDDLSGVIRRLWADHGVQACFGRSREYQLNDSAAYYLNDLERIAQSDYIPTQQDVLRTRVKTTGIVETHFTFKDLHFKMFDVGGQRSERKKWIHCFEGVTAIIFCVALSAYDLVLAEDEEMNRMHESMKLFDSICNNKWFTDTSIILFLNKKDLFEEKITHSPLTICFPEYTGANKYDEAASYIQSKFEDLNKRKDTKEIYTHFTCATDTKNVQFVFDAVTDVIIKNNLKDCGLF

SEQ ID NO: 1472 - DNA, 1319 bp, Homo sapiens
cgcgcccgtcccgtcgccgccgccgccgccgcagacccctcggtcttgctatgtcgagctcacccgtgaagcgtcagaggatggagtccgcgctggaccagctcaagcagttcaccaccgtggtggccgacacgggcgacttccacgccatcgacgagtacaagccccaggatgctaccaccaacccgtccctgatcctggccgcagcacagatgcccgcttaccaggagctggtggaggaggcgattgcctatggccggaagctgggcgggtcacaagaggaccagattaaaaatgctattgataaactttttgtgttgtttggagcagaaatactaaagaagattccgggccgagtatccacagaagtagacgcaaggctctcctttgataaagatgcgatggtggccagagccaggcggctcatcgagctctacaaggaagctgggatcagcaaggaccgaattcttataaagctgtcatcaacctgggaaggaattcaggctggaaaggagctcgaggagcagcacggcatccactgcaacatgacgttactcttctccttcgcccaggctgtggcctgtgccgaggcgggtgtgaccctcatctccccatttgttgggcgcatccttgattggcatgtggcaaacaccgacaagaaatcctatgagcccctggaagaccctggggtaaagagtgtcactaaaatctacaactactacaagaagtttagctacaaaaccattgtcatgggcgcctccttccgcaacacgggcgagatcaaagcactggccggctgtgacttcctcaccatctcacccaagctcctgggagagctgctgcaggacaacgccaagctggtgcctgtgctctcagccaaggcggcccaagccagtgacctggaaaaaatccacctggatgagaagtctttccgttggttgcacaacgaggaccagatggctgtggagaagctctctgacgggatccgcaagtttgccgctgatgcagtgaagctggagcggatgctgacagaacgaatgttcaatgcagagaatggaaagtagcgcatccctgaggctggactccagatctgcaccgccggccagctgggatctgactgcacgtggcttctgatgaatcttgcgttttttacaaattggagcagggacagatcatagatttctgattttatgtaaaattttgcctaatacattaaagcagtcacttttcctgtgctgtttcaaaaaaaaaaaaaaaaaaaaaaaaaaaaaaaaaaaaaaaaaaaaaaaaaaaaaaaaaaaaaaaaaaaaaaaaaaaaa

SEQ ID NO: 1473 - protein, 337 aa, Homo sapiens
MSSSPVKRQRMESALDQLKQFTTVVADTGDFHAIDEYKPQDATTNPSLILAAAQMPAYQELVEEAIAYGRKLGGSQEDQIKNAIDKLFVLFGAEILKKIPGRVSTEVDARLSFDKDAMVARARRLIELYKEAGISKDRILIKLSSTWEGIQAGKELEEQHGIHCNMTLLFSFAQAVACAEAGVTLISPFVGRILDWHVANTDKKSYEPLEDPGVKSVTKIYNYYKKFSYKTIVMGASFRNTGEIKALAGCDFLTISPKLLGELLQDNAKLVPVLSAKAAQASDLEKIHLDEKSFRWLHNEDQMAVEKLSDGIRKFAADAVKLERMLTERMFNAENGK

SEQ ID NO: 1474 - DNA, 5544 bp, Homo sapiens
ctcctgcacggcgagtgctggagcacgagctaccgctcgctcggtcagggcgccccctccgcccgcctcctgcttcctcctccgctgcctgccgccgccgcctccaccattgtataatgctcggggcgcgcaggcagagaacggcggagtcttagcttcagcctcgcctgctgcccgctccccggcgccaccctcgggcccctggagcggggcactccgcatggagcgggagtagctgaggagtgggcggaaacccctcctgatgcgttagttcccaggtggagctgcatgtgatatatgttgggtaaaggaggaaaacggaagtttgatgagcatgaagatgggctggaaggcaaaatcgtgtctccctgtgacggtccatccaaggtgtcttacaccttacagcgccagactatcttcaacatttcccttatgaaactctataaccacaggcccctgacagagcccagcttgcaaaagaccgttttaattaacaacatgttgaggcggatccaggaggaactcaaacaggaaggcagcctgaggcccatgttcaccccctcctcccagcccaccaccgagcccagcgacagctaccgagaggccccgccggccttcagccacctggcgtccccgtcctcccacccctgcgacctcggaagcactacgcccctggaggcctgcctcaccccggcctcactgctcgaggacgacgatgacacgttttgcacctcccaggccatgcagcccacggctcccaccaaactgtcacctccagccctcttgccagaaaaggacagtttctcctctgccttggacgagatcgaggagctctgtcccacatctacctccacagaggcggccacggctgcgactgacagtgtgaaagggacctccagcgaggctggcacccagaaactcgacggtcctcaagagagccgcgcagatgactcaaaactgatggactctctgcctgggaattttgaaataacgacgtccacgggtttcctgacagacttgaccctggatgacatcctgtttgctgacattgatacgtccatgtatgattttgacccctgcacttcctcatcagggacagcctcaaaaatggcccctgtgtctgccgacgacctcctcaaaactctggctccttacagcagtcagcctgtcaccccaagtcagcctttcaaaatggacctcacagagctggaccacatcatggaggtgcttgttgggtcctaagacccagggacccagcgactatgcccacccagaccccagagcgttcccataaccctgacagttctccacactgtgcatgcacccttgcttgcctttttcagagaaaaagaaaattttacaacaggatcacactagtttttgctttgagcagagttggagtgccttcatccaagtatgaccacttttaatacacttttttgagtggttcctcagagacctactaccctggtataggaaagaatccatttgaagacaatgttgcaatgttgaatgacaaaaataaacagttcaagtgaagcacaaggattaagttggaaaagctgtaaattgcatgtgcatatttgtctattttttctataagttttattgcaagaggtaaagaagaaaactatatatatatatcttatttagataatctcagtaccttttctggcatttttgccctgtataggttgacttggcaattcggcctttttagaggcattaactactcctcgtaagtgttgcatttacatggctgtttagaaaactgctgcccaaatttattttatatttttgtacagattctgcagtttatgatattgtttttctaaaaacaaatgctgtttatacatatgagatagctattttgataggatttgctcacatagttcctgcaaacttcagatgtacaagttgcacttgtacttttatagagttgtaatgttttatatgtgtatggtgcaagagaaaattggatcaaatcaatctgcagttgatgtccccaaatgcaaacacaggcacacacatgcacacacccataaacacacacacagtgctttaagaaagggccaggtgatatcacacccaaatttcacaagcactgaccccctggcaccaacacccgccagtactgtgacttccaaagccagagccacatgtgctcatcaaacttgcattaagcagttggcgggagatggctgtggagctgggggtttaagtgatggttctcttttgctccctcttttgagggtaaagctactgtctttcttaagagtgtatttatgccaagtttgcgcttttaattgtttttattttgttttttaatgaaaacccagatctttcctttttggcataatttttatgatgacctgaaattttacatccgaacaaaattttacatccgaaaagcaaccaacttcttcatggaactcagccctgttgcaatgcttagggcccttaaagaagaaaatctccccagaaggcatccatcatgttgcttaattgtcttctgcagcttcctttccctagagctttccctgtgttgctaagagctgaaaatggcatcttcgtgatcaccacagtgagcttggctcgcctcggccggcccgggatgcactcttacaacatgtgtgactcttgaacctggagttcatcacattacgtcacagcttcccatctggttgctttcctgagtcagctacttcacacttgtcaaggctgttttaccccaaaactcagacaggactttctatgcatgttttccctcctccccccaattccccccccatcaccttatctcccaggacacacttgagaagtagctttttattcctagtggtgtacatttaattttaaaaaggttgcaatgtatcatgcttgttgccgaaactgtttatggccttcttgtttcagttttttcttttcttccaatggtactttagctgttgagtgcaggttacaacctatattgttatgcagatggcttctttaggaataacttttatatttatttaaaaatttttaaattatgggatgttttgttgttgttgttgtctttgttgttggtcatttgtcaatattcagtcaccaattctgctcacttcttgccatggataaaattgggtctttctggctaattaaaaaagacaactttataaaatggcactttaagcaagccatagttagttttatttttgtaatgcacatggcaaagcaaagacgtttgtgatgaaggaactgctcatctaagcaaaagatttgagtatgatatgataaaggctttctacattctaatttactttttccccccacttgaatgtgttttaaaggctaattatcagctcagtagagcagtgagaaactgatcaaattgcacttgttctcctacaagcaacctccacgcagacacctcgtactgctacaggtgtgtcatttcctttaataggaccagggaccatgtaactgaggtgagggttgtagtagatgcttccagtgtcagtatgcctgttaattttaagagcttccctttcttgcagagaacaagtctgcccagattccatgctttctataactggaggacctggcaaacctgccgcatgctgcacacatctacctacgtacacatatacaatagtattgatgattctgaacaataacagggtaaaacagttggtttgccattgttaaaaactgatttacagtaacttacaacaactgtacttttgttggattagcaaatcatgtgtttaaacaaatcccatatgttgggcaacagttcaaataagcacggagaagtgttgcccaaacttggttctctgactcttatgtatttgtaaggctgggcttcaaaatcaaaacaaaaaccccaaaaacagcaggcaaatgctttttaactctgacaccgttgccataaatccctgatactcaaagtctaacaagaaagacatggaaaattagcagcccattttcagaaagatcaaaatgatctagggttctaattgcttttgcatcctattcttacaaagtgatgtcccaacagggaacagtaggagctggagtgggatctccaagtcccagtttgagtgtgggatgtgcttccagcagtgccttccctttatgaaagacatcacatggcatccagggccaggcaggcagcttgaggtgcctttacgagaaaaccgagctggggctgggagaggacagttattgacactgatgtgcaatgaagtgacaagatgagagcagaatcgtaagagctttgaatttgaagtgagtttttttccccccataagttatttattccttttttctgtgtaaatatatttattttactgtggagcgctaacatctggatcgtaacatgtgcagaatgtatggtaggaatgtattctcttgtaggaatgtaaatctgtattaaaagggggtccaagccaggcccccaggtcttctcattgtatgcacagtccgcattcatttttactcttctctaatatgggtctatttgaaatatgcaaaaggtatgaggaatgttttaatacctccaaatttttaagaaaagcatcaaagggttgatattttttaaagtttttttagtagcactttctctggatgacagaaggggcaaccacatgggcacccttgttcataccaaagggtgagcagtggccagagcctcctctgcacctctcgagtgtctttaccaattgagctttttatcgccatagccccttggagtgccccagctgccctgaggtcaatcaaggaaaatttcttaatgaaataagctccaaagagccaaagtatcaacttacagatcgtttttaaagcttaaatttatgaaccacctttgtggtaaacaatgaattatgaataccgcagggcagccttcttaaatgacaaatgtaaaaaaaaaaaaaaaagactctacttcgtgcagcaattgctactctatacgaattgtcttaatttgaaaaccttgctgttacaaattggacctttatacattttctgaaaacaatgaaaagagtatatttaaccttttctggctgtaaatggttaccttcctgtaactgccccgcacctggaggcatggagttgtgtgcatcctgcttatgtacaattgttttcagtgtttctaagaatgagtctgaatggttcttgaaaattagccaggatcaaatgctattgcagacaaagccaataaaaagttggacttcttttggggataacaagttttggaagagaaatgcaggccatatgtgcgcatgaccgagattttgaaaaaagatgtacatagtgacatgtttggtgcatggtttttgaggagggcttttgtcaaaaaggaggtataacctttcccccacagacctgagagctgtgccttttctatgcaatattacagacgttacatcggaacccagatggctgtattcacatgtaggtttgggctgtaatctaaacaattggacagattaaatgtacatggaaatgagcagtcttacttttgtagttttatattatacaataaacagttaaaagatg

SEQ ID NO: 1475 - protein, 314 aa, Homo sapiens
MLGKGGKRKFDEHEDGLEGKIVSPCDGPSKVSYTLQRQTIFNISLMKLYNHRPLTEPSLQKTVLINNMLRRIQEELKQEGSLRPMFTPSSQPTTEPSDSYREAPPAFSHLASPSSHPCDLGSTTPLEACLTPASLLEDDDDTFCTSQAMQPTAPTKLSPPALLPEKDSFSSALDEIEELCPTSTSTEAATAATDSVKGTSSEAGTQKLDGPQESRADDSKLMDSLPGNFEITTSTGFLTDLTLDDILFADIDTSMYDFDPCTSSSGTASKMAPVSADDLLKTLAPYSSQPVTPSQPFKMDLTELDHIMEVLVGS

SEQ ID NO: 1476 - DNA, 131078 bp, Homo sapiens
  misc_feature (52114)..(52114): n is a, c, g, or t
  misc_feature (52126)..(52126): n is a, c, g, or t
  misc_feature (52150)..(52150): n is a, c, g, or t
gcggccgcctggccgtcgacatttaggtgacactatagaaggatcttatgtttggctaatctttttgatttactgatatattttcttatttcattttaaagttatttaaatttataatttatttattagagtcctttaggaatgttaacccttctcagtcacccgatgcaaatatttttcttgttggttatttgcctttacttttatttatttgttttgatatgtagatacatttacattttttatgtaatatatctttttaaaaatggtttctgcttttcctgaacatgttttcagaatttaaaattgtatatggaaaacaaattacatgaaagatttgagcatttcaaaattttaaacataaaagcataaacgtagataaaatgaaggtgtactatgatatcttcagttttatcagaaatgatgtaaaaattacaacctctttaaaaagtagtgttaatcattaagttagaaaatatatagctgggcatggtggcagatgcctgtaatcccagctacatgggaaggtgaggtgggagaatcgcttgaacccaggcagtggaggatgcagtgagccaagatcatgccactgcaccccagcctgggtgacagaacaagactccatctcaagaaaaaaaaaaaagaaaaatatatatatgaacttcagaatctgaggtcatatatagacaggtctttcccccgtttcctctactttttcttgtagcttggaattagtcagtttcatcatgctataataagcttatctgaaaggcagtaaagtgatattttgtacaacttcattggctttttgagaagaacatttttaggttcttagtcctagaattttgctgtttgcttggaaaaagaaagtaatacattttcttctatgaaggatttcctcagcacaccattgcttctttatctgaccaggatgcaaaaccctctttcagcatggcgtaagtaaagaccttgaaaatatcagtgataatgtttttacatttttaattccttcttttaagttataaattcaaaagataggcaatgaagactatctctatatacttgtatggagtgatcttcaggataaattactaagtaaaacagtagtttgagagaattttgtagtatgctgctaatcacctaagaagaaagtagagatgtaagtggatgtatatacttgtttatgttaataataaaaacaatagtatggaaataataaaaacttaaaaggggtggagggggaaatttttttttttaatgtttacctcagtgagtgtgtagggaaaagcaaagggttagaccctagacttttctgaatgcatcacttaatgatagggatacattccgagaaatgcgtcattaggtgataccatcattgtgcaaacatcacagagtgcacttacacaaacctagatagtgtagcctactaacatcgcagttatatagtatagcctattgctcctaggctgcacacctgtacagcatattgtgtactgaataatgtaggcagttgtaatgtaacacctagtgtttgtttaactaaacacagaaaaggtacaactaaaatgtattattttatgggaccactgtcatatatgtggttcatcactgaccaaaatgttatatagaatattactgtaccttgttttaacttcagagctttgtattttacataattataaaacaaaattaaatttaagagagtaattcttaaaaatcacaaacaagatttctgcctccagccaaaaagctgtaacagggactagatttaccctcctgtcaaaaaaagcagacaaaatatataaaacagtggttttcagacgttggacagcaagccttgctgataatgatccctgaaagaaaggaaacaaatgagatgggccctaagagcactccaccttactgcctggatggaatttccaggctgcacacagaggctggagatgttgttgagttgaagaaacaaagttcatctttcaaggaggctgagatggcgataattttgcaggtcagagtactggagaggaaagatctgcacagagagaactctctggggagctgcatagacttgctcatgagtcagcagctgagcgttgatcagcccttttgtgtgaggagactactggaagtcagggaaaaaatcactggaaagcagcagacagaacagtttccagagctcacacagagaacattcatgttctcaccagtctgtatggaaatacctcttaacatgacaggcattgaatagagtccacagtaatgggatcaaattaattctatcacaagaactggaaccagaggcaaaaagaaaagaaaagaaaagaaaaatctagactaacagctgttctagaccagcctaccaaagtttaaaagcaaattttgaagagattaaactatttccaagttaatgaagtatatttcagaacaaacccttaaatatttgagggaatacaaaaaaaaaaaaaaaaagaaaaaatccagcccccaaaacaaagcaaaattcacaatgtctggcaaagcaaaattcatagtccctggcagaaattaccagggatgcaaaggaaaatatgacccataaaatggagaaaaatcacagaatggaaacatacccagaaataacccagttggtagaattaatagacaaagggttgggtgcggtagctcctgcctgtaatgctagcactttgggaggctcaggtgggcagatcacttgagcccaggagttcgagatcagcacagccaacatggcgaaacccatctctactaaaaacacaaaaattagccaggcctggtggcacacgcctgtaatcccagctacttgggaggctgaggtacaagaatgacttgaacccaggaggtaaaggttgcagcgagctgagatcgtgccatttcactacagcctgggtgacagagcgagactcttatcaaaaaagaaaaaaaagaattagtagacaaagatgttaggacaacaattataaatgtactctgtatgttcaggatgttagagaacatgagaatggtaagaagagatatggaaggtataaaaaagacccaaatcaaacttctagtgatgaagaatacagtgttttagatgaaaaatatattggctgggattaacagcagattagacactgcagaagaaaaaattagtgaattcaaagatagtaatagagactttaaaaatgaagagaagggctgggtgtagtggctcacatctgtaatcccagcactttgggaggccgaggcaggcagatcacttgagaccaggagtttgagaccagcctggccaacatgatgaaaccccatctctactaaaaatacaaaaattagctgggtgtggtagcacgtgcctgtaatcccagctactcaggaagccaaggcacgagaattgcttgaacctgggaggcggagattgtagtgagttgagattgtgccactgcactccagcttgggcaacagagtgagaagccgtctcaaaaaaaaaaaaaaaaatgaagagggggaaaaaaatgaatgtagcataatttagttataagacatactcacagattttaaaatagacttttagaccaggcatggtggctcacacctataatcccagcactttgggaagctaaggcaggtggatcacttgaggctaggaattcaagaccagcaatatagtgagagacccccatctctatataagttataaatttttttttaaatatagacttcttttgttttttttttgagatggagtttcactcttggcacccgggctggagtgcagtggtgcaatctcagctcactgcaacctctgcctcctgggttcaagcaattctacttcagcctcccaagtagctgggattacaggcgcctggctaatttttgtattttttagtagagatggggcttcaccgtgttggccaggctggtcttgaactcctgacctcaggtgatccacccgccttggcctcccaaagtgctgggattacaggtgtgagcctctgcgcccggccaaaaatacagacttttaaatagatttttaaatagtgtcaagattttaaggtcaagatagcatgctttcccgctctaacttttcagatcattatatattaccctttttccccctacaggcatttggatggcaatactgagccagggcttacattaggaggctatttctgcccacagtgtcgggcaaagtactgtgagctacctgttgaatgtaaaatctgtggtaagaaaacaactattcattattcagtaaatcttgaatgacttcttaatctgtattgctgctaaaattaatgtaaatgttaagttattcctatgtttctggatttaatctgtgcaaagaaaaatagattactttttaaattgagtgcccagtactccacttccatgtataaatgtagcattctagtttcctgatcctctttctgaaaaaagtatattctttaaaggcagtgcagtagatgtagtagacatttttccatctcttacctttataaagtaaatatatataagaatgaagaattaaactaatagaattgtcgaattttatttcatttataatataagtaagcaaatagaccgagacaggttggttacacacttagtgacagaactaagactccatcctacaatcttctgttatagccacaggtaaaattaataactgccatcctaaaagaaactgaacatattctgctgaagttacatcttttggcttttcagccgttgtcttcatgaggtttggactactcaacatgtctctctgcttaatgtgttaggtcttactttggtgtctgctccccacttggcacggtcttaccatcatttgtttcctttggatgcttttcaagaaattcccctagaagaatataatggagaaaggtatttcagtttggactaatttatatctgttataagtggtaagctaatgtttgaatagattgttactaccttaaaaaataatctgattaacttggacaagagtacttctaatatggaagatgagataaagaatgccatagttatgattgaaatgactcgttgctaaatagatctgaatctccagaaaccaaataatttcactaaacccacctatgtataaataggggtgatgattgtactactaaatcagttttccagaaggaaaagaaaaaaagccctgattggtagtatttgctgatttccatggtttgaatactcccaccatggccaatttttagctacaattaacaaccagctttcttgaatacatatttaacaatatatccttttgatccagtacaatccagtcctagcacactactgaaaataagaggctcattcagcactttgggaggctgaggtgggaggatcacttgaggccaggagttgaagactagctggggcaacatagtgagacactgtctcttaaaaaagaaaaaaaaagctggacatggtggctcatacctgtaatcccagcacttttggaggccaaggcaggcagatcacctgaggtcaggagttcaacaccagcctgaatgacatggagaaaccccatctctactaaaaatacaaaattagcctagtgtggtggtgcatacctgtaatcccagctactcgggaggctgaggcaggagaatcgcttgaactcgagaggcagaggttgcggtgagccaagatcgcaccactgcactccagcctgggtaacaagagcgaaacttcgtctcaaaaaaaaaaaatctggcataacataatttatctaaaatctttaagtatttttacgaatgctatttgtgtgaaatacaacaaataaagtctgaaatagaggtagtcaatcctttatagaatagttttcagaaaataaagatttactacttttaagaacatctaggatcggctggcacggtggctcacgcctgtaatcccagcactttgggagaccgaggcaggtgggtcacctgaggtcagcagttcgagaccagcctggtcaacatggtgaaacaccatctctactaacaatataaaaattagccgggtgtggtgggaggtgcctgtaatccccagctactcaggaggctgaggcaggagaatcccttgaacctgggaggtggaggttgcagtgagccaagatcacaccattgcactccagctgggcgacaagagcgaaactccatcaaaaaaaaaaagaacatccaggatttaggagtcacattaaacacttactggctagccgaaaacaattatgtatccatcttgcttttcacacttaaatcatttagaagtcattcagtatcaccatatctagatcaatgttgtttttgaaattgttgcatatttcaggtataattatggtttatataatcaattgcttcctgttggatatttaagattttttttttttgctattaacaaataatgcttatatctatatttttgaacatttgtacaagtataaatgcatggtaaattcctagaggtaaaattactgagtcaagagttttacatgttttgtgaattttgatagatattgtaaagttgttcttcaaagaactttcatttattgttttcgcacatttagccaacattaggtattatgaaacttttttatattggccaaaactcacaggcaaaagaaaaagaaaaaagtctcattgttttagcttggtatttatttgcttatggttgaggttaaatatagtaaaaatgaaaaacccagtactatagaagatagagttgaagaaatattccagaaagtacaataaaaggagtaaaataaagaggttcaaataggagagtaaagataagaatactggtggaattatccagaaggtccaatgagaatgatacgagaaaaaaagaaaaaaagtaggatagaaaatcatcaaagacatagttcaaagaaattttatattgaaggacagaactttctagattgaaagggcctgttggctgggaagggtggctcatagctctaatccttgcactttgggaggctgagactgggggatcacttgaggccaggagttccaggccagcctgggtcacacagcaagacctcatctctgcaacgaagataaaagaaagggactgccaagtgcctaacgtattgaaggaaggcagaccccataattgtgaaatttcagaatacacaataaaccattaaccctaaacatttccagagaggaaaaactaggtcacacacaaaggatctggaattaaaattgtttggcttctcattagcaacaccggatgcagagagggagcagtcaccttcaaagtttgtggtgaaaattgttaccaacttagatacccagccaaactgtcagttaagtgtaggtagaataaagacattttcagacttgtaaggtctcaaaaagagatttttctggggaaggtctggaagaggtaggtgattcaaaggaactgagaaggagaatgacatgggatctagtaatatgtatctaattcaaaacaggctgaagaacggcctaggatgatggtaaggagaaattccagaatgatacctgtgtgtcacatatggggaaccgtccagtttggagacagtcaggatgctccaggagagagatcaccaaggggatgaaaactgcagaactcctgatgtatttgaacatatcgagaggacagttagactattccggagaagattgggcctgaattagtgtcaattatataggaaactaaccttgggaatagcaacacagtatttccaggaaaaaaaaaaatgttttaaataggggaaaacttatggcttagctgagaatatttttataggcatagtaaactaaacattgattattgttctatccaaaaggaagacttcactatgtagaaagaattgagaatgacactagttaaatatttatgcattactgggttcaagatgattgaaagataattaaattctcttctttcatagttggagatttatagccaataactgtgaagaatcacaaagtagcacttattagaataagtgactatcaaacaaacgttagaaagtgcttctggctgggcatggtggctcatgcctgtaatcctaacactttgggaagccaagataggaggattgcttgagcccaggcattcgagaccagcctgggcaatatagcgagaccctgcctcaataaaaaattagccaggcatggagatacatgcctgtagtcccagctactcaggaggctgaggcaggaggatcacttgagcccaggaggttgaggctgcagtgagctgtgatagcacctcagcactccagcctttgagacaaagcaagaccctgactcgaaaacaaagaaaaataaagcatgctcacagttaaccttaatgaaaataaaaactaaattttgggctgtcagatgaccttgtatatactgtggaatttttttttaaattattgctattctttttttttttttttttttgtgagtcagagttttgctcccgttgctcagtgtggagtgcaatgacaccatctcggctcactgcaacctccgtgtcctgggttcaagcgattctcctgcgtcagcctcctgagtagctgggattataggcgcctgccatcacgcccagctaatttttgtatttttagtagagacggggtttcgccatgttggccaggctggtcacgaactcctgacctgaggtgatccacctgcctcggcctcccaaagtgctgggattataggcgtgagccactgtgcctggcctattggtattcttaactctttttcctgaaagtcatgtgtaaagacaagtacatattaattaaaggattctagttagtgagattttgttgaactattttaatgagtaaattctaagaaaaaacattgttaaacttttttttcagattttgttatggatgtcagggggaattgaaagaccaacatgtaagttctttggctttctaaatattaagtaatgtacaagaaatattgaaatcaatggtactataagttttcaacaggttgttaaagaccaggctcatatcagtttatttcttgtaaagataatgacaataggtgaaggtaaaataggaacaaaatagtttaaatagtagttttgttattctgcattctaatttttgctataaagtattttgtaattcatctttttaaaactttttattaaaaattttttaatttttttcctctttttttaaattctttgattgttttgtctactttggtacacccttgtaaaacatgtaatttgtctttagctttcaagctaaactgcatttagtctgaaagtatttaaaatattttcttcatattatactttaagctgtgtgataacacattgaaattgtttaaggtggccacagataataggtgattcttccattatgccaatgagaaaatacttttttaaattttgaagagggccaactttaataaataaatttgtatagatgtaaataatatggatcactgtctagctttaatttttaatttagttacatgttcatatttaaaactatatatattatataaaataataattagaagtattgctcttccactgtcacaatttataaagtaattttattaaattttatatacctctttgacatcagtagtttactcttaactggaaccactttttgaatcatttgacagttttttggttttattttctgagacagactcttgctctgtcacccaggttgtagtgcagtgatgcaatcttggctcactgcaacctctgcctcccaagttcaagtgattctcatgcctagcctcccaagcagctgggattataggcgtgcaccaccatgcccagccaatttttgtatttttagtagagactgggtttcaccatgttgaccagctggtcttgaactcctgggctcaagcaatccacccgccttggcctcccaaagtgctgggattacaggcgtgagtcactacacccggcctcatttgagtttttaagaataggtcattgtctgtgttgtttgaaatttatttattcattctttctttttttttttattcaaagccaaatacttctgagatttagtgatttttgaatctgtgtatgaagctgccctggaaattctatcccaaggagcaagtactcatatatgtaatgctgaaagaacaaatgtagttttttcctttctgcttgtcttatctgtgtcatttgacatatttttttaaaggtttacttgaaagggaaatatgtttgcaattgtgaggtcattccctaagaataattaaatcgatgttaaatttttatgcttctctttttaattgaatcaatcaggtggtcttgctaagcattcaaaagtagcgctggtttgaagctcatatgtctttcctaaaccttagaatgaaataattgagagcgaactgtaatagaatagactttaaagactcaaaaacaaaaccattccctcatttctaagggatagttttggggaaaaaattaattgccttagatttgagaatatagagtacattggaagtaataaagtaggtagtgggaaaaaattggtagagatataaaagagcaaagcacaccttgaatgtcatctagctgtgctgtaattaacttttggaaactagtttatcacttttcttcttttcactacaggtttatgtttgtgctgtgtgccaaaatgttttctgtgtggactgtgatgtttttgttcatgattctctacactgttgccctggctgtattcataagattccagctccttcaggtgtttgattccagcatgtagtatacattgtatgtgttaaaaagaaatttgcaactgtgaataaaaggacttctttagaagaagcttcatttaaaacatgaaaggataatctgacttaagaaactttttgctaagaaaaggtaatattttattaaattttaaatttgtgttgtcacagaaatacctgaaattcagtagtacttcattcaattaattttgttttctattattttgagttatactgttttcaaagtcattatgcagtatgtataaacttataagaattaaattgatgtgataattttatgtttttataattaaatatagaatctttatgatttatgttaattcattaatttagtgtaagaagaaagttaagtctgaatgtaaattcagtgtaagatgaaaatttatcaatacttatgaaattaggctgggcgctgtggctcacacctgtaatcccaacactttgggaggctgaggtgggcagatcacttgaggtcaggagttcgagaccagcctggccaacatggtgaaaccccgtcactactaaaaatacaaaaaataattagccgggcatggtggttcacgcctggagtcccagctacttgggaggctgaggcaggagaatcgcttgaacccaggaggcggaggttgcagggagccgagattgtgccactgcactccaccctagagtgagactccctctcaaaaaaaaaaaaagttatgaaattaatacatatgaaatgatgtactgctacatccaccagagaggtctttttaggtttaaccaaacatctggaatatgtttatcaagttagtacatctgaaattatttgtggctatgaccaacagaagtcactttacattaaacattcaaactcacaagactgccatggccatacttggtacccgcttactcagaaggatattaaacagaaacaacagcctgccagcacagcatcaagcagtcctcattagcagtggaagtccttgtagcagtccactagtacaatttgggtgcaaggagataagatcctccacaggcatcaaggaaccaatatctcttaacaattccataaacacagcttccaggtatccacaagggatgtgtcaatttcaagagtcactacactcaggaaagcctaaagcttgaagactccatttatttatagtgcatcccaatccagatacgtaacaattaacgagttatttttactataagcaaagttgcctaaaatcatagttgatactaaccatggttaacagagctctaaagtttgacagaaagtgagattcaaatcctttcactctcatatgctaaaccttttgccttactctgggtcatcagagaaatttaggtgagaatgtatgatgaagtctgtgttttagattcaatgcagatatatcattgtgggcagaactctttctggttatatccagttaagagtaaatcaggctttcagccgggcgcggtggctcacgcctgtaatcctagcactttgggaggccgaggcgggcagatcacgaggtcaggagatcgagaccatcctggctaacacggtgaaaccccgtctctactaaacatacaaaaaattagctgggcctggtggcgggcgcctgtagtcccagctattcggaaggctggggcaggagaatggtgtgaacccaggaggcggagcttgcagtgaaccgagatcgctccactgcactccagcctgggcgacagagctagactctgtctcaagaaaaaaaaaaaaaaaaaagagtaaatcaggctttcatagcaaaggtatgtctattttatgtatataaacttcaggtactctaacttgagtttcactatgaaatttgtgattttttttttttttttttgagatggagtcttgctccatcgcccaggctggagtgcagtggcctgctgttggctcactgcaacctccgcctcccaggctcaagccattctcctgtctcagcctcctgagtagctgggactacaggcgcctgccaccacgcctggctaatttttgcatttttggtagagacggggtttcaccttgttgatcaggctgatctccaactcctgacctcaggtcatccacccacctccgccaccgtgcccggccgaaatttgtgattttataactaagaatttttagttaagaacattatcagtaaagacaacgtaatcccaccctggagagtttattgggagcccaggaatattcatttttaatacacacacacacacacacacacacacacactgatcagagtaacgggagtttctctcaggagtcatactccatgagcctggacccagtggttctttatgtggaaacaaatttcacctataggtaacctggtaactgctattttcttctgtgtgctctgtcaacaaaggtatcagtggcttgcaggagatgcctttaatactcagagcattctatctccccctatctggtttagaaggaaggccttcattagttaccttttgagaagttactagaactctctattagagacttaccctcctgacctgataaaaagggatacccatgtctctattaacagctttatctctttctacagttttgggtatttgataaggttaaggcaaaattttagttatgcttaaggaggagttcttttttcacaattacagagaaaattttggtttgttgaagattgcagaaacagcaatggtaatgtaagacagttttggcctttaatttttttcttgaaactctacagtatactacaatagtgaaggaaactattatcatgagagatccttctgaataggatgtctttctgagttccactattcagttacaaaactccttaatgcttaaaattcattatgaaaattagatttattttaaatactttcaagtgtatacatttttatttcataatttttattgtcttttaactaaagcatttagttcatttatatttactgtgtaccttttatatttaataaatatatttacttattaaaagattaccactgatatattttatttattataaatattatatttataaatatattatttatatttatatttatatatttatatatatttatatataatatatattttaatatattatatattaaaatatataaatatatctaataaatataaatatttattaaaagattaccactgatatatttgggtttaagtctattatctttgtgttattggttccaacaattccatctttcgtttttttaaatttttttaactacatatttgatacgatcttttccttctgccttctttttgattacttactttctaccattctatgtttttcgtcactagtttgaaaattgtatactttgtttttattctttcagtggttaccctagaaattacaacaaacaaaaattgcaacaacaataaattacaacaagaagaatttttttttttttttttgagacagagtctcgctctgtcgcccaggctggagtgcagtggcgcgatctcagctcactgcaagctccacctcccgggttcatgccattctcctgcctcagcctcccgagtagctgggactgcaggtgcctgccaccacgcctggctaattttttgtatttttactggagacggggtttcactgtgttagccaggatggtctcgatctcctgacctcatgatccatctgccttggcctcccaaagtgctgggattacaggcgtgagccaccacgcctggtcaacaacaagaatttcttaacttaggtcccctaggaagtagaacctgaggcaaagatgaaagtattgttactttattagggagggacagatctaggggggtgagagtgtggaagaaaagggaaagcaaagcaaggaaaaacgtgatgcattgtgttactgcagtgaccaggcttcatgacaagctgtgacgagatacaggagccttccagcaagtgtgttcacttagagtgtggggcttctccagaaggtttataaggagaaactgcccctctgagcagtccattgaagggaggaaggagaagtaacttagtttcctaagttcttccatttcccgttgatcctagtttgcccacagggctgtgtcatctcgtcctttggtaactgctcaggaagccagatctcgtgctcagtggtgtggcattgcatctacttctagaaggatttctcaatactttataacttcctcatgtttctggtcatgtttgtgttcagctatatctctagaacggttggccaattcatagcatgaaatgatttcatgagtggtgacaaagaaagggtgcaatcagcccttggggagtgggttagtggaatcccagtcctgaggccattagtgggtggcagagtttaggagaaaaggtaagaagtttcagtccttgggccctgtagtaaggagaaaaagggtacaggaggttgtcacacttctgagaagtagtcttagagtgccctagtgcctgctttggatccagttctgtaagggcagaggattcattatttccaggtaatttaagtatgttctggggagaagtgttacaagatggactggggactcggctgggatcctgatgggatctaaattattgatttcacctgactgaattgctatttgcgtcacacctcaggaccctggaaacaatacacaatttgcccattcattaatttattaattcactcaacaaacttgtacatctgccataagtctgacaccatcctagttatcagggatgtagatagtcaaaagaagatgtaaacctaacctcatgcatctgtgaatctccccatctaaaaagacacagccttgtaaagaagcttgtgtgaaagtgctaacgacagacatgccaagtgttaaggggatgcaggagaggcgtggtaaaatgggttgggaggcagctcagatgtctaaaggggtcaggcagacaatgcagataagtgaaagagggccagttgatgcagagtggggacatctggaaagcacccgccccatctaaaggaggcagcctctgagagtctggggatcagggatagaagggagatgtacttttcactgtacatccttttgtattttttaaattttgttacttaattcaaaaaaatgtaaaaataaagtgaggtaaccattatttggccccagcctatttttttcttctgggaatgatacttaaagagaaactaaatctggattttttttttttttttttttttttttttttttgagacaaagccttgctctgttccccaggctggagtgcattggtgcaatcatggctcactgcagtctcgaccttccagactcaagtgatggtcccacttcagactccctagtagctgggaccacaggtgtgtgccattgtgcctggctaatttttaaaaagtttttttttgtagagacagtgtcttcctatgttgcctaggctggtcttgaactcctgagcttaagtaatctgcacacctcagtcttccaaagtattggaatcacaagcgtgagccaccatgcccagccgtaaaaactggatttttaaagtgaattctcccaagtttgagatgttagcctctaatttagaaaaacacagaggctaaataaaacttatcttcagtccaccagttgacaaactttggcctggcctgtctcttttctatcgtttatcatcagggcagataatcttttaagtttcaggtgttacactttcctgggatatactcctcctagggggtaatttatttactttttgtttttgtttttgtgacagagtcttgctctgtcaaccaggctagagtgcagtggcatgatcttggatcactgcaacatctgcctcccgggttcaagtgattctcctgcctcagcctcccgagtagctgggactacagtcatgtgccaccatgcctggctgatttttgtatttttagtagtgacgtggtttcacaccatgttgaccaggctggtctcggaactcctgacctcaagtgatccacccaccttggccttccaaagtgctgggattacaggtgtgagccaccgtggccagccttaggggataatttaggttttttgtgtttctgttttaaatttaaatttttatttttttgaggcagtatcactctgtctctcaggctggagtgcaatggcacaatcaactcactgcagccttgaattcctgggcacaagtgatcctcccaattcagcttctcaagtagctaggactacaggtgtgcaccaccatgcctggctgaattttttttttaagagatggactcttgctgtgctgtccaggctcgtgtcaactcctggcctcaaatgatcctctctcctaggccttccaaagtgctgggattacagacgttagccactgtacccagcctagttcaagttttaagcattaagaattgactctttggaggaatagggatcttttaaggatctctacagtcagtgactctaaatgtagtgtttggaccagtaagtagcattagcatcacccaagaagtcattagaaatgcaaattcttggccaggcgcggtgcctcatgcctgtaatcccagcactttgggaggctgaggtgggtagatcacgaggtcacgagttcgagaccagcttgaccaacatggtgaaaccctgtctctactaaaaatacaaaaattagccggccgtggtgaagggcatctgtaatcccagctactcaggaggatgaggcaggagaatcacttgaatccaggaggcggaggttgctgtgagccaagatcgcaccactgcactgcagcctgggcaacagaatgagactccatctcaaaaaaaaaaaaaaaagcaaattcttgagccccatcacaggcctgttgaatcagaaactctgaggatgggtctagcagtccgctttaacaaatcctccaggtggttaccataaatgttgaagtgtgagagctactgcctgtaatcccatttagagaggtacataggtaacttaaaaacaggtcctgataaaagaattctactaaacttaaaaaacaaattcaggtaactttataaacaaacaaatctcggccgggcgcggtggctcacgcctgtaatcccagcactttgggaggccgaggcgggcggatcacgaggtcaggagatcgagaccatcctggctaacacggtgaaaccccgtctctactaaaaatacaaaaaattagccgggcgtggtggcgggcgcctgtagtcccagctactcgggaggctgaggcaggagaatggcgtgaacccgggaggcagaaatttcagtgagccgagatcgcgccactgcactccagcctgggtgacagagcaagactccgtctgaaaacaaacaaacaaaaaaaacaaatctcaaacatggaattattttttcacttctctcttttgttttgtttttttttttttttgagacagagtctcgctctgtcacccaggctggagtgcagtggcgcgatctcggctcacactgcaatttctgcctcccgggttcacaccattctcctgcctcagcctcccgagtagctgggactacaggtgcccgccaccacgcccggctaattgtttttttgtatttttagtagagacggggtttcaccgtgttagccaggatggtctcgatctcctgacctcgtgatccgcccgcctcggcctcccaaagtgctgggattacaggcgtgagccactgcgcccgacctttttcacttctcttaatgctctgtaaacattaatgtatttatatatgtacttagaattttaaaaaatcaattttattgagttataattaacatacagtaaaaatgctcccatcttgagtaattccatgccttttgacaagtgttctgtacccatgccacgaccaccacaatcgagagagaacatcttcatcactccagaagggctcctttgcagtgagtactccctaggagttccagcggccggtgacattgatctgttttctgtcactgtagatgagatttgtctgttatatacaatttttaaaaattaaatgatatgtatggcttcttttgcttagcataatgtttttgagcttattcatttgttgcatatatcaatactttgcttctttttaccacctgtacttcatttatggatacgttgtttatccatgtgtttatccccaatggacattgggttgtttctgattttttggttattattatgaataaagttgctatgaacattattgtataaatctttgtgtgttcatgtgttttcatttttcttgggtaaatatgtaggaatggaattgctagattgtatggcaagagtatacttagctttccatgacaccagtgaactgtttttccaaagacattgtattaataccattttacattcccacaactaatgtatgagcttccagttgctccatatcctcaactaacagttgatattgtacaatacaaatgttaacttttagaatatcttcacaactttagagtagatagtgatttcttaggacacaaaaactatcaatcataacaaaaattaaaattggacttcatcaaaattaaaaacttctttttgaaagacaccattaagaaaatgaaaagatggttaacagactgagagaatatatgtgcaatgtaaatatctaacaaaggactagtatgcaaaatatataaagaatccttataatttagtaataaaaaggaaaacacgcactttttaaatgggtcaagaatttaattacggccaggtgcagtggctcacacctgtaatctcagcactttgggaggccgaggtgggtggatcacgaggtcaggggttcgagaccagcctggctaacatggtgaaaccctgtctctactaaaaatacaaaaattagctgggcgtggtggtgggcgcctgtaatcccagctactcgggaggctgaggcaggggaatcgcttgaacccaggaggcggaggttgcagtgagctgagattgtgccactgcactccagcctgggcgacagagcgagactctgtcttttaaaaaaaaagaaaaaaatttaattaccttaccaaagaagatacatgaatgaccaataagccattaaattaaaacttcagtgagtatacacatatgccctgaagtagctaaactttaaaacactgccctatgtgtgtgtactttttagctaaaaaagtgtttgaaaacagtattattttgaaactcaaaattccaaatcctctcttcaaattaggtagtagtgtcactggaagtaaaagagaagttactttaactgctaaagagtatccactaagaatctacaacaaacatcatgtttaatgctcaaactttagaagaatttataccaaaagtcaagaataagataggatatctatcttcattattaagcaacattatattagaggacctaatcaatgcaacaaggcaataaataaaagacaaaactgtcataatcagatactacaaacatctaagaaaattcagggggatttacagtcatatattaaacagtccagaaggagtcctatacatcatcaatgaatattgagaataaaaaatagtttttaaaacccctccaatttataagggcaacaaaatgtacaaggtactaaaataaatgtaatgtgtatttgggtataaatacagcaacataatgaaaaggtttattggggaaaaaattacagggagaagggtcaacaacgtgaagaggttcccctgccatctggacttctggaaaaagacctgctggtctaggcacagctggatgcaccatggaaagtggttccaataaacactggcactgtaacaattgtgtatgttgatacaaaaagagggagccaatgaatacttggtcgattatttaacaattgcttctctgctgaagaaatggccttgttggactagagcttaactgtggttcacatactaatgctgctataacagctagaagccttactaagaaatttgctaaaccaccaaaaagaggaaatgaaccttctaggacatctggattgccttttcttaaaaatctagtcttggctgggtgctgtggttcacgcctgtaatcccagcatttggtgaggccgaagtgggcggatcacgaggtcaagagatcgagaccatcctggtcaacatggtgaaaccctgtctctactgaaaatacaaaaattagctgggcgaggtggcatgtgcctgtagtcccagctgctggggaggctgaggaaggagaatcacttgaacccgggaggcggggtttgcagtgagctgagatcacgccattgcactccagcctggcaacagagcaagactcagtctaaaaaaaaaaaaaaaaaatctagtctgtatggcagcacaacatcaggtaaaagtacagactagccagatcactggttaaccttaacccctatgtgcttgagtttccttatctgtaatatggagatgatatagcaatagctgattttggactgttaaaggaattaagtggacacatgtaaagtgcttagaattgtgcctggcaagtagtaggctgcaatattgtgatataataaatatatatatttgatcttcatccagttcctggcacagatctccagaaacccttgtaatttcctgagtgacaggggtgatagaaacatcttttattagaatacttggtcttggttcctgacacaagagcttctaagacctttggaatctccaagtgataagagtgtatgacagtgagctaactggtggctgggatcctttagacaacttcaggatgggggctatcccctgaaagactaaggcatgattagaggtctgggatttgcagccccacgcctcgacctccagagagggtaaaagggctggcgattgattaaccaccaattgccagtgatttagccaatcatgcctaagtgatggcacctccattaaaaaataaaccacaggtttggagagctttcggtttggttaaccccaaccacataccaagaaggcgatgcacctcaaactgcatgaagacaaaaggtcctgtgctcacctgggacccttctggacgttgccctgtgtacctcttcgactgcctgttcatctgtatcctttataataaagcagtaaacataagtaaagtttctgagttctgtgagccattataagaaacgatcgaacctgggattttcctttcggaagccgctctctctcacaagggagagagctgttctcctttttcttttgcgtgttaaacctccgctcctaaacccactcttcgtgtgtatcgtgtccttaaccttgttggtgcgagacgacgaaccccgggtattgaccccagacaacaatgccacttcatattggggacttcgtctgggattccaaggtgcattcattgcaaaggtgagtaaaggggcggacctcaactctgtcctttgatttcgaggctcttggcctccattttagaatcaaaccaaaccaaatactgggcccccttctgcttctgtgaatgagaaaactctgccttcaccaattagccatttaaaaattatgagcgtggctgccagccttacaagttttgggggacaggcttgctggggagaacatggagaaccccccaatacccacgggctgctgggcatattggccatgtttgaaccagtttcctttcacggaggaccaagctgtcgtgtggggctggaagaggtcctggagcaactgaggatttctggctggggctacctcctggtgccatccgaaggcttctggactgaccccagcctccgaccaccctaaggggtgtcggcaacaggacctccaactttcctatcataattccctcatttcctatccacgaccaccatgtctcctaacctctctctgtatgcagtactgagggagttttacagttcagggaagtaatcttgttaggcaagaacaaagactgctgtagtaaccagggatatagcacgggggcatgctgttgtgattttctaggaacagagggtctcctctcccaccacagtgagcgtcactctctgcccttgttctggaaagcacatggcatgtcaaggtcactctgccctttgtcacagtaagattagggtggggcgcccaaccttccccgcgtgctatgtaaacgtcacacctgttcaaaccaacctgtgggctctgcgcaaatcagacgccgcctcctcaggcctacctataaaatctggtgcagtccaccgcaggccggattttcctttcggaagcccctcacaagggagagatctgttctcgtttttctttcttttgcctattaaacctctgctcctaaactcccccaacccccaagaaagaaattatcgaacctgagggggttgcagatacccatgatttgtagtgaactcagacagaagtgtgggtaccctgaggtcctaatagttgtggctggcatctgaagtagggggcagtcttgggggctgagcccctaacccgtggggtctgcactaactctggttaattagcatcagaattgagtaaaattgtaagacactcagctgctgtctgtggagaattggagaattggttggtggaaaacccatatatttgatgtcagaaatgtgagtagagaaatggtttttccttgataggctctatgtaaattttagttcatgtttttggtaataaatacacaatattactgattcttaaaagtataaacccaggaaaattaagaaaacaagaatgtcaagtccaacagagtttaaaggtaaaaaaaaataaaatagaacagaaatgggaccagtagcacatagaatattttaacacattcttggaaagaagaaactatatggactagtagtcaggaaggaagcagctcaaggaaaccgcttcctgaatatggagtctcctatgagagactatctgccctgtggagaagcttggagtaactgcggacacaggatgccagataggaaggagggctggagtgacatgaagggctgaaaattgagggactaattggaagcccgtgcacgggacagtcagctctctctaccccatgatcagaatatttgacacacaagtgtttaccctggggcaaaaaattacaggagtcttccctgctccccccaaaattgaacacattgctttctcttagctgacctagagaaccagtgtgggcactggcaccccaaaactaagaatccttttaagaaatggtgattttatgtccaaggaaacgttccaagtaagttttcggctgctagctttgtctttacaagtaacgggccaggcccagtggctcatgactgtaatcccagcattttgggggactgaggtgggcaaatggcttgaggtcaagagttcaagaccagcttgggcaacatggcgaaaccctgtctctactagaaatacaaaaattagccaggtgtggtggtgcatgcctgtagtcccagctattgtggggctgagatgagaagatcacttgagcctgggaggtagaggctgcagtgaaccgagattgtgccactgcactccagtctgggtgacaaagtgagaccccatctccaaaaacaaaacaaaacaaaaaaaaccccaagtaacttgaaatcattttctgaaatctttctctgacattctgacattagggtaattcttgttctccatagagtgaaaggctcaggttcaagtcccactcctgtggctcctgattttttaatgattagtttgaccaatgtgtttttaaatgacttaatttttaaacatgagttgaaaacccaggatcactacacatttgaggaaagttgataatatgaaaagtaaacaccaaggtaagtggtaaaaacctttgaggaaacataattcaggaaacaggaacttaaacattagtatcgtacagcagattcaggaagatggcactggttaaaaaaattgacactatgaaaataaggcacagagaaaagaaagagctgtgggaaattataattgctgaaattttaaactagattggagagccggaatataaaggagaggacagctgggtgcggtggctcacacctgtcatcccagcattttgggaggctgaggccggcagatcacttgagcccgggagtttgagaccagcctgggcaacaaggtgagacccccatctctacacaaaataaaatataaaatcagctgtgcatggtagcacacgtctgtagtcccaaaacttgggaggctaggtgggaggatcacttgagtccaggaggtggtggctgcagtgagctgtgattgtgccattgcactccagcctggatgacagagcgagacccttagaaagtaggaaaagaatatatgaaaaaaaaataagtgatcaattaattactcacctgaatagtgggaataccaaaagagtaaaaagagagtaacagacagtaggaagttatcaaataaataatagaaggtaatttcccaggcttgatgggagacccaagagctcagattgaaaatgcccattgaatacccagcccaatgaatgtagagaggtctacacttaggagaaaagatcctaaaagctaccagaaagatagaaactgttactataacagaaataagacactagcaccttaactattaaccaatcttaacaaactagaataaaggccggatgtggtggttcatgcctataatcctagcactttgggaggtcgagatgggaggatcgcttcagcctggaagcttgaggctgcagtgagctaggatcgtgccactgtactccagcctgggcgacagagtgagacactgtctcaaaaacaacagaaacaaaaaaactagaataaaatacttctggtgtgagactctgtaggtttcattactccttttgggtcctgattaaatcctgttgactcaagaccttagagcatttactggtaaagtctctgactgcgcgatttttttttgcattttagttccttaaatattttctcactgcttcctactaaaggacggacagagcatttgttcttcagccacatactttccttccactggccagcattctcctctattagactagaactgtggataaacctcaggtaagtaaattactatccctggcaaaggtgcttttcttccacacctaaacctatggtcccttctttgtcttgctattgtttctctctttggaggcaggatggtatggaggaaagaggacagacactggagtcacacagacttgggtttaaatcctagctccatggcacagttgcctcaatggcactcttagcactgtagtcaaagaatattagacctggaaagggccttggaaattacttctcctcccccagaaacagcctctagactggcatgattgaccaccaaacttcgttgtgtcagacaggatcaatgtctgctggtctgctgcaactctgtactcatttatctctggggaagcctgaagccttggtgctgttccttggccaaacctaaatgaaatgtactagccagtgattaatagagtcctgtgctggggtgggagacagaccagggagcagcctgtttcttgcttctttctttctttttggagatgaaatctcattggctttgaacttctgggctcaagtgatcctcccacttcagcctcccaagtagctgggattacaggtgcatgccactgccccagcttgactataccagcttgtttctggttttgagccctggtatgcaagctagtgttggctacctgatcagaggagtataaaagagcctcagatgaggttacagttctcttgagaccaaggtgtcttgcatgtatcatctagctggttcattgcttaaagatgaagcacatcttccacatcctctgtggctgcaaaaggaccctaggaactgggtgtggtgtttcacttgccttttggtttgttgggttttttttttttttgtatctatcctttacctttattaaagccttatgtgaggatactatgcggagtcttctaagtcttttcaatgatccaaacctgtgtaattgatgaagagggtactgtgaataggatcattactttttttttgtttttgagacagggtctctctcactctgtcacccaagttgagtgcagtatcttgatcacagctcactatagcctcaacctcctgggctcaagagatcctcccacctcagcctcccgagtagctgggtctataggcgcacaccatcacggctgcctaacttttaaaaaaattattttgtagagctggagtcttaccatgttgcccaggctggtctcgaactcctgggctcaagtgatttgcctgccttggcctcccaaagtggtgggattacaggtgtgagcaactgcgcctggccccaggtttttttttttctttttttttttcgagacagggtctcacactgttgcccaggctgtagtgcagtggcactgaagcctgaaacctctgcctcctgggttcaaacagttcttgtgcctcagccacccgagtagctgggattacaggcatgcaccaccacgcccggctaatttgtttgtatttttagtagagatggggtttcgccatgttggccaggctggtcttgaactcctgaactcaagtgatccgcccgtcccagcctcccgaagttctgggattacaggtgtgagccactgcgcctggccccccagttttttactttataatttaaatgatagctaaggctttgtttgggagaaagatgaaaagtggggaaagatttagagccactggtgccaggctagttgctggggaatccctgtttgaatttgctgaagtgctacaactctcaatgggaagaaagggatgacaatggaacttgaaggtggttgatgcagagcaagaggaaatcgctaaatagatttaaaaagaaatccagacacagaggaagtcagccaagaatacagttccctggctggttaggctgctttggcaaaaatgaaagtaactaaaaaagagcctgtgttgccaagtccaccaatttccttctgtaaagggaaggaacatgatgccaaagaggagttgggcagatatttcttctgatgggaatgtgaccctcatcgggtagataatcaccaacgaaactacagtgggagggcatcaagagacaactgaaacagggaactacacaagagtgaagttgcctgtggactgacagagcttcctgcagaaccactgctgggttggatatacatgaatgacaaaggagctcttttccttgtattaggtactgtcaaatgtaccttcaaatgaaagggtgtgtttggtcttaattagctgaattcgttgaagatcttcaattagctgcagcttttgccggaatgtggttagctgggcaaattccaaatcggttgagctgcacaaaggtggcagtacataaaacatatcttgtaaaggggaactgcccaattccacccataattgttagaagaaatactccctagaggttactgaaatgttgagaatgcaaacaaacacatttggactggttctgtgatgaaactaaggtatcccttaattttatgtctttgacttaagtgatgattgttgctgtgataagagggcctctaccttcgtagactttttgtatgaccctactactgggggagcaggatgaagtgaaagcctgttgaagacttactagttcctttgctccaaattgtgctgaatgatgaacagattaatatcattcaaaagaaaggaggccgggtgtcctggcttacacctgtaatcccagcactttgagaggctgaggcaagaggattgcttaagcccaggaatctgaggctgcagtgagctagaatcatgccactgcacttgtactacagccttggcaacagagtgagcccttgtctcctataaaaaaaaaaaaaaaaaaaaggaaagggctgggcatggtggctcacacctgtaatcctagcacattgggaggccgaggcgggtggatcacctgaggtcaggagttcaaaaccagcctggccaacatggtgaaaccctgtctctactaaaaataaaaaaattagccgggcatggtggcacatgcctgtaatcccagctactcaggaggctgaggcaggagaattgcttgaacctgggaagccaaaggttgcggtgagtcaaaattttgccactgcactccagcctgggtgaacagagcaagactccatctcactttgttgcccaggctggtttcaaattcctgggctcaagcaatcctcccaccttagcctcccaaagtgctgggattacaggtgtgagccactgtgcccagtcaagatttctaatgtatcctagtcttgatgaattaaacaaataaacctttaggatgatgcaaaagcagaatctacagtcactttaaagcagtgtgatgtaaagaaaagggtggcagagtctcttggtgctatgggacccaaggacatttacattggtgtggataaaatgcccggagtggtgaaaaactttattgtcattgttggaccatggtgcataatgtattgttatacctgctaataaaaaattaaacagcaattaacttagtttagtatgacaatacaactgtaagtttaagagtgaaaaatgggccaggtgtggtggctcaggcctgtaatcccagcactttaggaggctgaggtgggaggatcacttgagcccaggggtttgagaccaacttggcaacatagtgagaccccccccaccaacacccccaacacgcttgtctctataaaaaatggtggtgtgctcctgtcgtacgagctgcttgggaagctgaggtgggaggatcgcttcagcccttgaggttgaggctgcaatggatggtgatcaagccactgcactccagcctaggtgacagagcaagaccctgtctcaagaaaaaaaaaaagtgaaaaatgtccatataaaaacttgcacactaatgtgcacagcggtattatttataatagccaaaaagcgtaaacaatccacacatccatcaactgggttgaggaataaaatatggtatatgtgataataaagtgtggtatatccacataatgaaatattatttgacaatgaaaaggaatatgaagtactaaaacaatacaacatggatgaatttcgcttcctttttttgttgttctttttattttattttttaagcacctctaccaacatgaacattttgcaaagtgaaagcaaccagacacaaaggaccacgtactgtatgattcaatttaaatgaaatgtccccagtaggcaaatctatagagacagaaagtaacatagtagttgcctagggctaggaggtaatgggggacatggaaagcaactgctaatgggcacagcgtttctttctggggggatgaaaatgttctaaaattgattgtggtggtggttgtgcatgtttatgaatatgctgatatttattgaactgtacattttatttactttttttagagacagagcctcactctgttgtccaggctggagtatagtactgcaatcatagctccccgcagcttcatattcctgggctcaagagatccttccacctcagcctcccacgtagttaggactacaggcacatgccaccatgccccgctaagttttcgttttcttaaaaaaaaagtttttttagagacagggtctagctatgttgcccaggctgatctcaactcctggtctcaagcaatcctcccgccttggcctcaagagcattggggttataggtatgagtcaccgcaccctcagttgttcattttaaatgggtgaattttatgatgtgtgaattatatttctttctctttttttgagatggagtttcactcttgtcgcctaggctggagtgcagtggtgcgatctcggctcactgcaacctctgcctcgtgggttcaagcaattctcctgcctcagcctcccgagtagctgagattataggcatgcgccaccatgcccagctattttttttgtattattagtagagatggggtttcaccatgttggcaaggctagtcttgaactcctggcctcagccccccaaagtgctgggattataggtgtaagccaccacagccagccccaactagctgggactacaagcacgtgccaccacacctgactaatttctttttttttttttttttgtatttttagtagagatggggttttgccatgttggccagcctggtctcaaactcctgacctcaggtgatccacccacctcggcctcctaaagtgctgagattacaggcatgagccactgctcccgatggattatatttcaatataattcaattatgcaatataattgcataattgttatcatctctccctgatatattatcggaatggatgtgacatctgaatggggatgctgttgaggaaagagatttcatgaaatgtacagtgagtggcataattgtggctcactgtaaccttgaattcttgggctcaagtgatccttctgcctctgctccccgagtagctgggactacaggcatgtgccaacacatctggctaatttttaaaattttttgtagagacaaggatctcactaagttgcctaaactggcctcaaactcctagccacaaacaatcctcccaccttggcctcccaaaatgctgggattacaggtgtgagcctccacacttggccacttactttctttttgattcctatttcaggagaaaatcataatcaatttgcatttgtgtggaaaggccaccaatgcacatttaagctgctcccacaggacatttaaattatcttgcttattgctacaacctaatgaggaacaacttagatttgattgcactggaaaatactatatcttttttttgtttgtttgagatggagtctcactctgtcacccaggctggagtgcaatggcgagatcttggctcactgcaacctctgcctcccaggttcaactgattctcccgcctcagcctcctgagtagctgggattacaggcacccaccatcatgcccggctaattttttttatttttgtagagatggggtttcaccatgtgggccaggctggtcttgaactcctgacctcaggtgatctgcccgcctcagcctcccaaagtgctgggattacaggcatgagccactgcgcccagctaatactatgtcttattatattgatgataataatgttaatctctcaatccaaatatccagctaagactgaattggaagtgcttgttaatcatataaccaccagggagggatgattaactggctaaaatgcaaggcttagaataaatggtaaaattcttagaaattacttgggctaggctgggtgtggtggctcacgtctgtaatcccggtgtgggagctgagattgcgccactgcacttcagcctgggcgacaaggacaagagtgggaagccaaggcaggcggatcacttgaggtcaggagttggagaccaagctggccaacatggcaaaaccttgtgtctactaaaaatacagaaattagccgcaattggtggcacgtgcctgtaatcccagctactcaggaggctgaggcaggagaattgcttgaacccaggaggcggaggttgcagtgagccgaggccacgccactgcactccagcctgggtgacagagtgagactgtctaaaaaaaaaaaaaaaggaggaattacttgggctagagccactagaaacattcccaaacaaccaaaattaagttgctagctacaagacagaggaaaaaggcacgaaaattagttcaatttcttggttcctggagaaatcacataccatgtttgggaattttatcaacccttattctcgaagttaagagggaatggggagctaatttacatggggctttgaaaaatgaacaaatgggagactttttgggaacttcgaagagattactttggggccatagcacctcagtgttcaaatgatgttagcaatgtcagcaaccgactcacgctgatggagcttcttaccaaagcccgtgactgcccctcagggatggtcatggggatttgacactagaaagttacccgaggcttctggcaggtatatgtcctttgaaaaacagtcattggcctgttactgagcttcttttttttttttttttttttaagacggagtcttgctctgtcacccaggctggagtaccgtggcgcgatctcggctcgctgcaagctccacctcctgggttcacgccattctcctgcctcagcctcccgagtagctgggactacaggcgcccgccaccacgcccggctaattttttttgtagttttagtagagatggggtttcaccttgttagccaggatgttctccatctcctgacctcgtgatccacctgcctcggcctcccaaagtgctgggattacaggcgtgagccaccgcgcccggccagagcaccgagacttaaaacatgaacacaaaataatgattttttaaaactgagtaattcgatcaaattgttgctgccaggctatacaattttgtctatgtttttctttaatataaatgttcagtatatgctcatgttaccacattgtgtccataactgatatctggaaagcttcatgaatggaggcagatgggtgtctgtcttgttggttgctagatccccaatgtctagcactgtacctgatatatagtaggtgcttagtaaatatttgttgattaagtagatgaatactgatgtttcataattttccaacaatttatcttttgtgttgaaattccaggcattcctttaattcctggtttcttcggaaacagtgggaaatgctcttctaagaaaaatcttactataagggatcaacctgctttattttccttttcagaaaatggccacccagcagaaagcctctgacgagaggatctcccagtttgatcacaatttgctgccagagctgtctgctcttctgggcctagatgcagttcagttggcaaaggaactagaagaagaggagcagaaggagcgagcaaaaatgcagaaaggctacaactctcaaatgcgcagtgaagcaaaaaggttaaagacttttgtgacttatgagccgtacagctcatggataccacaggagatggcggccgctgggttttacttcactggggtaaaatctgggattcagtgcttctgctgtagcctaatcctctttggtgccggcctcacgagactccccatagaagaccacaagaggtttcatccagattgtgggttccttttgaacaaggatgttggtaacattgccaagtacgacataagggtgaagaatctgaagagcaggctgagaggaggtaaaatgaggtaccaagaagaggaggctagacttgcgtccttcaggaactggccattttatgtccaagggatatccccttgtgtgctctcagaggctggctttgtctttacaggtaccttgaaattattctctgaagtgtttctctggcgttttaagtttaggttttatttttcaattgcttttgcaatattttgctaaactttcttcactggttaaatgtgttatattaggtataaggtctagtttattaaaattcaacatcaatatttttatttttgcttcattttctatttagtacagcctgtgttaatttgtcaaatatatataaaataagaaagttacgtctccttaaacttggaccttagaaaatactggctgtattcttaaggtcctgaaaagattaaataactcatgcggtcatcctgatcccagtctcctcacccaccctccttctactgctcttacatgatctttctttgattcttctcattgctgcagtattggagggttttgtttgtttgtcctagccccgccataggggttatgatatataaatcagagttctaacaataacaacgatcatttactgagtactgtacctactttatgctaggcatagagtgagtactaattcttatccaatgaatttacccctttctctcccatttcacagctgagttcatggaggctcagagactttaagaaacatgcctatgtttctaccgaaatgtcatggcaaggctaaaacgtaggttttctaattgcacgttacttcagctggtcctggtgttagtcggcttccctatcactttgaccctgagaactcaaagagcaacataccagctctggggggcagctggggcaggatattgagttacacagcttagggttctgtacctagagcacggctgtggtggaggggcccattttgggtggtgggattgaggatggagactcaggccaatgagatcgggagtgcacagccacgctggagcttgtcttgctcctgaacaaaacaatcaactctgtgtacataccccctggtgccactgccaggcaatctaaatattttccttcatatataggtaaacaggacacggtacagtgtttttcctgtggtggatgtttaggaaattgggaagaaggagatgatccttggaaggaacatgccaaatggttccccaagtaagtagataatttttgcttaaatgtttctttcttttttttttgagacagtcttgctctgccacccaggctggagtatagtggcatgacttcagctcggtgcaaattctccctccctggttcaggtgattctcctgcctcagccttctgagtagctgggattataggtgtgcaccaccaagatgggctaatgtttgtatttttagcagagatggggttttgccatgttgcccaggctggtcttgagctcctgagctcaggcagtccacccacctaggcctcccgaagtgctaggattacaggcgtgagccactgtgcctggctaaatttttcagttctttaaaagacaaaatgaaagacaaaagagccacctttctggagtagcaccttcagttttgatctttccctattcaaaattggaccactccaggatttattcaagcaggaaaggcctaattacattgtgaaaagtttgaattatagaattttaaacagtttttaagtatttcattatcccaaattctaagataggttttgcccagtagaagtttcatgatctgccttaattaataaataaggctggaagtggtggcccaacacctgtaaccccagcactttgggaggccaaggcaggaggattgcttgaaatcaggagtttgagaccagcctggcatgtagagaccctgtttctacaaaaataaaaaaaattggccaggcgcggtggctcaacactgtaatcccagcactttgggaggctgaggccggtggatccgaggtcaggaaatcaagaccatcctggctaacacggtgaaaccatgtctctactaaaaatacaaaaaattagccgggaacggtggcgggtgcctgtagtcccagctacttgggaggctgaggcagaagaatggtgtgaacccgggaggcagagcttgcagtgagccgagatagcgccactgcactccggcctgggcgacagagtgagactccgtctcaaaaaaaaaaagttagccaggcatggtggcgtgtacctgcagtcctagctacttgcgaggctgaggcaggaagattgctagagcccaggtagtcaaggctgcattgagccgtgatcaagccactgtgctccagcctgggtgacagagtgagaccctgtctctaaaactaattaaataagtaataataatttccataggggtggtgtaaaatggtgtatgctggaaggtaaaaaatatttaaacattattacaaatggtttcatgtactgctaaatatataccaaatgaaaacactgtatttttaaacctcagaaagagtttttattactgcagtggtctttagttcctggcttagaaaaggaagtacattttaattatttttaatgctatatttactagtattttctacatgactttctttgtttctaccaagtacagattcattcctttaacaagtttttaaactttcactgtgtaaaatttcatacaaagatagaatagtgtaataaatacttgtcaacacatagccaaatcatatttcatccatctcctacccaccttttttcctggaaataataacaataactatatttttattttattttatttgagacagagtctcgccctgttgcccagtggtacgatcttggctcactgcaacctccacctctcaggtacaagtgattcttgtgcctcagcctccgagtaactgagattacaggcatgcaccaccacacctggctaatttttgtaattttagtagagatgcggtttcatcatgttgcccaggctggtctgaaattcctggcctcaagtgatccacccaccttggattcccaaagtgctaggattacaagcatgagccacctgtgcctgaccaagatttgttgttttctttctttcttttcttttttttttttttttgagagtgagttttgctctgttgcccagactggagcccagactggagtttagtggtgcaatctcagctcactgcaacctccacctctcagactcaagcaatcctcccacctcagcgtcctgagtagctgggaccacaggtgcctaccaccatgcccagctaattttcatatcttttatagcgacaaggtttcactttgttgcccaggctggtctggaactcctggttctacaaactcctgggctcaagtgatcctcccacctcagcctcccaaagtgctgggattacaggcatgagccactgtgctcagccccttaagatttttaattcgtagatttcctctttatccatctcttttttcttgtcacttatttgttaaagaagccatgtaatctgtcctgtaaaattccctctactctagatttggcagaatgtgttcctctggcatagtctaacatgttcctctaccttctgcatttccaggaacctgacacttggatctagcagtttggtcaggctcagattctattttctttctttctttcttttttttttttttttttgtgacagtctcactctgttgcccaggcttgagtgcagcggtgcaatcttggctcactgcaacctctgcctcctgggttcaagcgattctcctgcctcaccccacccaggtctgggattataggtgcgcactgccacacctgactagtttttgtatttttagtagagacggggtttctccatatttgcgaggctggtctcgaactcctgacttcaggcagtccacctgcctcggcctcccaaagtgctgggattataggcatgagccaccgtgcccagcctcagattctattttctttaacaaatatttgtcacacacctactacatgcaaagttgttggttggatactaaattaactacaaaactggacacagttatttacatttataagtcatcttgcacatggacagccatgcccacaaaagtgaatggaggcccggcatggtggctcatgcctgtaatcccagcactttgggaggctaaggtaggcggatcatttgatgtcagtagttcaagaccagcctggctaacatggtaaaaccctgtctctattaaaaatacaaaaattggccaggcgtggtggcaggcacctgtaaccccagctacttgggaggctgaggcaggagaattgcttgagcccgggaggcagaggttgcagtgagctgagatcgcaccactgcactccagcctggtcaacacagcgagactccatctcaaaaaaaaaaaaaaaaaaaaaaaaggctgggcacagtggctcacacctgtgatcccagcactttgggaggccaaggcgggcaaatcacttgaggccaggagttcattcaagtgatgaactctcctctcccctcttccctctctcctctctcctctcctatctcccctcttccctggccaacatggtgaaaccccatctctactaaaaatacaaaaatgagccgagcgtggtggtgcgtgcctatggttccagctactcgggaggctgaggcaagaaattgcttgaacctgggaggcggaggttgcagtgagccaagatcactccactgcacagcagcctgggcaacagagtgagactccatctcaaaagaaaaaaaaagtgaatggatatctttgatatgttttgatacgttgtgtgggaaagcaatatgcacaataagtgcagtgtgagactttgaaaatgtttaaaaccactcaaactatatatggagttgcttgaaaatatatagaaaaccttatgaaaatatgtaaaccaaactgtagatacttctggatctggatttgtcagggggtgaagtagtgatggattttcacatttattttgttcattgctgtcttgtttaaatttttggaaacaagtatatattactttcatagttgaaaagaaagtgaggagattaggagggaggaagtaaacaagggaggagaggagaaaggcaggaagaggagagagagaaagttagacaagtagatgagatagttatagggacgaatgaagctagaattgtgaaatcatttgacagtcactctggctccctgacgaatcaaaacagccacccaggcagtccttgtccatgctgacagtgcaccatatatgcatatgtaacagggaacagcagccccggctggagcacaagccgctgctcgtgggcacctgtctcagctctagcctcagctcaggcttcacttagcctcagggtcactgtgtttagtgtcgctgggttatacactggacaagtaccagtggcaccactcacacatgatcacattatcatgtgactagcacctactagagccgcacatcctgtctggaggggccttcatatgccttctctaacatagtcagagggtaaggtaataagcacagggaggggagacagcagtccagcaaccactcctagagaggaaggagttcaggccagcaaacaagggcagggggtagtgcagaggcttaggagatagagccaggcttgaatctgctgctacctgactaccagaccctaggcaggtgactgaccttgtctgaatctcatatgtaaaatgcagtgtcaacaacaacaaaaaaattagagacagatatccccaaatatgtcaaatttattcaggaataagaaaagagggttatgatttggaatgcactactgtaaaccacaggcacgtgcagtgagggaagagtaaagggaatttttcttggcaaaagggagaagttcacataagctgcttagaaacagagttcatagctgggcatggtagctcatacgtgtaatcacagctatgtgggaggctgaggcgggagggtctttggaggccaggagtttgagaccagcctgggcaatgtgatgaggctccagtttctttagagagagaggagagaggggagaggggagaggagagagaagacaggggacgggggagaggggagaggagagagggcagaagagaattccttggttctgaaggctcaaagccagagttcttgtgtgttcattggtggagatgctgttcctgggcaggtgttcttttgacagcatctcatctcatgttatcttatctgaattgctgcagtccaaaagaatgtgcagtgataaaccttgccatagaaatatgtgcgtacatgcaagcaatgcaaagcaggagatgcgtgacaggcgtgaagggatttcttatgggattcttagaaagtctttggaaccgttcctgtcttggacatgaaagcctgaaccccactccttcgtgccttcccagccctattttgtgtgggtctgataaaagtgatttcatcttggtatctgcgacttccacagcagataataatgtacagcttgtctggtggttgtaaggatgagaaacaaagtatatggatcaaatgctttgtaaaaattaccatgtataatgtgaggatgacagatgacccactgttttgcctttcatttgtttgtcgtcataagcacatggtcagtcaataaaatctaagagctggaattagagcaagaatccccaagtttcttgttgggttactctgtctttagctttctggacttcaatttgttgcttctttttatcaactgtcaacaaaatgagtatacccttacactttttaaaatgtggcactccataaatgtaagatgattttatggtaactttttaaggtactgagttcctcctcaatccatataaatcatgaggacagggaaccaccccgtgcattgtgtgccatgtaggttatgtgcagacttacggcaatccttggaaacatttatacacctgaaaactggggaccctggctgcctatcacatagaatcatggccctggggaaatatgcagatcatctgatggcatccatgttctcctgtgattataagagaacatggcaaggttggtcacatccccactggtggaagagcgggtactaatgctccagcctttgggttcccagcccattctttgctacagcaccatagaaagaaaacttaaatttgaattggagggatttttatttttatttttattttttttgagacagagtctctctctgttgcccaggctggagtgtagtggtacaatcatgactcactgcaaactctgcttcccaggttcaagtgatcctcccgcctcagcctcccaagcagctgggattacaggcgcccgccaccatgcctggctaatttttgtattttcagtagagatggggtttcaccatgttgaccaggctggtctcaaactccaggcctcaagtgatccacccgcctcagcctccaaaagtgctgggattacaggcatgatcccccatgcccagctgaattggaggaaattttaaaagttaattttaaaactgcttctcttttatgggaaaggaatatgtttttaaatggtattcagtgtgctcttttttaaaaaaatcaaaaattatccattaacatccgttactttttttgtttttggttttttttgagattgagtcttgctctgttgcccaggctagagtgcagtggcatgatttcagctcactgcaacctccacctcccaggttcaagcgattctcctgcctcagcctcccaagtagctgggattacaggcgcccgccaccacacccagctaatttttgtacttttagtagagacagggtttcaccatcttggccaggctggtctcgaactcctgacctcgtgatccacctgtctcggcctcccaaagtgctgggattccaggcgtgagccatcacgcctggcctaatagccattactttttaatgcatggtaattttttgttcagtagataaatatattgttatcttaaaaagattttttgtatttacttttgagactgggtctcagtctgttgcccaggctggagtgtagcagcctgatcatggctcagtgcagcctctacctccccgggctcaggtgatcctcccccttcagcctcctgagtagctgggactacagaggtgtggcaccatgcccggctaatttttgtattttttgtggagatggggttttgccatgttgcccaggctagtcttgaactcctggatgtgagccactgcgtctggcctattattttaaatatagttctctttactgccagtagctttcatataaccctagcgactagatttagtcaccactgcttaattccaaaaaacaaaagctccatcctatatttactgtaaatcagtctctttgattgtattgcatgttttatttcaagaaaaaagttaacctgaagatttaattttaaataactacacatgttgtcactaatagaaataacaaataattatatgagaataatggtaattctcctaagttttgtggtaaattttttggcaattttattgaagtataataaaattcaacaattcaatacgtctttataaatgttcattgtgatataggacagctctatcacagtactggggtaaattttaattatatttattaattacagatgtgaatttcttcggagtaagaaatcctcagaggaaattacccagtatattcaaagctacaagggatttgttgacataacggtaatgtataacagcaatttttttctcaagtttttggattacctgtaagtgtctgactcagaagggcataggcattctttttatgtcatgggtttgatttctttcttcctttctcctttcattcccctggctcccatcttcaaagtgaaaaatatcacattcacttgctgacctagagcctttttctttttccagggctggcttctgacgggctctgcttgccttcctgatagtcttcccctttatgaatgaagccacttgccccagcttccctctgctgcccctatctgcaggcttgctaagatctcctgacctaggcgctgtcacccacagtgggctgcagagctggctcttcctagctggctaactatcctgaatcagtaaaaatttcctagtggagagtgatgggaaatcgaatccaaactggcttaaacaaaaatgagaatttattgattaacatgactcaggagaccagaactctatagagaacatggcctgacagtgggggaagagaggtgtttcctcaaaaagaaactgggtgcagctttcccagaagaatcagttgctcaatatataataccctgatgaatttagttaccattctatgtctcttacttcctcattcgtcaaagtacatctgtgatatttaaatgcaggtctgttttcaaggtcagtttccggaaacagtgaccctgagaaggcttcctcctgagtatgcataaacattcacagcttgcatgcgtgtgtgtgtgtgtgtgtgtgtgtgtgtgtgtgtgtgtgtgtatgtttgcttgcactgcataaaaacaattgcaacatcaacagaaataaaaattaaaggaataattctcctccgactctgccgttccatccagtgaaactcttcattctggggtaaagttccttcagttcttgttcatagataggtatatacttcataagtcaaacaatcaggctgggcgcagtagctcatgcctgtaatcccagccctttgggaggccgagctgggcagatcacttgagatcaggtgttcgagaccagcctcaagacctccaacatgggccgggtgcagtggctcacgtctgtaatcccagcactttgggaggccgagacggacggatgatgaggtcaggagatagagaccatcctggctaacatggtgaaaccccatctctactaaaaatacaaaaaaaaaaaaaattagcccggcatggtggcaggcgcctgtggtcccagctactcgggaggctgaggcaggagaatggcgtgaacctgggaggcggagcttgtagtgagccaaggtcgtgccactgtgctccagcctggacgacagagcgagactctgtctcaaaaaaaaaaaaaaaaaaaaaaaaagacctccaacatcgtgtctgtctctactaaaaatacaaaaaaaaaaaaaaaattagccgggtgtggtggcacatgcctgtactgctcgggaggctgaggcaggagaatcacttgaacccaggaggcggaggttgcagtgagacgagaacctgccactgcacttcagcctgggcaacagagtgagactctgcctcaaaaaaaaaaaaaaaaaaaaaaaaagtcagataatcaacaacttgaattttaatttccctcagggagaacattttgtgaattcctgggtccagagagaattacctatggcatcaggtaaaaactcaaacattttccaaaggctttgcttgtttatttcttcttttgattttttgtccctatctctttttgtcgtcccccccgccccgccccgtttattttgaagcaaactctagacatcattccatctgtaactgtgaagggacaacttgaacgctgatacttgcaatatcaaagcctactggtctctttaatttgtgcagcagcaataaagatatagaaaaaaaaaagactaaagcctgctggtctcaccttgtgctttttattcaagcttattgcaatgacagcatctttgcttacgaagaactacggctggactcttttaaggactggccccgggaatcagctgtgggagttgcagcactggccaaagcaggtcttttctacacaggtgagtcagtaggttgtgcccacttgcttgcttgacctttaattcccacatagactttatgctcctgggcttacgtttagctacactcagcaatgtccactagcttcagcgtttctttttcttttctttttttttcccccttggagacagagttgcccaggctggaatgcagatcttggctcactgcaacctccacctcccgggttcaagagattctccttcctcagcctctggagtagctggaaccacaggcgcctgccaccacgcccagctacttttttgtatttttagtagagacagggtttcaccatgctagtcagaatgctcttgatctcctgatctcgtgatctgcccgccttggcctcccaaatgctgggattacaggtgtgagccatcgcgccaggcctctcttcagcatttcttatagattcgttttcttttctttctattttttttgagacatggtcatccaggctggagggcagtggcgagatcatggctcactgcagcctcaacctcctgggctcaagtaatcctcctgccttggcctcccaaaatgctgggattacaggtgtgagccactgcacctggcatacatctcttttctttcctgcatcataaatcctctcccagttttctattcctcccttaggtggtaaaccttcaaatttgaaaccttaaggtctggactaacaatgaatacaaatattctatttgtgataattatcatgtcttttctttctacacattactctcctcacctcttgtcccctgacaaagtgctcctagaaactgtcacaggacacttctgcttatatttctttaatcagaacttagttggatgggccgggcatggtggctcacgcctgtaatcccagcactttgggaggccgaggtgggtggatcacctgaggtcaggagtttgagaccagcctggccaatatggtgaaactctgtctctactaaaaatacaaagaattagccaggcatggtggcgggtgcctgtaatcccagctacttgggaggctgaggcaggagaatcgcttgaacctgggacgtggaggttgcggggagtcaagatcatgctattgcactccagcctgggcaacaagagtgaaactctgtctcaaaaataataataataataataattattattattattattattattattagtcagatgaccatacctagctgtaagaggagctgggaaacctaatctttttcctgggtgacaatgtgcccagctaaatattgggatttctattagtatggaaggatttgagataataggaacatggatagcaatctttgccacattctgcctgcaggagaaaatcaggaaattaattttcatgattcctaaacatgtagagccttccaccagattgtggcattttctctttagctgctggtcattaggaagcacctctgcaatctataaatgatgggctggttcctgtcagctaaatctctgcctgaaatacaagatgatcagggaaaggttcctaggtaccttgctggtcttgctcaaaccgaacacatgcataagttacagtggaggttaatgcagatctttaactgagagatcaagtagttgtcacaaataccatagagcaacacagagaagcagaatatagttgtcactctacctaacagacatgtgccattggaaaaaaaaaatctgactgcctcacaatcttaagcctttggaaagagtgtttgccatttctccctactctactgtgtcttcctcttgtcagccttccgcaagacccctctgaccagtgtgctccccctcttcctttccaatcctccaccactccacacaaatcctaatcatctctgactgttttcagatcttgcaagctctaggatctcatatttctgggaggctttcctctgccccagctttcccagagtggaaggaagatgagaaatgctctgtttctagtttgatccttttgcagagctaaataccaatttctttccaaagaaatataatttcacaaagagacttaatcctatttctggtgtaataaacatggcaataatgtggtaagaggcaattaattcttcatgcattcacttacataagggctgctagatttgctggtattttttttccgtgagctctaaatatattctttctgattcattcattaaacgaatactaattgagtgccacatgagtgtcaagcacttttctaggttcatgtcattcattagtgagcaaaaacctctaccctcatagagcttatttttatttttattttttgagacagagtttcactcttgttgcccaggctggagtgcaatggcgttatcttggttcactgcaacctccgtctcctgggttcaagcgattcttgtgcctcagcctcctgagtagctggcattacaggcatgtgccaccatgcccagctaatttttgtatttttagtagagacagggtttcaccgtgttggccaggctggtctcagactcctgacctcaggagatccgctggccttggcctcccaaagtgctgggattacaggcatgagccactgcgcccagccccctcatggagcttcaattccagattctggttgccaatctgtttgttgatcaaaggagaatggggcagagggatggtgtgcatcaaagtgcatggtgtgtaggagcattcaatgactacttgccagttaccccattggtggacagagtcttatatagaaaattgcctcactggtaaccaacttctgactgtcacaaaacccaactggagactgaataggctttcactattacaggtctggtggttattatctgcatgttaatggacagatgcccatgccagtggcactgatcaagtttccttacttttaggtataaaggacatcgtccagtgcttttcctgtggagggtgtttagagaaatggcaggaaggtgatgacccattagacgatcacaccagatgttttcccaagtgagtggaatgaatgttaaccatctgcaactttggatgcacttcaacagtttttttctttttcctcatttcctgccttattttatctttagattgagtctttatccactcctcggattcaggctatgaaggatgagtcttcatgtctttcatccctttgctccatgacccgcttcctgtactagccttcccctctttatagttatggcatagttttggctagattcatatattcacattacatgtttacattatcatgactatacaaatgctatgtggagctgaagcttgtggtaaatttttatttatttttcccttcctgtatatccttttatttttttaggaagtaataactgtcctgttggtatgttagcttatttttttttcctgaggtaaaattcaggtagtaaccattttatttatttatttattattttttgtgacaggttctctctcttgcccaggttggagtgcagtggtgcaatcatggctcactgcagccttgacctctctggctcaagcaatcttcctcgctcagcctcccaagtagctgggactacaggcacatgtcttcacacccagctaattttttttttttttttttaagagacagggtctctctatgttgcccaggctgctctcagacttctaggctcaagcagtcttcccatcctggcttcccaaagtgctgggattataggcgtgagccaccatgcacagcaattaaaccattttagagtacacaattctgtggcatttattatagtacattcacaatgttgtgcaaccaccccctctatctagttccaaaacactttcatcgcccccaaagaaaactctgtatccatcaagcaggcccccctcctctctccaccccactccatgcccagcccctgggatacaccaacctaattggtgtctatggatttatttgttctgactatttcctctaaatggaagcataccgtttgaccttttgcatttggattctttcacttggcatattgttttgaagtttatccatgttgtagcttgcataagtacttccttccttttgagaccaagtaatattccatatggatacactgcattttatttatccattcatctatttgtagatatttgggttgtttctaccttttggctaccatgagtaataccgataggaacatttgggtacaggtatctgatggagcatgtaactgtattcaagtctctggggcatatacctaacaacgatattgctagctgtatagtaattctatatttttactttttttttttttttctcacacagagtctcactctgtcactcaggctggagtgcagcggtgcgatctcagctcactgcaacctccgcctcccaggttcaagcaattttcctgcctcagtctcctgagtagctgggattacaggtgtctgccaccatgcccgcctaattttttgtatttttagggtttcaccatgttggctaggctggtctcaaactcctgacctcaagtgatccacctggcttggcctcccaaagtgctggaattacaagcgtgagccacagcgcctggcctgttttaactttttgaggaaatgctaaactgttttttccacagtgcttgcaccattttaaattcccaccaacaacaatgttgtgcaaccaccccctctatctagttccaaaacactttcatcgcccccaaagaaaactctgtatccactaagcaggccctccttctctctccaccccactccatgcccagcccctgggatacaccaacctaattggtgtctatggatttatttgttctgactatttcctctaaatggaagcatacagtttgaccaacaatgtatgaggtttcccatttctcatcaacacttttctatttttaaaaaaattatagccatctgcttaatttttttttttttttttttttgagatggagtctcactttgtcgcccaggctggagtgtaatggcgtgatctcactcactgcaacctccgcctcctgggttcatgccattctcctgcctcagcctcccgagtagctgggactacaggcacctgccatcacgcccggctaatttattttttatttatttttttagtagagacggggtttcaccgtgttagccaggatggtctccatctcctgacctcgtgatccacccgcctcagcctcccaaagtgctctgattacaggcgtgagccaccgcgcccggccagccatctgcttaatttttatgtacattgcttatttttgtttcttgagataaaattcatgtattaataattttatttatttaaatgaaataaatgaagacgaacaccagctcatcttcaacttatcccaaatgtttaaatctcctcttaagtcattcagacctaccagatatctcatcattttcatttcttgaaagagtcatcattttttttttctttttcttttttttttgagacggagtctggctctgtcacccaggctggagtgcagtggcatgatctcggctcactgcagactctgcctcccaggttcaagcaattcttcctgcctcagcatcccaagtagctgggactacaggcatgcaccactatgcctggctaatttttgtatttttaatagagatggagttttgccacgttggccaggctagtttcaaactcctgacctcaagtgatccgcctgcctcagcctcccaaagtgctggtattacaggcgtgagccactgcggctggtccattttcatcttgaaatgagtttccctggaagtcttctggcctgctggattatgaacaacttgtcctataatcatcctgggatccagggatctttcttcacaggcatcctggagattatctcctctgttgtatctcctggatctaatgtcatcctcttcttggttcactcgctcattttgttggaacacttcatcggagttccctgggaaagactgcataagaaatacacacttttagttgcatataatgcatatacagacatatagatctatctagatatatgtttttcctgtattctcacacttatttgatagtttagctaggtgtagaattataggttggaagtcattttaattctaaattgtagaggcactgctacatttctactggttcctaatgtgctgtcgagaagttccatgcctttctgcttgtcaatccttttactgcaaacaaaatttttttttttcctgtgctggaagctttcagaaaaatatctgttctaaaattttatgaagaaatatttcttttctatgaatctttaaacttaatttttttttacccatcaaactctttagaaatgtttaattgcaagaagaaatttgtgttttcactatgtaattagtaagagttttttttttagaaatgaatatgaacacatacagattttaaaatgaatgcttcctgctcatttgtatagtggtaaaaacaaaaataaaacaaaatgaatacttctatctaattttattgccttgaaggtattttgatagcagtagttacctcatttttctttcttatttgggcttagtgtataataaattattgagaacaatggggacattctacttaattcttggaaggataagctaggatgcagtctagtcttatttagaacttactctggaatcgatcaactcccttttatactattattattattattagttttagtgttttgttgttgttgtttttgagatggagtctcactctgtcacccaggctggagtgcagtggcgtgatctcggctcactgcaacctccgcctcccgggttcaagcgattctcctgcctcagcctcccaagtagctgggattacaggtacctccccaccatgcctggctaattttttgtacttttagtagagacggggtttcaccatgttggccaggctggtcttgaactcctgacctcaagtgatcctcctgcctcagcctcccaaagtgctgggaatacaggtgtgagccgccacacctggcctttagtgtttttttgttaagagactgggtctcggctctgtcacccaggctggagcaagtgcagtggtacaatcctagctgactgtagcctcaaattcctgggctcaagtgatcctcccacctcagcctcccaagtagctaggactacaagcatgtgtcaccatgcccgactaattttttaaagtttttttttgtagagatggggtcttgctttgttgcccaggctggtctcaaactcctggctccaaatgatccttctgcttcagcctcccaaagtacttggattacaggcatgagccactgctcccagccaactcctttttggatttttactcttcctttgcctcttaaaaaaactgcaaaccagtatgtctccaaatgattacctaaaatttttatgtatgctttaaagaatgaataaaaagcaacctatgaacctcctagtaaagtcaagaaattggacattatcaatgcnttaaaagacccntgcggccgggtgcagtgactcacncctgtaatctcagcactttgggaggccgatgtgggcagattgtctgagctcaagagttcgagaccagcctgggcaacatggtgaaaccccatctctgttaaaaaacagaaaaatttaaccgggcctggtgacacacgcctgtagtcccagctattagggaggctgaggcaggagaatggcttgaacctgggaggcggaagttgcagtgagccaagatggcgccattgcactcctgggcgacagagcgtgactctgtctcaaaaaaaaaaaatcaaaaaacaaaaaacaactctgcatgccaaccaccccctaattctgattatatccctgtccctccaatccagaggtaaatgtgatgctcagtttgggttaattattcccttgcttctctttgtggttttaccaactacatatacatccttaaacatatttagctttgtctattcttgaagttcaaataagaagcatactgcatgattcttcttgtaattggctggttttactccacgatgtttttgagattcatccatatttatatgtactacacagttgtagttcacttgttttcattggtaaatagtgtattattttatgaatatataataacttattttactgttgattaacctcgtgggtcgttttcagagtgttgcaaattcaaataatgccctatgaacattcttgtacatattttccagtgctcatgtgtgtttctctaggatacataacaaagtaaagaattgcagagtcatagaactttgcgggtgttcaactccactagataatgcaaagctttttcccaagtggttgcactgatttacattcccattggcctagatgcgtttctattgatttgcttcctcactaacttggtattgcccaaattttaatttttgtcagtgtaattactaataatgttaagcttattttcttcttctttttttctttctttttttttttttgagacggagtttcactcttgttgcccaggctggagtgcaatggcacgatctcggctcaccacaacctccgcctcccaggttcaagtgattctcctgcctcagcctcccgagtagctgggattacaggcatgtgccaccacgcccagctaattttgtatttttagtagagatggggtttctccatgttggtcaggctggtctcggactcccaacctcaggtgatccacccacctcagcctcccaaagtgctgggattacaggtgtgagccaccgcgcctggcagttgagcttattttcatattttcctgcagaatagtcttgttctttctcttcaagagtgtgtcttagctatttttttgccctttggtctttcatattccagagaatatattaaatatcccaagcaggcatggtggttcacacctataatcccagcactttgggaggctgaggtgggaggagtgcacaaggcgaggagtttgagactagcctttgcaacatagctagactccatttctacaaaaaatttttaaaacaaacagggtgtggtagcatgcatctgtagtcccagctacctgggaggcagaggcaggagaatcgcttgagctcaggagtataggttgcaatgagctatgattgtgccactgtactgtggcctgggtgacagagtaaaactttgtctctaaaaaacagaaatatccctctttatccttgatagtattttttaggcctttattagttttttcatgttacatcttttagattattttctttttaatctatctgtgactatatttaaagtcaattcttgttttttccttttcctttttgtgggtaacggggtctcactatgttgcccaggcagatctcaaactcctgggctcaagctgtcctcccacctctgccaccctaagtgttgagattacaggcatgagccactgcacccagccttaaagtgaattgttataggcaacaacacagtggggtcttttattttattttttatttgtttatgagacagactcgctctgttgcctacgctggagtgcagtggtgcagtcttgactcactgcacctggacttcccaggctcaagcaatcctcccacctcagactcctgagtagctgggactacaggcacatgccaccaagcctggctaagtttgttagttttttatagagacaaggtctcactatgttgcccagtctgatctcgaacacctagccacaagcaattctcctgccttgtcttcccagagtgctgggattacaggtgtggaccactgaacccagcaggtcttgctttttttttgagatggaggtgtgagccaccacatccagccaggttttctctttttttttttttttgagacggagtcttgctctgtcgcccaggctggagtgcagtggcacgatcttggctcactgcaagctccgcctcctgggttcacaccattctcctgcctcagcctcgcgagtagctgggactacaggcaccccgccaccacacctggctaattttttgtatttttagtagagacggggtttcaccgtgttagccaggatggtctcgatctcctgacctcatgatccacctgccttggcctcccaaagtgctgggattacaggcgtaagccaccacgcctggccaggtcttgctttttaagagtctgacaataactgctttctaattggaatgtttagaacgtttaaatttaatgcaattatgaatatggttggatttaaacctattttaccatttgctttctatttatttcatcacttctttgtttctttttcttttcctgacttcctagggtttagggtttttttttttttcttttttctacccctccttgagtatttttttttgtactccattttatttctgtcagcttattagctattaatccttattttacctttttactacttgctctagagtttaccatatgcctatttaacatatcatagtaatcttcaaaaatattataacagctgggtgcagtggctcatgcctgtaatcccggtaatttgggaggctgaggcaggcagatcacttgaggtcaagagttccagagcaacctgggcaacatggtgaaaccccgtctctactaaaaatacaaaaaaattagctgggtgtggtggcgcacacctgtaatcccagctgcttgggaggctgaggcacgagaattgcttgaacccaggaagcagacgctgcagaaagctgagatcgtgccactgcactccagcctgggtgacacagtgagactctgggtcaaaaaaatatataacacttgacataaaatgtatgaaccatacaatagtatatttccatttctcccctctcatcctttgtgctattgtcatacattttatttccatgtactttaataaatcttacaatataatgttatatctttgctttaaacaatttaagtacatttttacaacggcaaaagtctttcatatttgccctcttagttatcttatcattcctggtacttttcattcctttgagtagaaccaaatttccatctgctatcattttccttttaaatgatgtgcttcctttcactttttttttttttttttttttttttgagatggagtcttgctctgtctcctaggctggagttcagcgccacgatctcggctgactgcaacctctgcctcccgggttcaagtgattctcctgcctcaacctcctgagtagctaggattacaggtgcccaccaccatgccaggctaatttttgtatttttagtagagatagagtttcaccatgttggccaggctggtcttgaactcctgacctcatgatctgcctgcctcagcctcccaaagtgctgggattacaggggtgaaccactgtgcctggtccctttcacattttttgtagtgcagttatgctggcaactgactttatttggcatttgtttgtatgaataagtttatattttaccttccttcatagttcttttccttgatgggcctattaaaatattttttttcttttgtaagccacttcaccccttccctatgggtttgtttttatttacctctacatggctgactttggacagaaacgttaaaagttctacttgttgttttcctgaagctatgcttctatttctggactcatcgccaagtcacctgaaggcaatacaaatgaagtatctgggccacatgcagtggctcacgcctgtaatcccagcactttgggaaactgaggtgggaggataccttgagcccagaaaaaaaaaaaattagcctggcatggtggcacgtgcctgtagtcccagttacttgggaggctgaggtgggaggatcacttgagcctgggagttggaggctacattgatccttggtcgtgtcactaccctcaagcctggacaaaagagtgagaccttgtctcaaaaaaaaaaaaaaaaaaaaaaaaagtgtccctttgctttactcctgctctccagtgattctacagcatggaataggccactgacttactcacatgtatagttctcatctgtccattttaataattgcaactagagctctttttgaactttctctcttgttcttcaagcatacatcaaacctgagtttagagggtatttgcgtcctagtttcacgagattggcaagtagtttttagagagtatgtttgtggccattcttttcttttgatactgacggagggtttcttttttaattttttgtttgtttaagacagggtcttactctgtcacccaggctggagtgcagtgatgcaatcacggctcactgtagccccaacctcctggcctcaagtgatcttcttgcctcagcacccccaagtagctgggactatacatgcatgccaccctgctagctaatttttagaggaggtctctctatgttgcacaggttggtctggtcttgaacttctggcctcaagtgaaactcctactttggcttcccaaagtgctgggattacaggcatgagccattgcacctggcaatggagtggtttgtggttggttagttttttgtttgtttgtttgtttgtttttgagacagagtttcactcctgttgcccaggctagagtgcaatggtgcgatctcggcttacttcaacttctgcctcttgggttcaagcaattctcctgcctcagcctcccaagtcgctgggattacaggcgtccgccacaacgcccggctaatttttgtatttttagtagaggtgaggtttcaccatgttggtcaggttggtctcaaactcctgacctcaagtgatccacccgcctcagcctcccgaactgctgggattacaggcgtgagccaccatgcctggccttgtttgttttttgttttgttttgagacagagtctcactccattgcccagactagagtgcagtggcacaatctcagctcactgcaacctccgcctcccaggttcaagcgattcttgtgccccagcctcctaagtagctaggactacaggtgtgcgccaccactgcctggttaattttggaattttctttttaatagagacagggttttgccatgttggccaggctggtctcaaacttctggcctcaagtgatctgcccgcctcggcctcccaaagtgctgggattttgggtgtgaaccaccgcactcacagagtttttttctttttttaataaatttttatttgaaattatttagatttgcagaaagtgcaaagtaatacaaagagttcctatatattgccatacccaatttaccctaatgctaacatcttacactagcatatttgtcaaaatcatcagtgtaccaattcatatactgtacattactatttactaaaatccagagtttatttggatttcaccagtttttccactatgttgttttttgttccagaattcataaatagagggttttttttttcctatttttgattctttaagttcatttttgttggttgcatggaggagtgtcatatacgcactcattccaccaaattcccttgatatcctttaccattactttataaaccatttacatttctcttgcagagagccacaacctaagtgccttacctgatgacactgacagagagaatcactggaaatgatagttttatacttaattcttgtcactaaaactctaatagtgtttttaaaaacctaatacaaggccaggcctggcggctcacacctatcatcccagcactttgggatgcctagggaggagaattgctcaaggccagaagtttgaaaccagaacagcctgggcaacatagtgagaccctgtctctgaaaaaacaaaacaaacaacaacagcaacaacaacaacaaaaatacctaacacaaatacttaaatgcatacaactatttttataacttttaacttttacacttagttgtccatttctccaaaatatgaagtcctctgcggaagtgactccagaccttcagagccgtggtgaactttgtgaattactggtaatgaacaccatcatcttgtctgttttaccagcacatgatcatataattgaaaactgttttgaacaggaatgtctcatcataaataagttaataaattctacaaacatctactaaacatctgttatgttctaggtacagattggggaaatcacaataaaccagtcgggcacaatacctagcttcatgaaatgtatagtcaatctcttctacttcaaggcccagactctcttagactttgttgattagcatccaggctaaatggatcctctctggatcttcatgtggagggcaataaggctggatttgctacttggcctttttaggggttgagaagatgttactttaacaaaagcaagtgcccaacaaaatcataaacccaggtaataggctgaccactttaagctgagaaatcctacctagttctctgggatataagccactactaatttaatgcacacatataccaccttattttgaggctgtgtgttaggtatgttatgtttgtcatccccccacccccaacacacacaaaaaccaacttgctattcacgtgattcattttctatatgaattgaaaaatggcactaaagaaaaaagtttggggatatagaaatagcttattttttaaggaagaaacataacctttctaagtactggatgtgtaatattaaaaatgtagttaaccaaggacagaggctgcacctaatgacttttggaggaaccttcttgctcaagacactatgattctcgttacctggatagtatcacccatggattgtatcatatatgaaccactgaggaacacacattcctgcagatgtttgcagattattaattgctttatatttggagcacccctcccttcaatcagcataaatatttgagggtgggctgtgtttagaagatgtttagtctccaatgattacaacatgatgcaccactctcctatacaaattttgatttaagaaaagattttatttttcaaaggaaaccacaagtgaaagcaatcttgaagattcaatagcagttggtcctatagtgccaggtaagaactttgaagtagcacgtgggattatatgtatttgtaaatatatttgtatacagggcagttgcaaaaaaaagagtatttataattgtccaaagagcttccaaagaggagcagcattgcaacagtgtcgtgtatgagcaaaagtcaagattcttgtggcttctccagagtgcaggcaggaccaaactgatagtaggcaacgtgtctcaggtacaagcaaaccagtccttagaagcaccaatcagtaaacttctttcctgagatttttatttttattcattttattttattttattttatttgagacagggtcttactttgtcacccaggctggaatgcaatggcaagatcatggctcactgcagcgtcgacctcccaggctcaagtgatcctcccatctcagcctccccagtagctgggaccacaagcatgtgccaccacacctggctaatttttgtattttttgtagagacagggttttgccatgttggccaggctggtcttgaactcctaggctcaagcaattcgcctgcctcggtctcccacagtgctgggattacaggcatgagtcactttgcctggcctctttcctgagatgcatggtgcttatgataagcacacattatgtctaggtccctgcttcaagtgtggcactttggacacatgctttccacattccgattttgtgccaaaacctatgagatgattgcaatgtgggaatcatggatggctgtggaaaatcctaacacattcgtagtagacaggcagaatcatggaatgaaaaggcatggcgttcagactgagggagatgtgactatgaatccctgttgtgcccccctttctttctctccacagaaatggcacagggtgaagcccagtggtttcaagaggcaaagaatctgaatgagcagctgagagcagcttataccagcgccagtttccgccacatgtctttgcttgatatctcttccgatctggccacggaccacttgctgggctgtgatctgtctattgcttcaaaacacatcagcaaacctgtgcaagaacctctggtgctgcctgaggtctttggcaacttgaactctgtcatgtgtgtggagggtgaagctggaagtggaaagacggtcctcctgaagaaaatagcttttctgtgggcatctggatgctgtcccctgttaaacaggttccagctggttttctacctctcccttagttccaccagaccagacgaggggctggccagtatcatctgtgaccagctcctagagaaagaaggatctgttactgaaatgtgcatgaggaacattatccagcagttaaagaatcaggtcttattccttttagatgactacaaagaaatatgttcaatccctcaagtcataggaaaactgattcaaaaaaaccacttatcccggacctgcctattgattgctgtccgtacaaacagggccagggacatccgccgatacctagagaccattctagagatcaaagcatttcccttttataatactgtctgtatattacggaagctcttttcacataatatgactcgtctgcgaaagtttatggtttactttggaaagaaccaaagtttgcagaagatacagaaaactcctctctttgtggcggcgatctgtgctcattggtttcagtatccttttgacccatcctttgatgatgtggctgttttcaagtcctatatggaacgcctttccttaaggaacaaagcgacagctgaaattctcaaagcaactgtgtcctcctgtggtgagctggccttgaaagggtttttttcatgttgctttgagtttaatgatgatgatctcgcagaagcaggggttgatgaagatgaagatctaaccatgtgcttgatgagcaaatttacagcccagagactaagaccattctaccggtttttaagtcctgccttccaagaatttcttgcggggatgaggctgattgaactcctggattcagataggcaggaacatcaagatttgggactgtatcatttgaaacaaatcaactcacccatgatgactgtaagcgcctacaacaattttttgaactatgtctccagcctcccttcaacaaaagcagggcccaaaattgtgtctcatttgctccatttagtggataacaaagagtcattggagaatatatctgaaaatgatgactacttaaagcaccagccagaaatttcactgcagatgcagttacttaggggattgtggcaaatttgtccacaagcttacttttcaatggtttcagaacatttactggttcttgccctgaaaactgcttatcaaagcaacactgttgctgcgtgttctccatttgttttgcaattccttcaagggagaacactgactttgggtgcgcttaacttacagtactttttcgaccacccagaaagcttgtcattgttgaggagcatccacttcccaatacgaggaaataagacatcacccagagcacatttttcagttctggaaacatgttttgacaaatcacaggtgccaactatagatcaggactatgcttctgcctttgaacctatgaatgaatgggagcgaaatttagctgaaaaagaggataatgtaaagagctatatggatatgcagcgcagggcatcaccagaccttagtactggctattggaaactttctccaaagcagtacaagattccctgtctagaagtcgatgtgaatgatattgatgttgtaggccaggatatgcttgagattctaatgacagttttctcagcttcacagcgcatcgaactccatttaaaccacagcagaggctttatagaaagcatccgcccagctcttgagctgtctaaggcctctgtcaccaagtgctccataagcaagttggaactcagcgcagccgaacaggaactgcttctcaccctgccttccctggaatctcttgaagtctcagggacaatccagtcacaaggtatacctgtatatattttggatgactattctgatgtataatttctttttcttactttaagtggttgaaaacttctgaggccatgaaagcatgcatgctcattgatagaacagatataaaataaaccttcactaattttttttgacagtagcatgaattagtgaaaagtccttgaataatagaatggttttcaaataactcagacaaaatgaataaaatatttatattaaattattgaaggttcttaataaagacatgaattatctgttattagtaaaagaattagctatatgtaagatgatgcttagaaattaccttcaccctagctgcctaaaggaagaaaggcctgtagtccctgggaaataaataaattaatgggaaataatatcttcatctatttgtgtcttaactcctctaagcactatttgatagttttcagtgtagacttaacccatctttcattaaatttattcctagatactcatatcttttcgaaagtattgtaaatgtcattaaaaatattttttcattttctaattgttgctagtattgctttggtcttaagcagtttgactgttatatgcctaggtgtgctttgctttgtatgtatcttgcttgaggtgcactgaacttttttggaatgtgtgggttgacatttaccaaatttagaaaatttttcatcttttttcaagtactgttttattatggtaaaatacatgtaacaaagcttacattttaatcattttaagtgtacaactcagtggcattaagcattcactatgttgtacaaccatcaccactatccatctccagaaccttttcatcatcccaattaaacaataaattgggccgggcgcgggggctcacgcctgtaatcccagcactttgggaggccgaagagggtggatcgccagagctcaggagtttgagaccaccctgggcaacatggtgaaaccacatctctactaaaatacaaaaaattagctgggcgtggtggcatgcgcctgtagtcccagctattcgggaggctgaggcatgagaatcacttaagcctgggaggcagaggttgcagtgagcccagatcatgccactgcactccagcttgggctaccgagtgagactccgtctcaaaaaaaaaaaaaaaaaaaaaaaaatcttccctcccaccagcccctgataacttctcttctattttctgtctctatgaatttgcctcttctagatattgtttataagcattatcacttgtctggcttatttcactttgcatactgttcaaggtacatcatgttgtagcctatattggaatttcattccttcacatgtactccataaatatgtacaattattatgtatcaactttgaaaaggaacttcatcctttttatagctaatattccatggtatgtatatagtacattttgtttatccattctgctgctgagagacacttgggttgtttctaccttctggctatcataaataatgctgcaatgaacactggcattataagtatcggtttaagttcttgcttttaatcattttgggtatatacctagaagcagaattgctgattcatatggtagttctatgtttaactttttgaggaacttgcacagtagctgcaccatcttacattcccactatccatgtacaaaggttccaattactccacatcctcttcagcacttgttaatttttgtttttgtggagacagagtctaattctgtcacccaggctggagtgcagtggcgagatcttggctcactgcaacctccacctctcgggttcaagcaattctcctgtctcagcctcctgagtagctgggactacaggtgtgcaccaccatacctggctaacttttgtatttttagtagagatggggtttcgccatgttgcccaagccggtctcgaactcctgagctcaggcagtccagccaccttggcctcccgaagtgctaggattacaggcatgagccacagtgcccgacctgtttttgttttcattgttgtttttcagacagtgtcttgctctattgcccaagctggagtgctgtggtgcaatcatggctcactgcagcctcaacctcttgagctcaggtgatcctcctgcctcagcctcctgagtagctgagactaccagcatgcaccaccgtgcctggataattttttattttttgtagagacagattcttgctatgttgcctagtctggtcttttttctttttctttcttttttttttttgagatggagcctcgctctgtcccccaggctggagtgcagtggcgcaatctcggctcactgcaagctctgcctcctgggttcacgccattctcttgcctcagcctcccaagtagctgggattacaagctcccgccaccacacccagctaatttttgtatttttagtagagatggggtttcaccatgttggccaggctggtcttgaactcctgacctcaggtgatccacccacctcggcctcccaaagtgctgggattacaggcatgagccaccgtgcctgggcccctagtctggtcttgaactcctgggctcaaatgatccacccaccttggccttccaaagtgctgggattacaggtatgagccacctcacccagcccattttgttttgtgattatcataaagccattctagtagttgtgaagtggtatctcattgtggttttgatttgcatttctctaatgcaaatcatgaaaatgatgttaagtatcttttcactttttgaaaaaatatgtttgctcatttaaaaattgttgttgtttttgttgcattgtaagagttatttgtatattctggatttcaacctgttatcagatacacagtttgaaaatatttttcccattccataggttgtcattttactttatttataatgtcctttgtgcacgaaagttttaaattttgacgaagtccaatttatctgtttttttcttttattgctggtccttttggtgtcctatctaagaatccattgccaaatccaaggtcatgaagattaactcctatgttttttctaagagttgtgtgatttcagcttttatatttaggtcgttgatccattttgagttgattttttttacatggtgagggataggaatccaacttcattctttcgcatgtgcaaatccagttgtccccaaccgtttgttgaagagatgctatatttcttttctcttcttttttttttttttttttttttttgagacggagtctcacactgtagcctgggctggagtgcaatggcgcgatcttggctcactgcaacctccgtctcccaggtttatgtgattctcctgcctcagcctcctgagtagctgggattacagatgcacaccaccatacccagctaattttttttttgtatttttagtagagacggggtttcactatgttggccagactggtctcaaactcctgacctcgtgatccgcccgcctcagcctcccaaagtgctgggattacaggcatgagccactgcgcctagccgagatgctgtatttctttttgtgagtctgaagagtagcacagggcttcccatacagtgcataagctgcaaaaagcaatatcttcatatatgtattctttaaaaaaaaaaaagaatgttttatggtatgtggaaggtttgcatgtgaaaatagctggatgaatcaaaatgacagttttaaaatgtccattcagaactctttagattaataatgggaaactgtgctgctttccagaccaaatctttcctaatctggataagttcctgtgcctgaaagaactgtctgtggatctggagggcaatataaatgttttttcagtcattcctgaagaatttccaaacttccaccatatggagaaattattgatccaaatttcagctgagtatgatccttccaaactaggtaaggatggcactttaatatacttgtttttacgtaagttggaaaagctacttggccaataatttatttaagagttaaagtgcctgtggttctaagggtgtagcctgtatccatggtaaattgtgaggaatagcactctttctcattaagaaagcagagtgctgtttgtaattattgagcctttactacacactaggaagtatcctaagcacttcacaaatatgaactcagtcttcatacccactctatgaagtactattattattattattattttttttttttttttttttgagacagtctcccgctgtcgcccaggctggagtgcagtggcacgatctcggctcactgcaagctcctcctctcaggttcaccattctcctgcctcagcctcccaagtagctgggactacaggtgcctgccaccacgcccagctaattttttgtatttttagtagagacggcgtttcaccgtgttagccaggatggtctcgatctcctgacctcatgatcttcccgcctcggcctcccaaagtgctgggattacaggcatgagccaccgtgcctggccaaagtaaagtactattattaatgctattttgtagctgggaaaactgagacataaagagataaagtaattcgtaatatccagctaaggaaatgtatatctgtgactcaaatacaggaattttgactccaaaatctgagttcttaatccctaatataggccgggcctggtgactcacacctgtaatcccagcactttgggaggccgagaagggcagatcacctgaggtcaggagttcgagaccagcctgaccaacatggtgaaaccctgcctctactaaaaatgcaaaaatttgctggcatggtggcatatgcctgtaatcccagctacttgagaggctgaagcaggagaattacctgaacctgggaggcagagattgcaatgtgagccgagatcgcgccattgtactccagcctggggaacaagagtaaaactccatggggaacaagagcaaaactccatggggaacgagagcaaaactccatctcagaaaaaaaaaaaaaaaaagaaagaaatccctaatataatgttgccactccaaaataatttgtagggttattttattttgtttttggttaggctggtcttacattgcaacttacagatctggcagctcagcaggaaggaaatctgctaatctgtagtcattggaagtatttccctgtttctcaccagcctatcctaatagttcatggaaaatggtgcagccatctttcttaaatacatcatttagctaaatgacttaggcaccatcattccttaacttagtaaacactgaacactaaagattgaagaaatatacaactctatggaattgacataaagacttgcatgcaaaagcttcattgttggccaggcacagtgactcacacctgtaatcttagcactttgggtggccgaggcgggaggatcgcctgagagcaggagttcagcaccaggctgggcaatatagcaagacatcgtctctactaaaaaaataaaaaattagccaagtatgatggtgtgcacctatagtccccagctactcaggaggctggtaggatcacttgagtccagaagttcaagcttgcaataagctatgatcatgccactgcactccagcctaggtgatagagcaagaccctgtctcaaaaaaaaaaaaaaaaaaaaaatatatatatatatatatgtgtgtgtgtgtgtgtgtgcatacatatatacaccgaagctggaggtggtagttatatttgtcagcaaattttgcaacaaatttaggttttgcttcagagttgtcattccttttatgtttcttttttttttttgagacagagtctcaatctgtcacccaggctggagtgcagtggcaccgttgtcagctcactgcaacctccgtctcctgggttcaagcaattctcctgcctcagcctcccaagtagctgggattacaggcacccatcaccatgcccggctaattttttaatatttttagtagagacggggtttcaccatgttggccaggccagtctcaaactcctgacctcaggtgatccgcccacctcagcctcccaaagtactaggattacaggcgtgagccactatgcccagctgtttctttgtatagtattctttttttttttttttttttttttttggagatgcagtcttgctctgttgcccaggctggagtttggtggcgcaatatccactcactgcaacctctgcctcctgggttcaagcgattctcctgcctcggcctcccgagtagctgggattacagctgcctgccacccacgcctggcaaatgtttgtatttttagtagagacagggtttcaccatgttggccaggctggtctcgagctcctgagctcagatgatccacctgcctcggcctcccaaagtgctgggattacaggcatgagccacagcacctggcctctttgtattcttattgtgtaaatgtcatgtacaaacttagagttattaggtgttaaagctgaaggtgatgctactgagtcaatgcttgtattttatagaagagaaaactgttacccagagagggtcaataatgtgtcaaaattcacattacttgctagttgcagaacctgaacccaagcccagtgacctgattcttagatcatgagatcgtggtacctggttttaattaagtattattgaaacaaaataataaactacttggctaattttgatagaaatttgcagtattttctaatttctgaaaatccttgatcttttacagtaaaattaattcaaaattctccaaaccttcatgttttccatctgaagtgtaacttcttttcggattttgggtctctcatgactatgcttgtttcctgtaagaaactcacagaaattaagttttcggattcattttttcaagccgtcccatttggtaagagttataatattacaatggtggtttaaaatgtttctatggacacagagtcatattaagcactctttaaaaagggccatattttgaggctgggtgtggtggctcatgcctgtaatcccagcactttgggaagctgaggcaggaggcttgcttgaggtcaggggtttgagaccagtctgggcaacataacaagccctccacctctaaaaagctttaaaaaaatcagtcgggcacagtggtacctatagtcccagctactagggaagctaaggcaggaagattacttgagcccagaaggttgaagctgcagcgagctgtgatggtatcactgcactccagcctgggtgacacagaccttgtctctttaaaaaaagaaagaaagaaaagaaaaattgtttctcaaataataaagtataggtgtttccagaattttcttttttacctttacgctcagttggatttgaaatttctagaattttaacaacatttctagttatcagaattattttctgagcaaaaatttgttttatctacttagtcatatgaattcaatctgaattattacattaatttctaatttcttcattttaaagatgttacactttgctgtgagagatgtagctgacataactaaatttttattttccctttcatagttgccagtttgccaaattttatttctctgaagatattaaatcttgaaggccagcaatttcctgatgaggaaacatcagaaaaatttggtatgtttacaaaatagtgctttttacgtattcttattctctttctgcccagaatcctttttctcctattctgaattagccacaaggaaagcaagatatgcattagctacccttgcttaccagaacgaagtgatagtcatgctcaacttctacccaccaaatgccttcactacagttttacctgcagacttgatctcattcaaagcagaatgacttcttagagtacatatttggtcattatagcactatgcaatataattgtcaggtatctgttccaaatataagacctcatagtttcaaaggttactagaatataggtaaaaatctatcttttaaggttaggaaaactcaatacgtgaaaacgtgtatttcattaaatgatagctatagaatttaaatactttttgatttttaaaaaacgattatgaaagtaatgtatgctcatggaaaacattctaacaggaaaaaaaaaaaataaagggaggcagtggagatagggactgtagagctgtgctattcaaagtgcttctcaaacataagcgtacataaagattgccaggatcctcctcttcccttccttggaggcagctaggtgggtgggggctgaggtggcagaggtaggatcagggccaaggggatggctggcatacatcataggttgattaagcaaataatacagtgagtatagccagatgcagtggctcacacctgtaatcccagcactttgggaggccgaggtgggtggatcacctgaggtcaggagttcaagaccagcctggccaacatggtgaaaccccatctctactaaaaaatacaaaaatttgctgggcgtggtggcacatgcctgtagtcccagctacttgggaggctgaggcaggagaatctctcgaacctcggaggcagagattgcagtgagccaagatcaggtcactgtactccagcctgggtggcagagcaagactctgtctcaaaaacaaacaaacgaacaaaacagtgagtataatgagagccacgtttcctcacagttggaaaaggaacttacaaatattgaaaggtgaggctagaaagagctttgaggtgttggattagaattggaaatattggtctggcctcatggttttttctaacctatgaacatacatagagatctccatatatatacattgatctccacatgtctatagatacacacatacatatttctcagctcaatggagagactagaaggcactgcagtaataatgaacacaccaagtgcctagatactgatttctaaatcctgtccttccgtaaaggaaccagggtccttgcaaaattggctgattcaagaactgagacagggaaagaaaatgataagcctgggacattgatttatgctagaaattattcaatatatttccatgtgtgaggcctcagaagttacctttctaatgatcaaatgatctatcgtgtgccatgctaggaaggagtcgaagtgaaaaggaaggttctaagagtggtggactgtgaggctttagggccaggaggccggtgcagaatcactgagcatgacagcgggaggtggaatgggaaaggaggtggctgaaggcattgcagagctgggaaaggaacctgcaggtcaggaaaagcttcattctaaacgaggaatggagatttaattggcagcctggactttagtgcaggagagattggttggtagggtgtggtggaggaattgtctggaggagcgaggaagacggaagcatgtgctggcccttctcttgcttcctggactgtgcatgatgtttagaccatacatgattttcagattactgttgcataggaacaaaaagtacaaagagaatagctttttggtcttttctgacagcctacattttaggttctcttagtaacctggaagaattgatccttcctactggggatggaatttatcgagtggccaaactgatcatccagcagtgtcagcagcttcattgtctccgagtcctctcatttttcaagactttgaatgatgacagcgtggtggaaattggtgagctagtgtttcagcttgcatggaagccagtggtatagccaagctttctgctgcaacatgtctatgtaaacatttgcccctctagaaattttcaacccgcttcctcattttcactatcatactgttccttctagtgtccttctgtggatttaggcgcattctggtcagatttggaagtacaaaaaggtctcccatttgtggatatacaagccctcaaatctgcgttcttgccacctggtgttttagacacctggccacatactctcctaagtactcctttttaaaactgaagatgaatatacacacagaaaagtacaaaaatcatgtgtactgctcactgaattttattttcttattttcttcttttttttttttttgagacagagtttcgctcgtgttgcccaggctggagtacaatggcacgatctcgggtcactgcaaactctgcctcctgggttcaagcgattctcctgcctcagcctcccaagtagctaggattacaggtgaacgccaccacacctggctaattttgtatttttagtaaacacagggtttcaccatgttggccaggctagtctcgaactcctgacctcaagtgagccacagtgcctggcctgaggaactgagatttctgtcgagacctgaagggagaatggcccaggcatagttggtagaggaggaattgagacatcatttcaaacagaggtaatcacttgtgtcatagcctggagttaaagagaaccagatatatttgaagaacttgggggaaaaaaaggaatgtctggagcaagaggcaggagtgagttgtgagaagaagactggagaggaaagtaaaagcccaattggagaggctttgtcgggtgtgttacaagggctggatctcattttcttactgctcagcactgttattttacgttatttaaaacagctgggagcggtggctcaagcttgtaatcccagcactttgggaggccgaggcggatggatcacgaggtcaggagatcgagaccatcctggctaacatggtgaaaccccgtctctactaaaaatacaaaaaattagccaggcgtgatggcgggcacctgtagtcccagctactcgggaggctgaggcaggagaatggtgtgaacccgggaggtggagcttgaagtgagccaagatcatgccactgcactccagcctgggcaacagaacgagactccgtctcaaaaaaaaaaaacaaaaaacaaaaaacaatgacaacttacaacctttttcttaaaggccttgtttcttcctccttatgaggaagaatttaataacattaaattttgtggtctctctcatcctcatttactataaattatttgtgttttattcttctcactacattaggtcaaagccttccttagaacttcaatctcacacacagatttgagccagtaacccctgtcgctctccctcctgagagcaggtgttttctcttcccggcgcccagcagagtatgcctggcctatagtgggaactcagtaaatatttgttgactgaataaagaaaacttacttttctgtagcttcttctgatggacagctgagaggccattgtttgcctatagtcagtaatgcttaaactttacctgtaggagacagcattcagacacatcacagaaccggctaatcacacaatatgaagtgggagttatgctgaaacaggggaaagaagggaatggatgtgaaagacctgagtctttcttcaagtccctccagaagtgtctttcatgtgggggaatgagaaatatctcttgaatgttactgaagatacctattcaggacatagctgaagacattttctcagtacctctgttgtttaacctcagtcaagctacagccatggattctagattgaaaccaaacttaacctttgcccaagttagaaaaaaaaagaggtttagcaattaaaaacaaggctgggcatggtggctcatgcctgtaatcccaacacgttgggaggccaagatagaaggactgcttgaggccaggagtttgagacaagattgggcaacatagcaagaccttgtctccataaaaaattgaaaaattagccaagcacggtggctagtcctgagtagctaggactcaggaggctgaggcgggaggattgcttgagcccagaaattctaggctgcagtgagttataactgaaccattgcactccagcctaggcaaccaagtgacaccctgtctcaaaaaaaaaaaattttttttttttaaaaacccctaaaccaaacaacaagaactctgcttggtacccattccaaagtctagtcagcctgtgttcattgagaacacagggtgtgcccggcttccatttccttcagagcccttagtctcaaaaacaggagggtcccttctgggcaacagaaatagggcatagcagtggacagtcggatgacatggctttaggaatgtcacacccccttctctataaaaggggaagacataattgctacactctttgaagtcccttgtaatttagtctggattttttttttttgttttctctttttgttttttagacggagtcttgctctgtcacccaggctggagtgcagtggtgggattttggctcactgcaacctctacctcccaggttcaagctgattctcctgcctcagcctcccgagtagctgggattacaggcatgtaccaccatatccggctgattcttgtatttttagtagagatggggtttcaccatgttggccagcctggtctcgaactcctgacttcaagtgatctacccacctcggcctcccaaaatgctgggattacaagcgtgagccactgtgacttgccaatttagtctggtttgtaggcatgatgtgccttggcatgtgacctcctgtgagaccaaaagagaagctcatatttgtccaggatggtgaaactctcagcacaatggcgtcagtgctttaggcttggctgtacttctttggtttctgcttctcccttagatttttgccaggtggttctttattaacccatcagctctttggggtttttaaggagatattttcaaaatattatattaagctgggcacagtgacacgtgcttgtaatcccacctacttgggaagctgaggcaggaggatcacttgagtccaggagtttgagaccagcctgtgatggccaggcgcggtggctcacgcctgtaatcccagcactttgggaggccaaggcgggtggatcacaaggtcaggagatcgagaccatcctggctaacacagtgaaaccccgtctctactaaaaatacaaaaaattagctgggcatggtggcgggcgcctgtagtcccagctactcgggaggctgaggcaggagaatggcatgaacctgggaggcggaggttgcagtgagctgagatcatgccactgcactgcagcctgggtaacagagcgagactccatctcaaaaaaaaaaaaaaaaaaaaaaaaagaaagaaagaaaaagagaccagcctgtgttaacatagcaagaccccatttcaaaaaacaaaattatattgagtacttcctactagcagtagtggtgggagaggaggctggttcaaataaccttgtctaccattattgaaatggaagtccttatgattctattttcatgaatgttttgttcttgtagccaaagtagcaatcagtggaggtttccagaaacttgagaacctaaagctttcaatcaatcacaagattacagaggaaggatacagaaatttctttcaagcactggacaacatgccaaacttgcaggagttggacatctccaggcatttcacagagtgtatcaaagctcaggccacaacagtcaagtctttgagtcaatgtgtgttacgactaccaaggctcattagactgaacatgttaagttggctcttggatgcagatgatattgcattgcttaatgtcatgaaagaaagacatcctcaatctaagtacttaactattctccagaaatggatactgccgttctctccaatcattcagaaataaaagattcagctaaaaactgctgaatcaataatttgtcttggggcatattgaggatgtaaaaaaagttgttgattaatgctaaaaaccaaattatccaaaattattttattaaatattgcatacaaaagaaaatgtgtaaggcttgctaaaaaacaaaacaaaacaaaacacagtcctgcatactcaccaccaagctcaagaaataaatcatcaccaatacctttgaggtccctgagtaatccaccccagctaaaggcaaacccttcaatcaagtttatacagcaaaccctccattgtccatggtcaacagggaaggggttggggacaggtctgccaatctatctaaaagccacaatatggaagaagtattcaatttatataataaatggctaacttaacggttgaatcactttcatacatggatgaaacgggtttaacacaggatccacatgaatcttctgtgggccaagagatgttccttaatccttgtagaacctgttttctatattgaactagctttggtacagtagagttaacttactttccatttatccactgccaatataaagaggaaacaggggttagggaaaaatgacttcattccagaggcttctcagagttcaacatatgctataatttagaattttcttatgaatccactctacttgggtagaaaatattttatctctagtgattgcatattatttccatatcatagtatttcatagtattatatttgatatgagtgtctatatcaatgtcagtgtccagaatttcgttcctaccagttaagtagttttctgaacggccagaagaccattcgaaattcatgatactactataagttggtaaacaaccatacttttatcctcatttttattctcactaagaaaaaagtcaactcccctccccttgcccaagtatgaaatatagggacagtatgtatggtgtggtctcatttgtttagaaaaccacttatgactgggtgcggtggctcacacctgtaatcccagcactttgggaggctgaggcgggcgaatcatttgaggtgaggaattcgagaccagcctggccagcatggtgaaaccccatctctactaaaaatacaaaaattagccaggtgtggtggcacatgcctgtagtcccagccactagggcggctgagacgcaagacttgcttgaacccgggaggcagaggttgcagtgagccaagatggcgccactgcattccagcctgggcaacagagcaagaccctgtctgtctcaaaacaaaaaacaaaaccacttatattgctagctacattaagaatttctgaatatgttactgagcttgcttgtggtaaccatttataatatcagaaagtatatgtacaccaaaacatgttgaacatccatgttgtacaactgaaatataaataattttgtcaattatacctaaataaaactggaaaaaaatttctggaagtttatatctaaaaatgttaatagtgcgtacctctaggaagtgggcctggaagccattcttacttttcagtctctcccattctgtactgttttttgttttactttcgtgcctgcattatttttctatttaaaacaaaaataaatctagtttagcactaaaatattaactggagctacctctggagggcaagagtactagaaggtgggatggattgtcttcttgcttgtctgattttatatgtaatacctttgtaattagaaaggttgttaagcattatatcagaatccagtcaggagacagaaaccacacagaaatttgaatggggaaagtttaatatacagatgctcggcctgacgcagtggctcacgcctgtaattccagcactttgggaggccgaggtgggcagatcacttgaggtcaggagttcgagaccagcctggccaacatggtgaaatcctgtctctactaaaaatacaaaaaaaaattaaaaaaaaaaaaaaagccaggcatggtggtgtgcacctgtagtctcagctacttgggaggctgaggcaggagaattgcttgaaccaggaggcagaggttgcagtgagccaagatcgtgccactgcattccagcctgggtgacagagcaagactccatttcaaataaataaataaataaataaaataagatgctcctcaacttacaacagggttatatcctgaaaaacccattgtaagtagaaaatattgtatgtcagaaatgcatttaatatacctaaactaccaaacatcatcgcttaacctgacctaccttaaacacgctgagaacacttatattagcttacagttgggcaaaatcataaacacaaagcctattttataataaagtattgaaaatctcacgcaatttattgaatactgtacagaaagtgaaaaatagaggtcgtatgagtacttgaggaacagtttctactgaatgcggatcacttttgcaccattgcaaagtagaaaaatcctaagtcaagtcatcatgagttggggactgtccgtaagagttattaacagaggattggaatggggattgggtagtaaggaataaagagaagcctgggcagatgcagggaacagccgatatgggcttttcaccccaggctgagacagaacaactcaaagaagaaagctcagggctgagatccgggctgagatccagacttcgtgtgagaggacacagctgtgaaagacagaggtttgctgaggctgtggagttgcagctggagaaggtgctgggcttggggcactttgcagagaagggaccttgtgcatgtcaagggaagccattcatgtgggggtactgtgcgctgctgaccattgggtgctgctgaagttaggcaccgcccaagaagtgtgcagccagaacgaggtgctgcagaggcagagtgtatgtgctacaggagctggtattgcagatggcacaggtgttgcaggtgtctgcctagaggagcacaatggaaccaggaaaagcagcccttgccccttcagtgtgtcagcagcaccctcgattgacaaagtttcactctgtgcttactgtcatgggagaggtatttacagggcccagatctattattacagaacagacaatgaagactgaatgtggatataagaggcaacaactagcataactcattaaatctaatagtgcacacataaacacaaaataacctagtaatttcttaatattgactgacaggatatatgcacgtgatgtatttataaattcatggaaaacttatataaaaaacaggcaaccataattgagtttagggaggagaacaggatggctggtggacagaaaagggagagagggaagtttgctttttttctcctgcatacccttttataccagttgagttttgtcccatgtgtgcatactattaaaaaaccataatacttgaccaggtgcagtggctcacgctggtaatcccagcactttgggaggccgaggcgggtggatcacctgaggttgggagttcgagaccagcctgaccaacatggagaaaccttgtctctactaaaaatacaaaattagccacgcatggtggtgccttcctgtaatcccagctactcgggaggctgaggcaggagaattgcttgaacccaggaggcggaggttgcagtgagccaagaacgcgctattgcactctagcctgggcaacaagagcaaaattctgcctcaaaaaaaaaaaaaaaaaaaaaatcataagattccatgcaaattatttttccagagctgcttctaacagcgtttagttcaagcagcggtcagtaaagtatggccctggactgtccagccctcaagctaagaatggttttcacattttttaaagcaacagagactcagtggcctacaaagctaaaatatttactgtgttcttttacagaaaacaaactatttctatgacaaaatacttttgaatcataagctcatcatgccctttattctagtttacatcagtcttcataggactcccaagtcatccctcattgacctaaaaactgtcctcatggttgtaagccctccctcccttcctccatccatctctccctctctctttttctccttccctctctcccttccttccttttctttcataaagaaaagaggtttagttgactcacggttctgcaggctttacaggaagcatggtgctggcatctgctcggcttttagggaggcctcaggaaactaaaatcatggcagaaggtgagcacacatgtcacatgatgaaagcagaaacaagtgagagacagtgggggggcagggggcaggtttcatacactttgaaatgaccagatctcacgagaactcagtaacaacacaaaggtaacaccaagccatgagggatctgcccccatgatccaaacacctcccaccatgccccatctccaacactcgggataaaattcaacataagtagagataaatatccaaaccacatcattccacctctggcccctcccaaatcttatgtccttttcacaatgcaaaatacaaccatgccttcccaacagtgccgcaaagtcttaactcattccagcattaactcaggaatccaaagtctcatctgagacaaggcaaatccctgccacctatgagcctataaaataaaaaacaaattatttacttccaacatacaatcagggttcagggattggggaaatattcccattagggaaaaacctgccaaaaaagggggctataggccccatgcaagttcaaaacccagcatggcagtcattaaatcatgaaactccacaatgatctccttggtttccatgtggcacgctgatatgagggttgggctcccaaggccttgggcagctctgctcctatagctttgcagagttcagcctgctgtcacaggctgggttgagtgtctgtggcttttccaagtgcagggtacaagctgccagtggctctaccattctggagaacagtagccctcttctcacagctccactaggcagtgccccagtagggactctgcgtggggcctttaaccccacatttcccctccatgctgccctagtagaggctctctgtgagggctctgctcctgcagcagggttctgcttggacacccaggcttttccatacatcctctgaaatccaggcagaggctaccaagaattcaccatttttgcattctgtgtgcctgcaggcttaccacctaatggaagctgtgaaggctatggcttatgccctccaaagtaacagcccaagctgtacctaggcccctttgagcccctgctggagttggagccatctggatgcagggagcagtgttctgaggctgcacagggcaacagggccctgggctcagcccaggaaaatattcagtcttccttggcttcagggcctatgacaggaggggctgccccataggtctctgaaatgcctttgaggccttttccccattgtcttggatattaccacttggatccctttcagttatgcaaatatcagcaagtggttgctccacagcctgcttgaattccttggagaaaatggttttttttttaccacctggctaggctgcaaaatttcccaacttttaggctctgcttcctgtttaaatgtaagttccaaatttaagtcattcatttgcccccacatctgagcacaggctgttagtagcagaaggccacatcttgaatgctttgctgcttagaaatttcttctgccacatacgctaggtcatagtttttaagttcaaacttccacagatccctaggacacaagcagaatgcagccaagttatttgctaaggcataacgtgttgacttttgctccagttcccaataaattcgtttccttttgagaccttgtcaacctggacttcactgtccctatcaccatcagcattttggtcacaaccacttatctagtctctaagaagttccaaacttgccgggagcggtggctcacgcctgtaaacctagcactttgggaggtcgaggtgggtgaatcacttgaggtcaggagttcgagaccagcctggccaacatggtgaaaccccatccttactaaaaatacaaaaatattagccaggcatggtggtgcatgcctgtaaccccagctgcttgggaagctgaggcagaaaatcacttgaacccgggaggcagaggttgcagtgagccaagatcacgccactgcactccagcctgggcgacagagcaagactccgtctcaaaaaaaaaaaaaaaaaaaaaaaagtttgaaacttaccctcattttcctgtcttcttctgagccctgtaaactcttccaaccactactcattacccagttccaaagctgtttccacattttcaggtatctttatagcaatgcccaacttctcggtaccaattttctgtattggggcattcttgcactgctataaagaaatacctcaaactgggtaatttacaaagaggtttaattggctcatggttctgcaggctttacaggaagcatggtgctggcatctgcttggcttctagggagacctcaggaagcttacagtcatggtggaaggtgaaggggtagcagacacatcacatggtaaaagcaggggcaagtgagagagctaaactcccgctttctgatcacatatcccaacctgctccaactccctaaatccttccactgtgtctacatggtagaatctcctacatccacaacttcttatgtcaactttccttctatttcttgatctaactcctcattctcaagctttttttttaaccatgacccacaataataaattttacatcaaaacaccatacgcacatacatacacacacatattatatgtgtatacacaactgaagtcccacaaaaacaaaccttactaaaataaagctatatcagatatgattttattaatagccaaataaacaaaaattcagaaatacaaagttccgtgaaagagttgtttacatgcactgtcaactgttctctcattcttatgttctctccctccaggattttacctcctccattccaccaacacagctcttatgagggtcaccaatgagctccacattgctaaattggtgaatacttctcagtcctcactttagttgacccattagcagcatgtgacctattggctttcacatggcccatcacccctcttcctcaaaacactgccttcatttggcttccagggcatccctcttgattttcctaactcaatgagagctcctccttagtctcctgcactgtttttcctcatatcctatctctaaccactgagagaaccccaaagttctcctctgacatcttctctatttgaatgcacttcctcagctatctcctctagttcaacagctttaaatttactaacttctacatttccatctctagcccagacctctcctctgaactatttttttattttataatatagacggggtctcactttgttgcccagtctggtcttgaactcctgggctcacatgattctcctgccttggcctcccaaagtgctgagattacaggcatgaggcattgcacctggcctggactctttattcacatccaacttctactaatgggcatctcaattttcacatgttcaaaacccaatttctttcctgccacaaaagtactccttatgcagacctccatctcattaaattctaactttatttttccagttgcataagccaaaaatctcggagttacacttgacactcctctttcatacaccacatgtaatcaatctactgaaaaatcctggtggctccacttggaaaatatactcagatccaaccaccactacccacactggctctaactagtcagcctgtttcctcccttcaaacctatggtgtattttcaacacagcaatcagaagtctctttctgtaagtcagatcatgctataccttgggttcaaaacctttccatggactcccagcttaaaaaagtaaatgctgaagaccttactatcgctgacatatggcctggcccttgactacctctcttagctccatctccttaatctctcctccttacttccactccagccacgattaactccttgttgttccccaaacatgttaaatacacttgtgtcttagggcctttctatttgttatctcccttgcctgggatactctccctctagttgtacctagaacagttgaatcatcgcataattgctaaaaggacaagtgaccatgtgacaacgttctttcatcttttatgcttgtaacaccagaatttacttgaaaaagtttgtaagtggacaagtatgaaagacagatatgtacacaaagtaacaggaaggtaaagatgatgtgaaaaatgaaaaccaatccactgaaagtcattctaattggtatttataaatgtaaaaacaaaaatgttttgctgttatgtaacaaagaatatagccatcatctatcacttcaacaaaactatgagccctaaagttttcagaagtattgcagtttggacaggtgtggtggctcatgcctaccgtccccagcactttggaaggcaggaagatcacttgaggccaggtgttcaaggccagcctgggcaacacagtgagaccctatttctacaaaaaataaaaataaattaaaaaacaaaaagtattgcattttgacaaagtgagttcatgaagaatacaaataataaggtagaacatagtagagatgcatttgaaatccaaaatccgtatttaaaggtaggtatgttccagattcatgcataatgacagctgctttcaaaggatgtaatgccttttaggtatacataaacattcaaaactgggaaaatatgggaaaaaatgtgggtctcctatatttggattctcattaaaattgctaacaaagttaattttcaccatccctttattcttctgtaaattgtttataaaatgacttgaaaaagaatgcagtcaattctcattacttgaggtagttatgttctatgaagttgccacaaacacgcaaattagtgaatactgagccattgctcctaacagaaatacagggttaggttcttgtaagcctttggtcacattttcaccaacttataaatacgtaagcttgttttatatctgtttctgtttaaagacacattatttaataaatatagacctggcatggtggctcatatctgtaatcccagcactctgggatgccaaggtgggtggatcacttgaggtcaggagttcaagactggcctacccaacatggtaaaaccccacctctactaaaaatacaaaaattatgctgggtgcagtggcgggtgcctataatcccagctactgagaagactgaggcaggagaatcgtttgaacccgggaggaggaggttgcagtgagccgagattatgccattgcactccagcctgggtgacagagtgagactccatctcaaaaaatataataataaatagtgatgactcatcatcatctaactcccactcaacagcactataactcatgactaaacaaaggttatctaacacatgtattctctaaggcacctcacagcccgcatgcaccttggaataccactatatagcacttcagcacaatgcttgggaatcactttaaacagtaaaatcacaaacagaaggcacaaaaatgtgaaaaatgtagaactatataaactgctttcgaaaaggacacttgtttataataagaaagctacacaaaaaactgagcactgttcaaccccagctgggaatatctggataaggttctcaaatttttcacctctgtgtatgtccatgaaaaaccatgaaactgccatgagtattgatgttaggttacaaataaattttagcaagtaggtgcctttacaaatacagattctacaaataaagagaattgactgtaaataaaattttataagcaaaaactctgaaaataaaaacaaatagttaaaatggtaatgggaagacgatataaacaacagaaaattaaaagttcttaaacacatgaaaaggtgctgaacttcacaataaaataaaaatgtacaaatatgagataatcatttttaactattcaattgacaaagattcaaaggtttgaataaattattggctattttgcaggaaacaaactctccatgttggtataaatatagattaatataacctctactgaaaacaatttagcaaacttttatttacaatttaaatgtaggtcgggcacggtggctcatgcctgtaatcccagcactttgggaggccaaggcgagcagatcacaaggtcaggagttcaagatcagcctggccaacatggtgaaaccccgtctctactaaaaaaatacaaaaattagccgggcatggtggcgtgtgcctgtaatcctagctactcaggaggctgaggcaggagcactgcttgaacctgggaggcggaggttgcggtgagctgagatcacgccattgcactccagcctgggcaacagagcaagactccgtatcaaaaaaaaaaaaaaaacaatttaaatgcaatagcctcttcaacacagtagttctaattctagatacttaatcctaaagatgctgactgtactattaaataacaaatgattagaaacaaattaaactctcatccacaagagctcaattcattaagcgtggtacacatctgtaagaatatcctgtaagtgcttaaaagaatgagagcttttttttaaatttttaatttttgcatttttcttattttattttattattatactttaagttttagggtacatgtgcacaatgtgcaggttagttacatatgtatacatgtgccatgctggtgtgctgcacccattaactcgtcatttagcattagatatatctcctaatgctatccctccccattccccccaccccacaacagtccccagagtgtgatgttccccttcctgtgtccatgtgttctcattgttcaattcccacctatgagtgagaacatgcggtgtttggttttttgtccttgcgatagtttactgagaatgatgatttccaatttcatccatgtccctacaaaggacatgaactcatcatttcttatggttgcacagtattccatggtgtatatgtgccatattttcttaatccagtctatcattgttggacatttgggttcgttccaagtctttgctattgtgaatagtgccgcaataaacatacgtgtgcatgtgtcttcatagcagcatgatttatagtcctttgggtatatacccagtaatgggatggctgggtcaaatggtatttctagttctagatccctgaggaatcaccacactgacttccacaatggttgaaccagtttacagaactctccaccccacatcaacagaatatacatttttttcagcaccacaccacacctattccaaaattgaccacatagttggaagtaaagctctcctcagcaaacgtaaaagaacagaaattataacaaactgtctctcagaccacagtgcaatcaaactagaactcaggaataagaaactcactcaaaaccactcaactacatggaaactgaacaacctgctcctgaatgactactgggtacataacgaaatgaaggcagaaataaagatgttctttgaaaccaacgagaacaaagacacaacataccagaatttctgggacacattcaaagcagtgtgtagagggaaatttatagcactaaatgcccacaagagaaagcaggaaagatccaaaattgacaccctaacatcacaattaaaagaactagaaaagcaagagcaaacacattcaaaagctagcagaaggcaagaaataactaaaatcagagcagagctgaaggaaatagagacacaaaaaacccttcaaaaaattaatccaggagctggtttttggaaaggatcaacaaaattgatagaccgctagcaagactaataaagaagaaaagagagaagaatcaaatagacgcaataaaaaatgataaaggggatatcaccaccgatcccacagaaatacaaactaccatcagagaatactataaacacttctacgcaaataaactagaaaatctagaagaaatggataaattcctcgacacatacaccctcccaagactaaaccaggaagaagttgaatctctaaatggaccaataacaggctctgaaattgtggcaataatcaatagcttaccaaccaaaaagagtccaggaccagatggattcacagccgaattctaccagaggtacaaggaggaactggtaccattccttctgaaattattccaatcaatagaaaaagagggaatcctccctaactcattttatgaggccagcatcatcctgataccaaagccaggcagagacacaaccaaaaaagagaattttagactaatatccttgatgaacattgatgcaaaaatcatcaataaaatactggcaaaccgaatccagcagcacatcaaaaagcttatccagcatgatcaagtgggcttcatccctgggatgcaaggctggttcaacatacgcaaatcaataaatgtaatccagcatataaacagaaccaaagacaaaaaccacatgattatctcaatagatgcagaaaaggcctttgacaaaattcaacaatccttcatgctaaaaactctcaataaatgaggtattgatgggacgtatctcaaaataataagagctatctatgacaaacccacagccaatatcatactgaatgggcaaaaactggaagcattccctttgaaaacacgcacaagacagggatgccctctctcaccactcctattcaacatagtgttggaagttctggccagggcaattaggcaggagaaagaaataacgggtattcaattaggaaaagaggaagccaaattgtccctgtttgcagattacatgattgtatatctagaaaaccccattgtctcagcccaaaatctccttaagctgataagcaacttcagcaaagtctcaggatacaaaatcaatgtacaaaaatcacaagcattcttatacagcaataacagacaaacagagagccaaatcatgagtgaactcccattcacaattgcttcaaagagaataaaatacctaggaatccaacttacaagggatgtgaaggacctcttcaaggagaactacaaaccactgctcaatgaaataaaagaggatacaaacaaatggaagaacattccatgctcatgggtaggaagaatcaatatcgtgaaaatggccatactgcccaaggtaatttacagattcaatgccatccccatcaagctaccaatgactttcttacagaattggaaaaaactactttaaagttcatatggaaccaaaaaaaagcccgcatcgccaagtcaatcctaagccaaaagaacaaagctggaggcatcacgctacctgacttcaaactatactacaaggctacagtgaccaaaacagcatggtactggtaccaaaacagagatatagaccaatggaacagaacagagctctcagaaataacgccgcatatctacaactatctgatctttgacaaacctgagaaaaacaagcaatggggaaaggattccctatttaataaatggtgctgggaaactggctagccatatgtagaaagctgaaactggatcccttccttacaccttatacaaaaattaattcaagatggattaaagacttaaatgttagacctaaaaccataaaaaccctagaagaaaacctaggcattaccattcaggacataggcatgggcaaggacttcatgtctaaaacaccaaaagcaacggcaacaaaagccaaaactgggatctaattaaactaaagagcttctgcacagcaaaagaaactaccatcagagtgaacaggcaacctacaaaatgggagaaaatttttgcaatctactcatctgacaaagggctaatatccagaatctacaacgaactcaaacaaatttacaagaaaaaaacagacaaccccatcaaaaagtgggcgaaggacatgaacagacacttctcaaaagaagacatttatgcagctaaaaaacacatgaaaaaatgctcaccatcactggccatcagagaaatgcaaatcaaaaccacaataagataccatctcacaccagttagaatggcaatcattaaaaagtcaggaaacaacgggtgctggagaggatgtggagaaataggaagaatgagagttttaaatactgatatggtgtgttctccaagatatattgacagaaaagcacttatctattgaagaacattatatgaattacctctaaagataaaaaattttaaaagttcaaaaagggtaatgatgatatatcatgacagaacttaattactttttttctttttgagacagtcactgagtcacccaggctggagtgtagtggcatgatcttggctcactgcaacctccgcctcctgggttcaagtgattctcatgcttcagcctctccagtagctgggattacaggcgcccaccaccatgccgagctaattttttttttgtatttttagtagagatggggtttcaccatgttgggccaggctggtctcgaactaccgacctcaggtgatccacccacctcagcctctcaaagtgctaggattacaggtatgagccaccatgcctggccttaattacatgttttttaaaaattcacaataaatgtatacacaaacattttaaaaaacacaaaagggtacactgtgaaaagtgtacagaagggctgggcatggtgattcatgcctgtaatcctagcactttgggagcccgaggtgggagaatggcttgaacccaggaactcgagaccagcttgggcaacatagatcatgtcactaccaaaaaaaaaaaaaagtgtacagaagcagagttgctcttgttttttgtttgttgctttggtttggtttttttttttgagacagggtctcagtctgttgcccaggctgaagtgcaatggtgtgaacatggctcattatacagcctcaacctcctgtactcaagtgatccttttgcctcagcctctccagtagctgggactacaggcatgcaccaccatgccttgctaattctttcattttttgtagagtcaggggttttgcgttgttgcttatgctggtcttgaactcctgggctcaagtgatccgcctgtctcgtcctcccaaaatgctgggattacaggtgtaagccaccgtgcctggcccagagttgctcttagtaacgtgttttttttttttttttttttttgagacggagtctcgctttttagcccaggcttgagtacagtggcacaatctcggctcaccacaacctccacctcccgggttcaagcaattctcctgcctcagcctcccaagtagctgggactacaggcgcgtgccaccatgccgggctaatttttgtatttttagtagagacagggttttactatgttggccaggctggtctggaactcctgatctcaggtgatccacccgcctcggcctcccaaagtgctgggattacaggtgtgagctgccgcgcccagctgctcttagtaacttctggaatttgatgtctaaattgaatccattatttcaaacatcacaagacttaagttcataaaaacttttttaaaaagttaactctgggtcaggcgtagtggctcaagcttgtaatcccagcactttgggaggccgaggcaggtggattacctggggtcaggagttccagaccagcctggccaacgtggcgaaaccacgtctctactactaaaaatacaaaaattagccaggcatagtggcacatgcctgtagtcccagctgctcgggaggctgaggcaggagaattgcttgaacctgggaggcagaggttgcagtgagctgaaattgcgccactgcactccagcttgggtgagagttagactgtatcaaaaacaaaaagaaattaactctgtagtttatttctgttaatggcaaccctgcagaaaagttaaacttagaatatgtctcaaagtaatctctgtctgatcccttaatgaaggatctcttcaaacacagcaacttttgtctgtcttctgaatgtaggtacagctgtggctgtagaacagaccatgtaattttcatctagattccttacaaccacaaggacaattattacaatgaaagccagagaactagctcagttttgattttattactaggataaatccagccaggtagtgtggtggctttgatgttttctgtctatatctaagggggaagctgcttcattattcgatattaagataaatagggcctaaaaatagtcctaggtcaaacaccattatgattaactcaactttcaaaaccatttacctaatgtaggatttgttaataagtcttcttcaaaattagcaagaaatacaactaatgcctaacccgtcatgatgaattaaagactgatccaaaaataactgacagttctcttccagttgccctcttctttgacaatcccaccagtctatgctctaagctcacgcttgacttccaaaaactgccagatattgtagacaccatgaagaataagatgtactaccttttctctaatgaaagaggaaatacagatataaacaatatataaacataatataatgtgaaaagctatgtatagaaataaatagagaggccgtgtgcggtggctcacggctgtaatcccagcactttgggaggccagggtggtcgaatcacttgagggcaggagtttgagaccagcctggccaacatggtgaaactccatctctactaaaaatacaaaacttagtggggcatggtgccacatgcctgtaatcccaactactcacgtggctgaggcacgagaaccgcttgaacccggatagcagaggttgcagtgagctgagattgcaccactgcactccagcgtgggcagcagagcgagactctgtctcaaaaacaaacaaaaataagaatatgtaaagacatgaaaaatgtgacattaagtgggaatacacatgcacatacacaaaatgctatggtggcatccatatcaaaatatgggccaaagggcaaaataatatgcaaaaaagaaatacaatcacagatacagctaatttaaaaaaaaattaaatatttttattatatacttttaaacatatagaagatagaaaaaaacagtacaatgaacagccatgtccaccagttagattctgtaacattttgccacatacgcctcacatacattttgttaaaccatttgaaacattttaagacactctaacacttcattcctaaatgcttaagtatgcaaattaagacagtcttttataaactacaacacccttctcacagctcataaaattaccaataattatccaatatcattcaaaatctaatccacattcaaattttctcaactgcctcaccaccgtgctggcctcccacccccaccccagtcttttacagatggtttttcaaaatagagtccagtaaaatatttcacattgcatttggttattacataacttttaatcaagaagagttacccattccacttccttttttctttcccaacacttgatattttgaagaaatgaggccagttatcttctataacgcttcacattccagatctgtctgatcgtttctttagtggtgtcatttagtgctgctctatgccagcatttcctgcaaatgagaaattagaaccagaggcttgacgaattccagttaaaccatgtcctctgtggacaccagttaaacttgactagagcacttcatatgtcagagtgtacagtgcagtatgcctaggttatcccatatcacaataaaaaaaagtctgctggtctgcctactagtgatataaaatggcatcatatcctaaagctctttattgtgaaagtatgtttcttccacataaccaaccagttaagtatgagaattctagtagggatgtagattaaccttttatctaatagttttggcatcaaaattctttaatattgattgttttacattaacctttcaactttttaacatctgaactttttaaatgttcaaaaacatttgttttccacaaaccataaagttttacaaaagtaagattcactttcataatgctggcagacttactccttaatttaaggaatgtgagcaccttccttctttttgattttgtctgaaaccctgtaaggaaaataaaggaagttaaaaaaaatagctatatagacatagatagctatatatagatagctttatatggatgttaaaaagcattttgtttcacaagacattttacttattttattcaacaaaatatgatcagaaattaagttgatagtcttttaatgtactttaaaagttatcccaaagaaaacaattattaggctgcagttaaggttttcttgcagtggctcatgcctacaatcccacaactttgggaggcggaggtagggggatcacttgagacctggagcttgacaccaccctgggcaacataatgagaccctgtctctacaaaaaatttaaaaattaggccggcgtggtggctcaggctaggcacagtggctcacgcctgtaatcccagcactttgggaggccgagacagttggatcacctgagctcaggagttcgagaacagcctggccaacatggcaaaaccccatttctactgaaagtacaaaaaattagccaggcatggtggtggggacctctaatcccagctacttgggaggctgaggcaggagaatcacttgaacccaggaggcggaggctgcagtgagctgagatttacaccactgcactccagcctgggtgacagagcaagactctgtctcaaaaaaaaataaataaataaaaataaaaattagccaggtgcagtggcattatcactgtagtcccagctactcgggaaactgaggtgagaggactgcttgagccctggaggtcaaggctgcagtgagctgtgaatgtgcccttgcactccagcctgagcaatagagtgagacctggtctctaaaaaataaaatttaaatttaaaaaatttaaaaacattgccggtcacagtggctcatgcctgtaatgccttgcacttttggaggccaaggcgggcggatcacctgaggtcggatttggagaacagcctgaccaacatggagaaaccccgactctactaaaaatacaagactaggccgggcacagtggctcacgcctataatcccagcacttggggaggctgaggcgggtggatcaaaaggtcaggagatcgagaccatcctggctaacacagtgaaaccccatctctactaaaaacacaaaaaaattagccgggtgtggtggcgggcacctgtagtcccagctactcgggaggctgaggcaagagaatggtgtgaacctgggaggcagagcttgcagtgagccaagatcgcgccgctgcactccagcttgggggacagagcaagacaccctctcaaaaaaaaaaaacaaaaaacaaaacaaaacacaaaactggctgggcgtggtggcatatggctgtaatcacagctactcgggaagctgaggcaggagaatcacttgaacccaggaggcggaggttgcagtgagccgagattgcaccattgcaccccagcctgggcgacagggcaaaactccatcttaaaaaataaataaactaattaatttaaaaaaatatttttcttccttttttttttgagacggagtttcgctcttgttgcccaggctggagtgcaatggtgcaatcttggctcaccgcaacctccgccttctcagttcaagcaactctcctgcctcagcctcccaagtagctgggattacagcatgcgccaccatgcccggctagttttgtatttttagtagagacagggtttctccatgttggtcaggctgatctggaactcccgacttcaggtgattcacccgccttggcctcccaaagtgttgggattaccggcgtgagccactgcgcccagctgatttttcttctttcagtatgtccaatgatgttcctgagcccgcttataccttatttttttttttttgagatggagttttgctcttattgcccaggctggagtgcaatgaggtgatctcggctcaccgcaacctccacctcccaggttcaagcaattctcctgcctcagcctcctgagtagctgggattacaggcatgcaccaccacgcccgcctaattttgtattttttttagtagagacggggtttctccatgttgaggctagtctctaactcccgacctcaggtgatccgcctgcctcggcctcccaaagtgctgggattacaggtgtgagccaccgtgcccggcctataccttattttcatcaaataaaatatatgaccttaaactacctgtgtcatacttattaaaatgagaccattaaacaccagtattcactaaataaaaaaaaaatttaaagtcaaaaattaatactaaaacatttgtttttcttgtcagatctagcccaaatgtcctctgtctctcttctggcttcaatgctttctatctttccctacatgtatactagcttgcagtggcttcccacttcattactaatctacacctaacagaccgtaagatgtattgaaagatttgttactaatgagtatcaaagttataacctattttatgttatttcaacaacattattcttagtcatttgcattctgcttagatttctaagacaaaaagatagaggttaaaagctagactcagagcctatctcaaccacgtggcttcagtagaacaaaggttaagaattgttagcttaaggcaatgacgtattaaaaacacttaaggccaggtgcagtggctcacgcctgtaatcccagcactttgggaggcctaggcaggcagatcacgaggtcaggagatcgagaccatcctggctaacacggtgaaaccccatctctactaaaaatacaaaaaattagccgtgcatggtggcacacgcctgtagtcccagctacttgtcgggctgaggcaggagaatggtgttgaacccgggaagcagagcttgcagtaagccaagatcatgccactgcactccagcttaggagacagagcaagactgtctcaaaaacaaaaacaaaacaaaaaaaacccaaaaaaccaaaaaaacaaaaagaacacaaacgaatgttcatagcaacattattcattatagcccaaaaataaaaacaacctaaatgtccatgaactgatgaatggataaaatgtgatataaccaaacaacagaatattcagcaataagaaggaatgcagtactggtgcattctacagcatggatgaatcttgaaaatagcatgctaagtgaaagaagccagacacaaaagaccacatatcgtataattccgtttatatataatatctaaaatagacaaattcatagagacagaaagtgtactgactgcctagggctggggaaaatgaaggtaacagggtttctttttggggtgatgaaaatgttcttaaattgtagtgatggttgcataactgaaaaccaaaaccactgacttgtatactttcttttttattttattttttgagacagagtctcgctctgtcgcccaggctggagtgcactggcacaatctcggctcactgcaagctccacctcctgggttcacgccactctcctgcctcagcctcccgagcagctgggacaaaaggtgcccgccaacatgcccggctaatttgtttttgtacttttagtagagacggggtttcaccatgttagccaggatggtctcgatctcctgacctcgtgatccacctgccttggcctcccaaagtgctgggattacaggcgtgagccattgtgcccagccaacttgtatactttcaaaggtaaactgcacaccatgtgaattatttctcaagaaagttatttagaacataaattataccaatactttatatatacattatgtatttttttcaaatatttcataatttaaaaaacacaaaagcctacagtgttacagtcagataactgatctcaaaacaaattacaagctgttgatttattactttttggtcattaaaatgaggaattcatgatacatacaatataccaaggttatactacaacaactgaagcgtgacttttttttccctccgcaaattctcactctgttggccaggctagagtgcagcggtgtgatctcggctcactgcaacctctgcctcccaggttcaagtgattctcctgcctcaacctctcaagtagctgggattacaactgcccgccactgggctaagttttgtgtatttagtagaaatggagtagtcaccatgttggccaggctggtcctgaactcctaacctcaagtgatccacctgcctctacctcccaaagtactgggattataggtgtgagccaccgtgccaggcctttttctttttttgagatggaatctcactctgtcaccaagggtggatgcagtggcacaatctcaactcactgcaacctctgcctcccagattaaagcaattttcctgccacagcctcccaagtagctcggattacaggcatgtgccaccatgcctggctaaattttttttggtatttttagtagagacaaggtttcatcatgttggccaggctggtctcaaactcctgacctcaagtgatctgcctgcctcggcctcacaaactgttgggattacagttgtaagccaccatgtctggccttaacttttaaataagaatattaatgggggcacacacagatgatacatttaaaaacatacacctttaagtcagttgtttcttctatattaatttactaaaaatacaagtgcctacaatatcacatcataattttagcagggcacaagagcttacttttaaaaataattttaggccgggcgcggtggctcacgcttgtaatcccagcactttgggaggccgaggcgggtggatcacgaggtcaggagatcgagaccacggtgaaaccccgtctctactaaaaataaaaaaaaattagccgggcgtggtggcgggcgcctgtagtcccagctactcggagaggctgaggcaggagaatggcgtgaacccgggaggcggagcttgcagtgagccgagactgcgccactgtactccagcctgggtgacagagcgagactccgtctcaaaaaaaaaaaaaaaataaaataaaataaaataattttaaatgttctgactaaaatacaatagaacatgtccgtaggagactaacgtataaagtgacaagtttgaagccatactccccaaggttcaatgtggtacacattaccccagatctttgtgcattaaaaaaatttcatttctcttggaaggccgaggcgggtggatcacggggtcaggagattgagaccatcctggctaacacagtgaaaccctgtctttacaaaaaaatacaaaaaattagacaggcgtggtggcaggcacctgtagtcccagctacctctgaggctgaggcaggagaatggcgtgaatccagaaggcagagcttgctgtgagccaagatcacgccattgcactccagcctgggcaacagagcaagactccgtctcaaaaaaaaaaaaaaaaaaaaaagaatttcatttttcatttatgaaaaattatcccatcttttccattccctacaatcaatttcaaatcagagattaaaacattatttagaaaaagtataatttcaattcaaaagtgtataatcaaaataatctaacaatagcatgaaagctttttaaaattaactaaaattatacttagggacaatgcaagagtaatttaagcctcagacagttgtatttttttatttttattttttagtaatataaagagagaagcaagtagtattttataaatttacaaaacaaagtcacataactacaaaaaaattgtcaggaaaagatgctgagtgattacttaccatataatagccagtatgatagccactcatgtaccatgaaattaacatacttcccaaagcatcagcatcatcaagagaatctggacatatgggaggtggtgggggaattatctggagacagaaaaagatattgtttatatccagtaaacaaaaaagtaaagtctggagatttatattatatagtgaatgctggaaattaattgtatttttgcttatataatctcctacttaaatttcttttttttcccctaaacaaagacgaggtcttgctatgttgcccagactggtctcaaactcctgagctcaagtgatcctcctgcctcagccttctaaaatgccgggattacaggcatgagccactgtacctggccttaaatttcttaacatagctagcatttggagaaaaccaaccaataacaacaaaagaccaacaaaattaaatttaacgaggacgaaaagacagcaagtgacataaaaagtttaaacattttgatttagactatgtatctgttccactatgaagctatgagtaaaaaaaaaaaatcaagcataaatactttcatgcttttccttaatacacacacacacacacacacacacacacagctcacatagcatttcgagggcgattttaagtaaatgtcttgggtagaacacctgttctaaccccatcccaatacacagtatgccaaaaagtatctttttatctattgttaatacctaaaaatctaccattagaaatccagtttacagctgggtgcggcagctcacgcctgtaatcccagcgctttgggaggccaaggcgggtggatcacctgaggtcaggagttcaagatcagtctggccaacatggtgaaaccccatctctactaataaaacaaaaattagccgggtgtggtggcagtcgcctgtaatcccagctacttgggaggccgaggcagaattgcttgaacccaggaggcggaggttgctgtgagctgagatcacaccactgcactccagcctggggtacaagggcaaaactctgcctccaaaacaaaaaaaaaaaaagagagagaaagaaaaagaaatccagtttacatcagaagctaacatccaactatacctagaagggcaaacactaattccttatataaggtataattaaatcccttctaacaggaactacctccttatggcatagacaccaacttctgccaggaaagaaggcaacctagagcttagacttgggactacaagagcactgcatctgggtaacagaaaggcattaaaaacaaacaaaacccagaggtttagttcaaatttctacccattagaatctggcccaagggatgttctacaatgacattttacaatcctctattctgctaattatcaaattgtatgtgaaagcaaaatctaacctatactcttttttacttactggtggtccagaaggaaatggaggcagccagcatgatagtaagtggggtggtggtggtggcggtggcggtggtgggccattgaattttagacctggctataaggaatatttcaaaggaaaattaacttaccaatttcaatatgataggaataaaaaggactcaaaaccaaaaggataaaaataattacccagaatattgttttatacatatcaaaaagattaagtgaatttcatgtaccaaatcctgaagtcaaacagactcataagtcaaatgacaacttctggatttttctcatttcctttctatgtagacataaggaagtaaaacaaaataagagtggtgattacctaataaatcagagacagtctatttagcaaaattatttcaatcataaaagactatatcccaaatttcattaactaaattgtatatttttatgaaagcctgtttagctatacatgccaacttagaggacatattgtgaaaactagcaaatctctccttataaaaatcagccccctgagaccaatgaagcatgatgtatatatcctaagagggtacatcattttagattcaagaaactgtaatataatgtaagcctcaataagaacattatcacagaaaatcttaaaacttttggtgagtcatgcttgttttttgaaaatgactgcctaggctaggcgcctgtaatcctagcactttggaaggccaaggtggggagatcacttgaggtcaggagttcaagaccagcctggccaacatggtgaaaccccatctctactaaaaatacaaaataagccgggtgtggtggcgggtgcctgtaatctcagctacttgggaggctgaagcaggagaatcacttgaacccaggaggtggaagttgcagtgagctgaaatggtgccactgcactccagcctgagcgacagagcaagactccatctcgaaaaaaaaaaaaaattgcctaaataccattccctccatggaagaaatcaccgctttacacaaaagaactagaaagggacaagccttaaggttccatgacataatctaacctataataaaaatctttttagagttgatttctgttacttataaccaaaaggaccataaatgaaaacaatatttacatttgaactctacaaaacaatctgagaacgcctcaagattttatctatattagatgtaaataatgtgttcttattttacatatcttatacaggtgacatgggaaacaacagcatatcatccagctaatgataaattattattacacttttttttgttttgttttgtttttttgtttgagatggagtctcattctgtcgcccaggttggagtgcagtggcacgatcttgactcactgcaagctctgcctccggggttcacaccatcctcctgcctcagcctcccgagtagctgggactacaggtgcccgccatcacgcccggcaaatttttttgtattttcagtagagatggggtttcaccgtgttagccaggatggtctcgatctcctgaccttgtgatccgcccaccttggcctcccaaagtgctgggattacaggcgtgagctaccgcgtccggcgcattattatactttctaacttaagtaagtgtgctaattattagtctaatacctaatactccacaaaagttaactggataaatctttcatataaagtattttgttgcatccactgcagtgtctaacatttttttaaaaaattaactattttgcatcattatcttatttccttttcaaaaaattcttgtgtatttaagctacaaaagtttcatgggagagctacaaattagttaacagagaggttaaatgtcccgacattaactattttctggaaaactttcatagaaggtttacctttcctggtcccagtcttggccctggcatggggggtggtggagggagaaaagagttccatggagcagatttgggcttgatgttatctgatttatttccaggagacctggagttctcactttcatctgttgaaacttggctttcattttcattctttaaaaagaaaaaatatgcaggtttttgttataagggtgtgattaagaaaaaattaatgcctcggtggatcaaactgacaactgtgtatactgtttaacagtttctcatctagtctctgcttccagaaattgaatttttttttttttgtatccttacctcttgagcattttgttctatattattagctacttcacagattggggaaagtagatcggacagattttgctcctctctatttccatatccagtgtaaaccacaacacaggtttctctcttaaaatcaattgaagcaatggtagctgggtaaatgcaaccgtcttctgaccaaatggcagaacatttgtccccaactttccactacaaaagaaatcaaagatatatacatgcacacatttcttttgaagagggcaaactatcatctcgttttgatcagtggggaggtgaaggatagagggtagagatttggaaggcaaaatgatgtaatgagaaaggcttggggtctaaatacataaatctgaattccaactctcttacatttataatcatggacaagtttctgaatctctttgagtcttagtttccccatcttattagatggctataatataaactacctcccatatttgttgtgaatagcgggagggagataaaatgcgtatggtgcccagcactctggactggcctagagcaagtgctcatcaactgttagctctcttcccccttggtaatgatgaaactaaagttggctcaaaagacaccaaaatattcagctttcaggactactgcttttaactagcagaaataatctacctagacttctgggttccttggaattaacagttttagagtttttaaagaaaaaggggaaaaaaaaatctatctctcagcttaagatgtaaaacactgccaattcagcttacggctcttgggtactccttccaaacggcaccttctccctgccttccattcacaaatggaacacatgtcctgattttagcatttatcattcccatctaattctttatactttcatgactaatatgcatgttcctaaataacagaaaatttaatagttgtttttgaagttgtataagtatatgtcaatagaaacactgtactaatcacttaagttaaagacattttacactattaaataaggactaatgagacatcctttgaagttaaatctcaacattttaaaataacctgttgtaaggaagctgcagtattcttcttttggcttttattcttcttagcaggttttcttttaggtgtggtttttggtttacccgaagtttcacaaatgtcaccattctttagagcatgctacgaaaataggaataaaaatgtacatgttacagggtggtgcacagaataaaagtcacgacataacccagttactactataagctagtctcaaggctccgtcacctcagaaagcacctattttctcttttgaccaccccctgcactataaaaactgctcttaaaggcatcatacacctgacatcagctctaaagacccttttaatcaaatctccttgctctcaacctctctgtaacattagaccctgttaattatctttcttcctgatattcatggccctttggatgtcatagcaatgtagggccccaacggtttcattacttctgatcaagccttagatttaggcattcccaataagagctggccatccttctttacttgcttacggccattattttatttattttatttttttacacagagtctcactctgtcaccgggctggagtgcagtcacactgatctcagctcactgcaacctccacctcccaggttcaagcgattctcctgtctcagcctcccgagtagctgggattacaggcgtgcaccactgtgcacagctaatttttgtatttttaataaagacggggtttcaccatgtgggccaggctggtcttgaactcctgacctcgtgatttgctcgcctcagcctcccaaagtactgggattacaggcgtgagccaccgcgcccggccaaggccatctattcttattactttagttgcaactgtctgcaaacacacttctgaagctattaatccagctgtgacttttctcaatctaacatttccaatgatcaatttcacatcttaattcatacctcaaactcaacctcaacttaattcatattcaacctcaacttaattcaaattcaatctcaacttaattcatactcaaactcactactaaaactatcgttttcccaaatcagttcttttcctcctttactcagattacttctccctgcaatatcaccaacccatcccacatcgagccccatttcaatctctattttatagaattctcttggtaattctttagtcgacttctagtttcagtgtatactggaaagcacatttaaaaatctaggccgggtgcagtggttcatgcttgtaatcccagcactttggaaggtcaaggcggagggatcttttgagctcaggagttccaggccagcgtgggcaacagggtgagactgcatctctacaaagaatacaaaaatgagctgggtgtggtggcacacacctgtggtcccaactactcaggaagctgaggtaggaggattgtttgagctcatgagttgaaggctccaatgaggcatgatcacgccactacactccagcctgggtgacagggcaagaccccatctcaaaaaaaaaaaaaaatctagaaatcagttacaaaggtgacatagaggtctgatctttagctcatgttacaagagtaactatgagaaagacatgaaatctgtatgcttggtgctctttatacactgtatgagtatatgctctgtttgctcaaggtagtctggactattgtttgctcaaggtagtctggactattgatgacccatatttagtgctcagtaagactaaacatctcagagaatggagaaggtgatgatgttggccaactgtgtaagtgtcctgtttgagacacagaaccatactacatttcctaaaagactgtatattcctacccaataggaacacttgaattgatacccaacttacaggatttgggatgattagagtaatttaatatatgaaacgcacacagagcactgtcagcatgctacaaatattaattgctgtactaatgctatttatcttcatcattattttactacatgcttgttaaatgtttaaaattataattcagattgtctttttcttattaatctcaattagaggacttccatagtttgatacaatgtaaaaatactaaaaggaatacattgtttgttcgttttctgagatggagtctcactctatcgcccaggctggagtgcagtggtgcaatcattgcaacctctgccccccaggttcaagcaattctcctgcctcagtgtcccaagcagctgggattacaggcacgtgccaccatgcttggctaatttttgtatttttagtaaagacggggtttcaccatgttggccaggctggtctcaaactcctgacctcaggtgatccacccgcctcagcctctcaaagtgctgggattacaggagtgagccaccatacccagccaggaataaatgttttaaattttatttaaattgcctccacaaaggatgacatatataggctatcaacttctaaaggaggatatcacctgatttaactaactcatactaccatctaatcttcaaaatgaaaactgaataacatgtactttaacactttatcgtatgttatcaattcctttccaaatgaataacgagaaaataagaaaacgactaagcaagcatttcataccttaaatgaagccacagctttatcatatgcttttatcagtgctgtatcatcccaaatgtcagaatcatcgctctggaaagggtaagaaataaaaacaactcatgttcagataggtttaatcagaaaatgtatgttagtaccaagagtcatcttaatccacacataacaaaattacactgaaaatgagtatttaaaatcctaaataaagccacaggaaacttacctggttagaggttatgtgactttactccaaaagctagacataggtaaatgttctaagaatgaatgccatcaagtgaatgcccctacaatttaattcctatccacataccatgagtagatttgttcaaggccagctatatttatttcaattaagatcagataaaacttgacttcatctagactacgggaatgctgttctgacctcagaacctatgatccaaagaatattttttcttttgaaattataatgtttccagattataaggatacaaattgttaatagtgactaaccaattttcattttattattattattatttttttacttccatttccctttcctgctttcctggtaccaattttctttccttccttttcttttcctttctttcgtttctttcttctctccctccctccttcctttcttccttccttcacttctctttctctcttctttttttctcccctcaaattcctgtgttcaaatgaccctcccacctcagcccactgagtagttgggaatataggtgcatgccaccatgcctggctagtttttaaaattttttgtagggacggggtctcgccatcttagccaagctggtcttgaactcctaggctcaagtgatcctccagcctcgctcggcctcccaagtgtgggaattacaggcatgagccactgcacctggaaatatttttgtccagacatggtggctcatgcctgtaatcccagctacttgggaagctgaggcaggagaattacatgagcccagttgttggaggctgcagtaagctatgatcatcccattgccctctagcctgggtgacagaggaagaccctgtctaacaacaacaacaacaataacaaaataataataataataaataattttttagcactatctgctagcactgtgcaagtcactgagagatatatagaaacatggtactctccagttattatctaactagggatttaagactatcacacaagacaaaacaaaaaacaatataaaacaaatcttaacaaacatcaaaatgtgaaatacaaacagtattttaattaaaaaggaaagaaattaatgtctactgcaagatcatatggaggaaaccggcctaagaaataaaaaccactcacgcctgtaatcccagcactttgggtggccgaggtgggtggatcacgaggtcaggagttcgagaccagcctggccaacatggtgaaaccctgtctctactaaaaatacaaaaattagccggacatagtagcacatgcctgtaatcccagctacttgggaggctgaggcaggagaatcacttgaacctgggaggcagaggtggcagtgagccaagatcgcgccactgcactacagcctgagagacatagcgagactctgtctcaaaaaacaaacaaaacaaaacaaaacaaaataaaacaaaacaaaacaacaggatttaggccgggcatggtggcttgtaatcccagcattttgggaggccaaggcaggtgaattgcttgagtccaggacttccagaccagcctaggcaacagggtaagaaccttgtgtctactaaaaatacaaaaattctggccgggcgtggtggctcatgcctgtaattccagcactttgggaggcagaagcaggcagatcacgaggtcaggagttcgagaccagcatggccaacaaggtgaaaccccatctctactaaaactacaaaacttagctggcgtggtggcagtcacctgtaatcccagctgcttgggaggctgaggcaggagaatcacttgaacccgggcggcagagattgcagtgagctgagattgtgccactgcactccagcctgggtgacagagtgagactctgtctcaaaaacaaacaaacaaaaaaaccaaatttagctgggcatggtggcacatgcctatagtcccagctacctgcaggggctgaggcgagaggatcacctgggcccaggaagttgaggatgcagtgagtggagatggcgccgctgcactccagcctgggtaacaaattgagaccttgtctgggaaaaaaaaacaaaaaaaaacaaaaaaaacccccaaaaaaaaaaaaaacccaacaggatgtgcataggtagacaaaatagaacgcattccaagtaagagcatgaacaacaacaaaaaaggcatggaagcaaaaataacactaactataagaatttatttatgtaaggtaactaagtagtcaaatttatagaattagaaagaatgggccaggcgcagtggctcacgcctgtaatcccagcactttgggaggccgaggtgggcagatcacctgaggtcaggagttcgagaccagcctcaacatggagaaaccccttctctactaaaaatacaaaattagccgggcgtggtggtgcatgactgtaatcccagctactcgggaggctgaggtagaattgcttgaacctgggaggcggagttgtggtgagttcgagattgcaccattgcactccagcctgggcaaacaggagtaaaactccatctcaaaaaaaaaaaaaaaagaatgatgattaccaagggctaagtgtaaggagaaatgggaatttgctaatgggtagagtttcaggttgcaagacgaaaaacttccgaagatctattgcgcaacaacatgaacatacttaatattactgaactatatacttaaaaatggttaaaatgacaaatttttttacttcaataaaaaataaaacacactgtatgagggattagtgagacaagtccaaatagaatccaatttatactatagggtagagttggatttggtatactagagagtattttggatttggtatagtattagtcaatgaattccaaaaaagtttgttataaaattcactgagttgtaatattactttttgtcattttcctgttttttttttgttttgttttgttttctcttgagacaagagtctcgctatgccacccaggctggagtgcagtggcatgatctcggctcactgcaacctctgccgcccaggttcaagtgattctcctgcctcagtctctcaaatagctgggattataggcgcccaccatcaagctgggctaatttttgtatttttagtagacatgggctttcatcatcttggcaaaactggtctcgaactcctgacctcaagtgatcctcccacctcagcctcccaaagtgctgggattacaggcatgagccaccgcacccaggcttgtcattttcctgttaatctccgttatatagagacaaatgtattccaatataaaatgtcaatcttgctgtatgataaaaagtacttaataatcccagcctgggcaacatggcaaaaccccatctctacaaaaagtacaaaaattagctgggcgtggtggttcacatctgtagtcccagctacccagaaggctaaggtgggagggccgcttgaaccagggaagaggagattgcagtgagtggagatcagagatcgtgccactgcactccagccagggtgacagtgagaccctgtctcaaaaaaaaaaagtacttaagatcattaagtcactttgcagataagaaaagtaatcacaaagaggttaactgacttaaggttacattcgcacttggaagggaagatattccttggagatttggtaaaaggaataaaaacaggctgggtccagtggctcacacctataatctctgtctcgaaagaaaaaaaggggggtaggggggaggctgggcacggcagctcattcctgtaatcccagcactttgggatgcagaggtgggtggggtgggtggatcacttgacatcaggagtttgagaccagcctgccaatgtggcaaaaccccgtctctattaaaaatacaaaacttagccgggcatggtggtgcacacctgtagtcccagatacttgggaggctgaggcaggagaattgctggaacccgggaggcagaggttgcaatgagccaagatcactgcactccagcctgagtgacagagtgagactccatctcaaaaaaaaaggaagcaaacagtagaaaatgaagggtggtcctgaagaaataaagaaatcacaaaatcaaggccagtgatatcaatagaagagtgcagtcttaaagcaagatacatagacagatggcagctcaaactcctcatatctcaactgttattgccagaccaggaaacaagtaatttcaaaacgaacagaaaacaaagcgacagaagaaaaggtaatactgattacaaggtacccaaggacaaatacatctgactgaaaatctaaggagcaccaaagcaaagccatgaaaaagaaccaaaggaacaaaaataaataagaagcaaaatggttgatacattggcaaacagtatttatttaacgtatgtataaatggggtccctgaagaataaaaacaaaacaaaacaaacaatcttcctggtggtctagtgattaggaatttaaaaaaaagaaaaattcctagggatgggaggaagaaccccctcccatcctcagagagcctctaagcaaaaagactaagttacaaaataaagaaaatcagttatcattagactttctcatagaaatttatggggaaaaagtatgagccaagaattttatatgcagcctagctgtccttgaagtagcaagactaagaaaagtctaaaatgtagaagaataccgtactcactagcctttccagggtaatctattgaaaatacgcttcatccaaccaagatatgaccagggaaacttgggttttaaaaataacagaactggccaggcatggtggttcacgcctgtaatcccaacactttgggaggccgaggtgggtggatcacctgaggtcaggagttcaagaccagcctgatcaacatggtgaaaccccgtctctactaaaaatacaaaattagccgggcgtggtggcgcatgcctgtaatcccagctactcgggaggctgaggcagaagaattgcttgaacctgggaggtggaggttgtggtgagccaagatcgcgccactgcactccagcctgggcaacaagagcgaaactcttgtctcaaaaaaaaaaaacgaaaaacataaaacagaattgttagcatcaaatatatttaattgtggatctaagaggaaagtagtgtattaaattgaaaagctgattctaaaatttatatggaactactaaggacaaaaataaaccaaagctggacaatttacattatctaactttaagactgtaaaccagaagtagctaagacaggtttcaatcaatttagaaagtttattttgccaaagttaaagacgctcctatgacacagccacaggaggtcctgatgacatgtccccaaggtggtggggtacagctttgttttatacattttagggagacatgaggcatcaatcaatatatgtaagatgtacatgagttctgtcaggaaaggcaggacaactcaaagtgggggtagggaggtttctaggtcataggaagatttaaagattttctaattggcaactagttgaaagagttattatcaacagaaaggaatgtttgggttaccataaggggttgtggagaccaaggttttatcatgcagatgaagctcccaggtagcaggcttcagagagggtaggttgtaaatgtttcttttcagactttaagagtctgttctatcagtaattccaaaaggtagtagggtgtgatgagacatgtccaactcccccttcccatcatggcttgaactagtttttcaggttaattttggaatgcccttggctgagaggatgggtccattcagttggttgtgcaggggcggggggggcctataattttatttttggtttacaagacataccctgaagcaatagtaattaaaagtgtagtactgacatcaatatacactaatagacaatgtaacagaattgagagtcagaaatagccctgtgatatatgtgactgattttaactaaagttacaaatgtggtttaatagagaaagcatagtagtttcaagaaatggtggtaaaactattggaaatccttatgcaaaaacaaaccaaatttccacctacactgagccacatataagaattaatacaaaatggattacagacctaagtgtaaaactaaaactctaaactgtgtaaaaaaaaaaaagagagaaaaatctgtgatcatggattgcctataacaaaagaacaaactgaaatggccttgttgcctggggtggcacccgaggttcttggtctcacgctgaggaaatcaaggacgctgacacaccaagggtgtgaggctagagcagaagtttaataggcaaaagaaagagactagctctctcctgcagagagaggtcctgaaaagagttcccattccacagtgaaatgcaagcatttttataaatgagctaatgggaagggggtagcttatctacacatagggagcaaaaaaccagttaggaccaggtgttgccatctgcacagagcgtgaatctctggcatcccccaccccaaccttttattatgcaggcaggtccttggcctgagctactccacattgcttatctctttcctattgtgcatgtgctaaataaggggaggtggagccaccatggtggacatgcctggccccaggtacccctttctctccgtgcagctgcaggcaaccccaacaactcacaacatgcaagcttccagcttccttatctgagtatgtactaaggtccactgtgtttacttcacatactgtgtttacttcacatacccaccttacgtatgtgaagcttgctgattacccaggaagctccccctctgtgccagagctgcttccttatacatgtttacagcccgatcttccaggctgctccttgttagaagagaagtgatttcttgggctgctttttgttagaagggaagttctaccgaggactctgtctaactatcggcttacctagtctttttttacctcctctctcaaaaccatcaaagaaaaaactgaaaaattagatttcagcaaaattaagattttctgttcttaaaaagacgttgttaacaaaatgaaaaaccaaagtgtaaaccgggagaaaatacatgcaagttacctatctgataaagatattgtacccagcaaacatgaagaactctcaaacctcaacaacaaaaaaattcaattaaaagatgggtaagttggccgggtgcagtggctcatacttgcaatcccaatctttgggaggctgaggcaggaagattgcttgagcccaggagttcacgacaagcccaggcaacataatgagaccttgtttctacaaaattttaaaaaattagccaggcattgtggcgtgtgctcgtaatttcagctactcagaaggctgagacaagaagactgagcgcaggaggtggaggctgcagtaggctgtgtgattgcaccactgcacaacagcctgggtgacagagtgagacactgtctccaaaaaaaaaaaacaaaaaaaaaaaaaacccaaatgatttgaatagacacttcaccaaaaaagatatacggatggcaaatacactcatgaaatgatcaacagcagcactggtcattaggaaatgctaattaaaatcacaagaagccactatatctattataatgcctaaaattaaaaagactgaccataccaggtgtttgcagggacactgagcaaatggaactttcatacattgctggtcaaaatgcaaaatgggggagctgttctgaacctatttagttgtgggggctgtccaacttttgaatttttctttgctcaattaatctctgttatattaaaaagtaacatggtacaaccaccactttgaggaagagtttgacagctccttaaagacttaaaatacatctaccctgagacctaagtattcactcaagaaaaatgaaagcgtatgtctatacaaagtcttctttaaaattttttatagaaaatttttaatttttgattttaaaataaaaatagaggtttcaccatgtttcccaggctggtctcaaactcctgggctcaagcgatctgccagccttggctatatgaagtcttatacactaatattcatagtggctctacttgttaacagtcccaaactggaaaaagcccaaatgttcacaagcaagcgaatgaatacagtatagtatatacatgcaatgggatactactcagcaataaaatggatgaaaatcaaaatagctatgataaataaaagaaacgtgacaaaaaaggtactctatcattccacgtttataaaaattcttaaaaatgcaggctaatctatggtgacagaaagtagatcagtggttgtctggggacaggacaaggagggatgaaaaggatcacaaaacagcaatccaactgaggccaccatgctataaggaaatccaaaccagcccacacattgaaaccacataaagaaatcttcatgagactacatgaaaaaaagagatagcctgccaatccctagctgctcagtccccagctactgtagctctagcaactatgtaggtgcaaccacgagacagccgcacgaaaactgcccagcacggctctcacaaattcctaacccacagaaacaatgagagataataaaatgttctttgttgtttcaagccactaagttttggcagattcgttacacagcaacggcagccagaacggaccaccaggactgcctttatatctgattctcagtcatttccagtagctcagatttctcaaattattcccaacaccctgccatcttctaccttctcctaccacttcctgaaacttccactgtgctcccttgagtaattcataaaatccactcttttaacctctgaatcatcccttcatttcttgctctaagtaaaatctagctccctgaggatgccttttcctttcgcagccatctcaaatgatagatgtttcctcttttctcctccacacacttcatatcactgtacctactggagatgtggggaagaaatcttccctgctctggctggcgcggtggctcacgcctgtaatcccaagcgctttgggaggccggggtgggcggatcacaaagtcaggagattgagaccatcctggctaacacggtgaaaccccgtctctactaaaaatacaaaaaaacaattagctgggcgtggtggcgggcgcctgtagtcccagctactcgggaggctgaaggaggagaatggcgtgaacacgggaggcggagcttgcagtgagcggagatctcgccactgcactccagcctgggcgactgagccagactccgactcaaaaaaaaaaaaaaaaaagaaaaaagaaatcttccctgctccttacttgcactttcagattattctcctccattcccctctcaaaattcccagccttgaaaatcctgacaaaaagtagccaggcatggtggtcagcacctgtagttccagctacttgagaggctgaagtgggagaatcccttgagcttgggaggaggttgtagtgagccgtgatcgcgccactgcactcccacctgggcaacaaaaagaggccctgtctcggggggggggaaaaaaagaaagaaggaaaatcttgtcaccagactcacagtctattatcgtttcctattgcagtcacctacagcctaccgagtcactcttcctcattccttaatgtttacatcgcagttctctctccaacactactcctgtcataatttttggtgatttaaatatccatgtagatgatcccttcaattaccctatatttgcaggtctctaaactcctctccaccacaatcttgtacatcctctgatgtggtgcagctctgtgttcctacccaaatctcatgctgaattgtgatccccagtgttggaggtgggcatggtaggaggcgactggatcatgggggtgatttctaatgatttagcaccatccccaagtgctgtttcctgataagcgttctcacaagatctggttgttttaaagtatgtagcacttcccccttctctctctctcctgctggccatgtgaagactgtgcttgtttccccttcaccttccaccatgactgtaagtttccttaggcctccacaagagaagcctgtacaggcagcagaactgtgagctgattaaacctcttatctttataaatacctggtctcaggtatgtctttgtagcagtgtaagaatgaactgatacatccccaaatctcagctactcactcacttcaactgtatttatttattataaccaataaccacaacctctccataaatgcagtttcaagaatcccactctcttaaccatcaccttctaggctctgcaacttactcctactagtgatttgatggggacaatcattccacttcattaggactggcagtacattgatcctcccactttttttttttttttttttttttgaggcagagtctcattttgtcgcccaggatggagtacagtggcacgatctcgggtcactgcaaactccacatcccgggttcaagtgattttcctgcctcagcctccctagtagctgagactacaggcacctgccaccatgcccagctaattttttttttccaagaggagtcctgctctgtcgcccaggctggagtgcagtggcgcaatctcggctcactgcaaacctcgcctcccgtgttcaactgattctcctgcctcagcctcccaagtagctgggattataggcacgcgccaccacgcccggctaatttttgtattctttttttttttttttttttaaagacaaagttttgctcttgttgcccaggctggagtgcaatggagtgatctcagctgtctgcaacctctgcctcccaggttcaagcaatttttctgcctcagcctcccgagtagctgggattatagacacgtgacaccatgcccggctaatttttgtatttttagtagagacaaggtttcaccatattggccaggctggtctcgaactcctgaccttgtgatctgcccaactcggcctcccaaagtgctgggattacaggtgtcagccacagcgcccggccgatcctcccactttttaaactgtctctcagggtcttaaaatcctcacttcctttcttttttttttttttttgaggtgaagtctcactatatcgtccaggctggagtacagtggcgtgatctcggctcactgcaacctccacctcctgggtccaagggatactcctgccacagcctcttgagtagctgggattacaggcacctgccaccattcccggctaatttttctgtatttttattagagatggggtttcgccatatcggccaggttggtctcaaactcctgacctcaggtaatccacccacctcagtctcccaaagtgctgggattacaggcgtgagccaccgcgcccggcctctcacttcctttcttagccagcttaaattccatggtcaatcattaagagaactcctttgtacttctccccctcacttcttcatatccacgtggtaaaatcacaactgcattaatttcaactctccatttactctgtgggtgccctcatacacaatcttgctgtctggtctccttcaactcatgaccacgaatctcaagtaggctctttatgttgcctagcaatatttccactaaacttccctagtccaacccttgcccactcttctaaagaactatctacttcccatcttctctttcctctcccatcccagcttctagctgataaccttgcttctttcactaagagaacagtaagaatcaagagaactttcaaaatctcctgccatcctatctgcccattcacgtatcatagatgtgttaactatatagctgtcaccaaaagaaccgctaatgtttccaacaaaggccaaatccatcccttcttacctactctaggacattgctctagccattgtcttctttccgacatcaactttcccattctcatctttcctatcaacccacaaacatgctgaaacatgttgctcctatcttagtgcagtggctcacactagtaatcccagtactttgggaggcagaggtgggaggatagcttgaggccaggagtccaaggctgtagtgattcatgattgcgccactggcaccccagcagcctgggcaacagagcaagacccccctcttttaaaaccacacacacataattaaaattcctcttaactcacttccccctccatttattgcccaatttctctaccctccatttataataaaatttcgtggtggctcactcctttaggcccagcgactccaaaggagggtcgcttgaggccaagagatcaacgctgccatgggctaggatcatgccactgtactccagcctgggccacagagagcgaacttgtctctaaaaaaattttttttaaatagaattccttgaaatatgcctaccgatgtttttattatttatttatttatttatttatttatttatttgagacggagtcttgctctatcgcccaggctggagtgcagtggcgcgatctcggctcactgcaagctccgcctcccggcttcatgacattctcctgcctcagcctcccgagtagctgggactacaggcgcccgtcaccacgcccggctaattttttgtatttgtagtagagacggggtttcaccgtgttagccaggatggtctcgatctcctgaccttgtgatccggccgcctcggcctcccaaagtgctgggattacaggcttgagccaccgcgcccggccgtttattttgttttaagacagggtctggctctgtcgcccaggctggagtgcagaggcgcaatcacagatcactgcagcctccacctccctgagccttccaaggcctgaaccttccaggtagctgagaccacagacgcgcaccacaacacccgtctaatttttgcagactcggagtcacactatgttgcccaggctggtcaaatgttgccttggatttctcttctcctactctccaactcactccagccaaattcacccctaccatgctatgcccaagactgaactcctgagaaacctgctctactggcaatcttctctttcccacctcagcaaaaggcaactttatcttttcaactattcaggataacctccgttatcgaatctatctgaaaaacctgttgcctccgatttcaaaatatacccagaatccaaatactttcactctgttaataacatcttgttctgaagttcagatcatcttaacagactcctaagtggttcccctgcttcaccctggcctaatgcccccacctcccccacaccagccagagaggagtgaacaaaataagctactgccaagtcgcggcagggcctccactcaacgctatcaaggagcccaaactgctcgaggaaggagcttgcggatgtggttcgcagggaacggagtgggaaaagacgtagaaaaacgcggaccacaactccagtgagcggatcgacttgatgctgtcccgaggctgcggaaggagagttgggccggaagaagggtgctgagagcgctaatagggagactgcactggctgcgacctcacctggcctgtgccgcgccggaacagcacggaatcctcctgctccgggacgccgccaccactgccgccgctgctcatcgccatagcaaacccgcgggtgcgcagcgtggggccccgtcccttcttaagagtgacgacttccgccgcccggggcttctgggagcggaacagtacggtggccgggaggaccgcttgtagtaacttctcacgctttctacgagtggttatcgccctcccacatttgtggcgtgtatatttttcatttctctcaatcctttcatttcactgtgttatatttcctttccttttttttttgtttgtttgttttgagacagagcctcgccctgtcgctcaggctggagtgcagcggcgcgatctcggctcactgcagcctcgacttcttgggctcaagcgatcctcccacctcagcctccccagtagctaggactataggcgtgcgccaccacgctcagctattttttgtatttagtagagacggggtttcggcatgttgcttaggcctcgtctcgaactccagtgtgtgtgtgtgtgtgtgtgtgtgtgtgtgtgtgtgtgtagatatttattccccctcccccttggaaaagtaaatgtaagctcctactaggaatttaaaacctgcttgatctatataaagacaaacaaggaaagacaaacatgggggcaggaaggaaggcggcagatccttaaacactagaagatatttgatcccccaaccttatttgttgtttgttttgagacggagtctcgctctgtcgtcagagtgcagtggcaccatctcggctcattgcagcctcgacctcccgagctcaagcgatcctcccgcctcaacctcccaagtagctaggaccacaggggcacgccaccacacccggctagtttctgtatgttttgtagaggcggcgtttggagcatattgtgtaggctggtctcgaactcctgagctcaagatattccgcccgcctctggcatcccaaaatgctgggattacaggtgtgagccacctcgcccagcctccagtattcttttttttttttgcgacagagtattgctctgtcacccaggctggaatgcagtggcgtgatctcagctcactgcaacctctgcctcccaggttcaagcaattctcctgcctcagccccccgagtagctgggattacaggcgcccaccaccacacccggctaatttttgtatttttagtaaagatggggtttcaccatgttggccaggctggtcttgaactcctgaccttgtaatccgaccgcctcggcctcccaaagtgctgggattacaggtgtgagccaccacaccgggcctccagtattctttattaagcatctagggttgctaaatggcttatatgtacatagtatatatatatttttaactccacgaaaggaactttgagctcttcccccaaaatacccttggcttctatatagtatacaagaaatatctgtggaggaaggggagaatgggatgatgttgaccaagtgtacaaaaatggtaactccgtagaggtaatatgtggaatgtaatcatttcacaatgtatatctaaacatcaaatggtacaccttaaatatatacaatttttaggggtctggtacggtggctcatgcctataatcccagcactttgggaggccaaggtgggtggatcacttgaggtcaggagttcaagaccagcctggccaacatggtgaaaccctgtttctcctaaaaatacaaaaatcagccgggtgtggtggtgcaggcctgtaatgacagctgcttgggaggctgaggcaggagaatctcttgaactcgggaggcggaggttgcagtgagccaagatcacgccactgcactccagcctgagtgacagagtgcgactccatctcaaacaaataaatatgtacaatttttatgtgtcaaaaaagttaaattgtcacaagataaaaaaaaaaattttaaatctcatgtcaggaaagtaatgtgccaaaggtacatctcacagataaacatgaaaacctgcactccagcctgggcgacagagtgaggctgtgtctcagaaaaaaaaaaaaaagtaaaaaaaaaagtatgtttttataaagcttgcttagatttttctgaatcataaaaattctcacaattgcatttgatgtcaaaatttaaacaaattacgtggacatattacatgatggttaaaaaaataaatttaaacaaaatatagaaccaggtttctttttgttttttaatttttttctttttgagacggagtctcgctctgccacccagactggagtgcagtggctcactgcaacctctgcctcccgggttcaagtgattctcctgtctcagcttcccgagtacctgggattacaggcgtgtgccaccacgcccagctaatttttgtatttttagtagagacggggttttgccatgttggtcaggttggtctcaaactcctgaccttgtgatccgcccgcctcagcctcccaaagtgctgcgattacaggcatgagccaccgcacccagccatttctttttgtttttattatttagagatataattgatatactatagaattaatcgttttagagagtacaattgaatggtagatagagcggaaaccttaatatattcacaaggttgtgcaaccatcactactatctaactccagaacattttaatcacccaccaaagaaactctgtttcctttagcagtgcgctgccatgctcagctattttttgggagagaaggggtctccccatgttgtccacgctggtctcaaactcggttgcttaagcagtcctcccacttgagccgctgtgcccaggcctgagttactatatttataaaagttatttcatatgatagacaaatcattcaaaacataatgaggtaaactgccaaaagaaaccattttaccatatttgaaggcatttaatgtaaatgttgaatttaatttcatgtactggaatcagtctttttgcatatgtaattttcataccaaaaatctgtcttcagttgactcctggaactctctcatgataaaataaaagtttcaaataatgtcggggtggtggctaacacctgtaatcccagcactgtgggagtccgaggcaggtggatcacatgaggtcaggagtttgagaccagcctagccaacatggcaacactaaagatatgaaagtcagccaggcatggtggtgcatgcctgtaatctcagctactagggaggctgaggcacaaaaatcacttgaaactgggaggtggaggttgcaatgagctgagatcgtgccactgcacaccagcctgtgagacagagcaagactctgtctcaaaaaaaaaaaaaaaaaaaaaaaaaaaagggccaagtatggtggctcatgcctgtaatcctagcactttgggaggctgagtgggagaggatcatttgagcccaagtaacatggtcaggccccatctctacaaaaataaattagctgggcatggtggtatgggcttgtggtaccagctactcaggaggctgagacaggaggagtacttgagccaaggaggtcaaaggctgcagtaagccatgtttttgccaccgtgctccagcctgggcaacagagcaatatgctgtttcaaaaacaaactaaaaaaatggtagtacctacatgtgaagattgcatataataaagattgtaaagcagagagaaaaactggacagttcaccaaaaagaaaatccaaatgtcactagagatctgagaagatgcccaacctctagagccaaggaattgcaaattaataactaagataacatttcagggcctggcacggtggctcatgccagtaatcccagcactttgggaggctgaggcaggcggatcacttgaggtcaggatttgagatcaccctggccaacatggtgaaatcctgtctctactaaaaatacaaaaattagctgagcatggttgcggcgcctataatcctagctactttgaagactgaggcaggagaatcgcttgaacctaggaagcggaggttgcagtgagctgagatcgtgccagtgcactccagtctgagtgacagggtgagacttcatctcaaaaaaaaaacaaaaaaacaaaaaatttcaggaatatacctgcctttggtaaaaacaaaaagaaattgtgaaccaggcgtggtgactcatgcctgtaatcctagcactttgggaggctgaggcaggaggatcctttgagcccaggggtacaagaccagcctgggcaacatagggagaccttgtctcaaaaaaaaaaaaataaataaataaaataaaaaataaaaaaatcgtgaatagtgttgcgatgaataaaaaagaaaaaaaattaaaaagaaagaaaacccagaaaaactaacataccattttcctctcagtttggcaaaactattaggaattaataacatttgatgttagcaaagtatggggaaatgaacttttatcctcttattgaaaatatctgtttgtagccaggcatgatgacttatgcctgtaatcccagcaatttgggaggccaaggtgggaagatcccttgaggccagaagtttgagaccagcctgagtaataaagtaagaccccatgtcattaaaaaaaaaaaaaaaaaaaaaaaaaagaaggaaagactgccgggcgcagtggctcacgcctgtaatcccagcactttcagaggctgaggtgagcagaacacttgatgtcaggagttcaagaccagcctggccaacatggtgaaaccccaccccatctctactaaaaatacaaaaattagctgggcgtggtggcgggcgcctgtaatcccagctattcaggaggctgaggctggagaatcacttgaccctggaggcggaggttgcagtgagccgagatcacaccactacactccagcttggacaacagagtgagactccgtctcaaaaacaacaacaacaaaacccaaaacatctgtttaaagtttaagacatgtatacctgtgaaagttgattacataaattgggtcattcttgaaatactcaactaaatcagagttgaagggccagggggaagaagcattcggggcacacagcatctgcttcaagaattaaattttccacaagtccaactgctgaaccagccttctgtatccctaagaccagttttacctaatagctgctaaaatgaactgccatgactctaagactggttttacctaccaccatcgctcaccaatcagagcttgctagctcccacaagctctagtgtgaatgagctttcttccaaaacagtatgtaatactgttctttctcataaaacccggaaccttctctttttttttttttgagatggaattttgctcttgttgcccaggctggagtgcaatggcgcgatctcggctcactgcaaccttcacctcccgggttcaagcatttctcctgtgtcagcctcctgagtagctgggattcaggcatgcgccactatgcccaactaattttgtatttttagtagagacggagtttctccatgttggtcaggctggtctcaaactcctgacctcaggtgatctgcccgcctcggcctcccaaagtgctgggattacaggcatgagctatcacacctggccgcaaccttccctttattctcctgatcataccaatgatcagcctggtctgtgtgtatgccatgaattgcagctcttgcttaccaaataaaatgtttttagagatttgtctctatattatatttggctttgacataactattcccaaggaattctatctttaaaaatccattcttatagaaatgaaagcaccaataaatgggaataagtacgataatccacatcgcagaattgtttgtagtggcaaaagttgcaacatcctaattgtctatgagtaaggaaatgattgaataaattactgtacatctatactaaagttaaatttgtaagtactgaagtacaggcacggctattttttttttctttttgtggaaacagggtctcactctgtcacccaggctggagtgcagtggcaccatcttgggtcactgcaacctctgcctcctgagttcaagtgatcctcacacctcagcctcccaagtagctgggactacaggcacgtgccaccacacctggctaattttggtttttggcttctttcttaattggtatgtttacttaaaaatatagactaatgggctgggcatggtgacttacacctataatcccagcactttgggaggccaaggcgggtggatcatgaggtcaggagatcgagaccatcctggctaaaacagtgaaaccccatctctactaaaagtacaaaaaattagccgggtgtggtggtgggcacctgtagtcccagctactcgggaggctgaggcaggagaatggcgtgaacctgggaagcagagcttgcagtgagccgagattgtgccactgcactccagcctgggcgacagagcaagactccatctcaaaaataaataaataaataaataaaataataaaataaaatatagactaatgatcctgtgcttcaatgtcattgtggttatgtgctgatgtccataaaacataagttataagggactcttcacaaatacactccagacagaagggtaaacagaaatgactgacaagacagtgccatttcagacatacttcccttaattattaatacttgctagaaaatggagtttgacattatttacaattataccaatattcacagaggccaactgtcacaggcattaagggcacaccagggccaggagacctcatttcagacttcccaaatatttttatattttagctattaagatcagttaccagagctcaacttgttcttaacaagcagaatttttatgtccattcaaagagtctcttatacctttctgggcctatttacttgcagagaacagtagaaactgtaaccaggctcttcatatcatgcattcacatgtgatgtccaatcttcatatgctgtccaatttctttaagataaatggagtgactcgcagcagggccacgtagatgagaaagttctgtatggagatcatatcctcgtgcatcttccgtttcatctccgtgaggtccagcttccgggcaaggcccccaatccggaagatcagctgcctcgctctgctctccctaatggcccccttacacccggaactcggcctatcccctcgccccagctaatttttgtatttttagtagaaatggggtgttcgccatgttgcccaggctggtcttgaactcctgggcacaagggatctacccgccttggtctcccaaagtgctcagattacaggcatgagccaccacgcctggcccaacatggctattattttttaaagtgctaaattatggccgggggctgtgactcacgcctgtaatcccagcactttgggaggccgaggcgggtgaatcacgaggtcaggagatggagaccagcctggccaacatggtgaacaccccatctctactaagaatacaaaaaattagctgggcgtggtggcaggcgcctgtaatcccatctactcaggaagctgaggctggagaatcgcttgaacccgggaggcggaggttgcagtgagcagagatcacgccactgcagtccagcctgggcaacagtgcgagactctgtctcaaaaaaaaaataaataaattacctgggtgtggcagcgcgtgcctgtaatcccagctacccaggaggctgaggcaagagaactgcttgaacccaggaggcagaggttgcatggagctgagatggcaccactgcactccagtctggtgacagagtgagactccatctcaaaaaaaaaaaaaaaaagtgctaagttacatctaagtttcctatttttgtttaaaaaactccttgtagtgggttgaatggtggaccccaaaatgatacatctgtccatctgatatgcgtgaatgtgacctatttgggaaaacagtttttgtagatgaaattaaggatttccaaatgagatcatcctaggttagaatggaacctaaatccaacagcaaaagtcctcataaaaagaagggaagaagacagaaaagaagaccacaaagacaaaggcagagataggagttatgctgccataagccaagtaataacctggagccaccagcagctggaagaggaaagcaaggattctcccttggagccttcagagggaggtgtggcccagctgacatcttgctctcagatttctggcctccagaactgtgaacagaaatatttctgttgttttaagccactaagtttgtggtaatttgttacagcagctctcagaatcaaatacattcccacaccccttatttatgtgtatgtgtgtgtatgcatgtttgcatgagcactgagagaagcataccattattaacattggttagttcaggggaatgagactggcttactgaaggctgagagagtatacgtgtgtgtatataaattgagtgtatttaaattaagtatatggaagtaaattaagactacaatgagataccactacctcccaccaatatggttaaagataaaaggactgataatactaatgctggtatggagcaatggaaccttcctttattgctggtggtaaaatggtatggtcattaaaaacaaactaaaacaaaaacaacaaaaatgcaattgtttgatggtacctactaaaaaatgtgtgtatgtgtgtgtatagacacacaccctatgacccagcaattccattcctggcatatactcagtagatagcgtgtttaagaccatcataagatatacaaaaatgttacggtagcattattcataacagccccaaagtgggagcaattcaaaggtccatgaaatgtagagtaactaaattatggtatattcatataacagaatgctacacaacagtgaaaaaggctgaactgctgcatagcagcaaaatagagaattcttttagacgtaacgttgagcaaatcaagctaggctcactacagcacataccgtgtgatcccatttacaaaaaattcaaaaacaggcaaaactaatctatggtgataatcagatgggaggcattatctaagagggtgctggaaatgtcctttattgtgatctgaacatagtattcatatacgagtcattgaaatatacatttcaaatgctggctgtttattatcatttcactgggataaatgcccaaggagttagttttcaaagagatgctatttagaatttatggaaatttagaacttactgtattttcccagattttctataatgagcaagcattgcagtttgagggtttgaaagattggtagagacaaaaactgcataagctgcatgattatttctcacacttcagatgcttaccacctttatgatttgccatatcatgtattttaaaaaatacatttttttctttttttagatggagtctcattctgtcacccaggctgcagtgcagtgggtgtgatctcagctcactgcaacctcctgggttcaagtgactctccggcctctgcctcccgagtagctgagattacaggcacccatcacaatacctggcaaatttttgtatttaaaaatacagccaggctcggtggctcacgcctgtaatcccagcactttgggaggccaaggctggcggatcacctgaggtcaggagttcgagaccagcctgaccaacatggtgaaaccccgtctctacttaaaatacagaattagctgggcgtggtggctcatgtctgtaatcccagcactttgggaggccaaggtgggtagattgcctgaggtcagttcgagaccagcctgaccaatatggtgaaacctcatctctactaaaaatacaaaaattagctgggcatggtggtatgctcctgtagtcccagctactcaggaggctgaggtgggagaattgtttgaattc

SEQ ID NO: 1477 - protein, 143 aa, Homo sapiens
GFPQHTIASLSDQDAKPSFSMAHLDGNTEPGLTLGGYFCPQCRAKYCELPVECKICGLTLVSAPHLARSYHHLFPLDAFQEIPLEEYNGERFCYGCQGELKDQHVYVCAVCQNVFCVDCDVFVHDSLHCCPGCIHKIPAPSGV

SEQ ID NO: 1478 - DNA, 1340 bp, Homo sapiens
ggcacaagggggcgctttagggactggacttgcagtgtaaacagagacgctgcaaattgcttgtggacggtgtaggccgctgcaggccaccatgaaccggcttccggatgactacgacccctacgcggttgaagagcctagcgacgaggagccggctttgagcagctctgaggatgaagtggatgtgcttttacatggaactcctgaccaaaaacgaaaactcatcagagaatgtcttaccggagaaagtgaatcatctagtgaagatgaatttgaaaaggagatggaagctgaattaaattctaccatgaaaacaatggaggacaagttatcctctctgggaactggatcttcctcaggaaatggaaaagttgcaacagctccgacaaggtactacgatgatatatattttgattctgattccgaggatgaagacagagcagtacaggtgaccaagaaaaaaaagaagaaacaacacaagattccaacaaatgacgaattactgtatgatcctgaaaaagataacagagatcaggcctgggttgatgcacagagaaggggttaccatggtttgggaccacagagatcacgtcaacaacagcctgttccaaatagtgatgctggtcttgaattgtcctgcctgcatgaccacactcttgccttgattgccaaaggcatgaatcatacaaaaactcaatatagagcaatgtttgtaatgaattgttctattaacaaagaggaggttctaagatataaagcctcagagaacaaggaagaaaaggcgggtccataagaagatgaggtctaaccgggaagatgctgccgagaaggcagagacagatgtggaagaaatctatcacccagtcatgtgcactgaatgttccactgaagtggcagtctacgacaaggatgaagtctttcattttttcaatgttttagcaagccattcctaaacagcccaactggcatttaattacccaatactgtatataaggcaaatatggacagttactttcctcttgcctgttcatatccttcagtgacattgaggaagcagtgtttctctttttaaaggagaatagttgtcaaccttcattcatctcttacatctctcaccctctccttttttttttctttgattttcccccttattgatgggactgatattcattctgtttttgatgaacatttggaaactgtcgggctttttattaaagctctgtagaattaaaatgttctggaattataagcaatctttgtttctgagtgttatttttattttggatatagctttgatgtaattaaactggaaactctttcctgaattgtctgtaaaaaaa

SEQ ID NO: 1479 - protein, 233 aa, Homo sapiens
MNRLPDDYDPYAVEEPSDEEPALSSSEDEVDVLLHGTPDQKRKLIRECLTGESESSSEDEFEKEMEAELNSTMKTMEDKLSSLGTGSSSGNGKVATAPTRYYDDIYFDSDSEDEDRAVQVTKKKKKKQHKIPTNDELLYDPEKDNRDQAWVDAQRRGYHGLGPQRSRQQQPVPNSDAGLELSCLHDHTLALIAKGMNHTKTQYRAMFVMNCSINKEEVLRYKASENKEEKAGP

SEQ ID NO: 1480 - DNA, 44147 bp, Homo sapiens
  misc_feature (18225)..(18227): n is a, c, g, or t
ctcccagagtgttgggattactggcatgagccactgcgcccagccgaggaacacttttcaatccttacccagttattgtgaacgttcataccttttcttgaagaaataccgtttttgttgttgttgttgtttttgagacgtagtttcgctcttgttgcccagactggagtgcaatggcatgatcttggctcaccgcaacctctgcctcccgggttcaagcgattctcctgcctcagccttccgagtagctgggattacaggcatgcgtcaccgtgcccagctaatttttgtatttttagtagagacggtgtttctccatgttggtcaggctggtctcgaactcccgacctcaggtgatccacccgcctcggcctcccagtgttgggattacaggcgtgagccaccgcgcctggcccttttttttttttgtaacgcggcagctccaaaccccgctgagagtatatgcatgggaaaactttctgaaatcaaaaatattccgaattctggcaacatactgggccccaagtctttcggatttaactctgcctcggccgttttattcagttaaggaaactgagtcactccatcccaaagccagattcccgcggttctaagctgaagctgtctcgggtgcatttgcattccaaaaaggcgaagggtcccgctattactgctcctggtacctggagctgccaagcacccctgcgatggggcgccccgggggctgtgcgccaggctgggagtatccttggggggcggggcgagggggcttccggggcggcagcacctggcccggctccggccccgcccgcgtcagctctgcgcggtgattcactccctccttcgccccggggcccccttcccggccagacggcgggcaagacagctgggtgtacagcgtcctcgaaaccacgagcaagtgagcagatcctccgaggcaccagggactccagcccatgccatggcggattctgagcgcctctcggctcctggctgctgggccgcctgcaccaacttctcgcgcactcgaaagggaatcctcctgtttgctgagattgtgagcgttctggggcaggcgcgtgggcaaaagcgggatggggtggctggaccatgcggaactggatggtccgggtgaggcaggcacttggccggggcgctcggcagtggggtgcaggtgggtgggttcacggtggaggcccgaaacccggggcgcagggcgagtcggtggggtttgacgaaggttgttgagatctggtggtccccggggtgaagcaaggagcctataacgcatacggagggctacgtggggacagcctgcgtgaactcatcagtggacgcatcgaaggggtcccagggtgctgggaagtgggggcctcctgtggcagggcgtggcgcggcctgggcacaggagggcgggctggcagcgcgcccaggggcagggcctgttggggtggggcccccccgccccgcgctagtcccgcggtgtagagcgccccgcccttcgccagttcttcctcgcccttcagaggccgggcgggatgtccttagcttttcggggtttccacccttctcaaagtgggcgccgcctttgagtcacttgtaaaaggggtgcggcgcctttaacggagtcctgcctctctggtgtcactctcaccgcttcccaaaggggttgctgggggaaccgcgtgttccgccccggtcaaggccacaaagctggcgtcagcggggctcacaaaacacctggcagcgccactcccctcaggctgcccgtaacctagaagggaaaagaggaaactgaggcacccaactctactccttacttgttgggtgaccctggccaagccattaaacctctctgtgcctcagttttctcgtctataaattagaaagagtaataatagtacccagagcattagattgtcgtgatgattgaatttggaacacagtgagcacataaaaagtgtttagctattattgtatgtcatttccccagccctcgtaggcatcttagtatgggacccccaatttaaaccaatcttctcagccctggttgctgattgaggtcccctttcccatgtcacccttccagatattatgcctggtgatcctgatctgcttcagtgcctccacaccaggctactcctccctgtcggtgattgagatgatccttgctgctattttctttgttgtctacatgtgtgacctgcacaccaagataccattcatcaactggccctggagtgtgagaaggggtccacaatggcaagaccagggaggggtctgggcagttaggattgtcggggaactgtggttgctgacttccctcttctcctccctacacctcacaggatttcttccgaaccctcatagcggcaatcctctacctgatcacctccattgttgtccttgttgagagaggaaaccactccaaaatcgtcgcaggggtaaaggccatgggagcagtctgaagcacagagcgaagggtttgaggagccagggaccatttctgcctttgcttctggcagaaatcgtgtgacccacagcaagtcacacttgtcctcagacatggaggaaagtctggcccaggacttggttttgcctcccaaggtcttcatttgctgtgaagggaagtcccttgtcagacacaaggaccttggtgagaggtacaaacaggcggcccctttgtcaacgcactagactaccatctgcaagaactttgtcccaaatgtagtagaaattggggccgggcgcagtggctcatgcctgtattcccagcactttgggaggctgaggccgaggcaggcagatcacttgaggtcaggagttcaagaccagcctggccaacatggcgaaaccccatctccactaaaaatacaaaaatcagccgggcatggtggtgggcgcctatagtcccagctactcaggaggctgaggcaggagaatcacttgaacccagaagacaaaggttgcagtgagccaagatcatgccactcactccagccccagtgacagatgggtgacagagtgatactgtgtctcaaaaaaaaaaaaagtatgacttgaattgtgccccctacgggtagggccacagtgtggcctccctgtgttgagaggtataggaggagggagagtggggtaggatgcactctcttggcctttccctggcttaccaacccggtgcttgagtcccatcctgcgtggggcaggtgctggaggtggtggatacaagaagataagagactgagtaacctgaccagctaatctaaaccccctcactcctatcctgtcccccaggtactgggcctaatcgctacgtgcctctttggctatgatgcctatgtcaccttccccgttcggcagccaagacatacagcagcccccactggtaagtgtgtgtgtgtgtgttggttgggggtaagggggttgctgagagggcagagggaaaaaggaaagggatctcttaaaggcacgaatgccaactctggtctcgtattggtacttagggcttttgtaccaataggtaccataagcttcggtattcttgtgtgtaaaatgttcatggactttggatcttgttttaaaaaatgggcatatagattcagccaatgctttctctcttttcctcacctgcagaccccgcagatggcccggtgtaggcgaacttccctcatttctctctgcaatctgcaaataactcctccattgaaataactcctccccaccccaacaacaacattcccagcagaccaactcccaccccctctttgaggtaaaagtgcctttattgggagacttttgtcttccagcctgccaatcaaccctcctgggtgtggccaccatatgtgtgtgcctaggtcctccttctgcacgatccaataggagacaccagttctgactgaaccatgcccccacctaagtcacaaaatgagggaagtggggagttagatttcagagtccaggccctaggttgggacccactccaaataatctcctcggtgtgggtggtggttctatagagggataaatgaataataaacattgttaaaatatacgataatgaataaagtaatcctttcatcaaatgtgggtaaatttcaagcatcaggagggggaaatggagtggaaacagctggggcaaggaggcaaagaagccaggcctgttttacaacaaatattaaattacttcaataatacaaacgagaggcccggtgcggtggctcatgcctgtaatcccagtcctttgggaggctgcgggaggattgcttgagcccaggagttctagaccagcctgggcaacatggcaaaaccccatctctaccaaaaaattaaaaaattagctgggaacgctgacacgagcctggagtcccagctacttgggaggctgaggtgggaggatagcttgagcccaaaacttttgaggctgcagtgagccctgatcacaccactgcactccagcctgggcaatagggtagaccaagtctctaaaacagaaacaaaaatagaaacaaactgataaaggagggaggaagaggatttatgacttaggttgtaggggcggggcgtgggggtgaggggcatgggcctcatcatctactctgactggagaatggagccccctccaggacggcctgccttcaagccacgatgcagttcttgtctcgggcctgacgaggcatccctgcgcgagagtccctggggagcgataaagatggggagttgaaggtctccattgcagtgtcctgagcaggcatgggcctgcacaaatgcgggggcagagggatgcgctctcctaggaagaagccatcatcctctgatgattcggaactggaactggagggcgagctggagcaagattccgagtctgaccctgatcccgcgtcacattgatagtggcgacgtctgcttgggtggcggttgtgatggtgatggtgattatgatgatggtggcggcgacggctgggggccctgggtgggggactgcgtggcctgcggcgctgggccgggggtgcactcagggtccggcgcgggcctccttcagacaccagagggtcgcggaagctgacgcgtggggtgctctgacgaccgaaggcactatcatctgggcgcaggttaggctggccgggggactctgggggcggctcggggacactgcggagccccagttccggcatggagtggcggtggggagcccctctcagaaagcgggagggctcctcagggcctgtagctgttaagggggagacagagtgactccttgtatctgccctcccactggccccctcctaagaggaggcctgcggaagggccttctttcctccactaagactgggaaagtgggggcaggggtcggagaatggcagggaggtgggaagtctgggaagtgtgaggcctggagcaggctctgggtgttgagagggttggaaggaagaacacggagcaagatgggactggtgtggggggcgtggccagggcacccggggtggcttcggatggaagaggtgtggcataggctggagtagatttggtttgcaataaaaggggtggggcctgactgcagaggatgaagggtgaccggctggagaagaggaagaggaacttggggtcaagcagagacaagttgaggtaggggaccagccctgtattgacagggtggaaccagggttcatgaggcgggtgtagtttgggatggaaaccaggcctggactggtgtggggaaggaggatgagctgagaaatgggcggggcccagggatacagcaggtgaagggcctgggctagtcaagaaggaagggccagggctgaggcaggggcaaggacataggggtgactgggctgtggctgggtgtggctagagggttagctcacctggcgctaactctgtgctggtgcctttggtggtggtctctgatgcccccttcacagcagagaaagaggctgtggaggctgcaagtggggctgtgacagggccggcactccagctgcggcggctcggccctggagctgtgggctcggacccaaggctgcaggctcgagagcagaagattaggcctcggcgtggcaggaatgggcggcccagcagggcccgcccacagcgactacagcagaagcagcggtctgaggcatgccagtgctggccctcgtaagccatctggccttggtccaggcctgtggggaacgacgagggggaaaaactgaggcagaacccccaggcgtaaccccacccctcgtgaacgagtcccttctcaagaagaggtggggaatccgaggcagggcacccctgggtgccttcctccctcctccagaatggggcccttttggagaaagcaggaaacaggttttggttctctcctggagactggctggtgaacctctctctcactcctccctttctttcccagggtgctctctcccagagcggggtgggcattggactctaagattcgggccaggcttagacattagggggtggctccaagtggaaggagaatggaaagctgggcctgaagaggaggcctggctggtgggggcagggcttagcaggtggggagtggccctgttgagaaaggagtggttctcagaggatagggtgtagctagaagctaggcctgacttaggctgatacaggagagtggaggagaacggggcacagcttggggtggtaaaggctaggagtagggcgagccctggggctggaattagagcaccctctggaggtgggtgtagacatgtggtggtggcctagcattgtgttaggtggggtttagaaagcatggcatagtggggacattgggagtgggacttgcaaccaagcgtacaggtctatagtgttggggctggacaaagtacagggcacaatggaggatggggcctggaggacaggaggagtcctggtggggtaggactgtggcccagctgtccatccatccctctgtccagtcccacagcattcacccaccgatgtgctccccacagccatcacagtactccgcgtggcgggcctcgtagcaggcgcagcagtgggggcggctctgacgcatgacatagcgctgccctcctagtgaagcttcacactcaaagcagcagaagtgatccatgtgccagtggcggccctcagcctccgtgcactcaggggagaagatgatctggagggcgcaggccatctgtggctgtcagatgagcctgctcctggccctgcccaccctcaactcccacccctgggcagggaggcccaaacctcgtcacaggcttggcagcgtggacgcaggcattcggcatggtgacgcccgcagtagaccttgccaacatggtagaagtagatgaggtcaaccagcagttcctggcacgtggtacacacgaagcactgtgggtgccagcaggcacccaggcctgcacggctggcaaacactgcgatgtccccacctccaatctgctttccgcactgccatgagacaagcaccaagatggttaccatcactgtcaccaagatggtcagatggatggggtcagccaaagtatgttacacttgggcctttcccacagtgaaactttgtgatcagccccacccatggggtaactttgacacaggccctgcctataccagggatggggttgggcggtaccttagagactgaccctgctcatgagggaagccgtagagacaggccctacccatggtgggtggccttataggcaagcctccctcatcaggggtggggaagacagacaggccaggcctagtgggggaaaccacagagatagtctccacccaccgggaccttagcaatagatctcacctaacagtaggatctaaggacaggccctgcttaccactgggccctgcagacaggccctgccactgtgggtcagctcttgaggacaagttctgaccacaggaggaccaaagagatagcccatgccccatgtccactgcacagacggggagaaaaacacactaaggcctccttacagacaaaccccacacgacagtgggattgatgggacaggtccctgtccaccaggggttgccttagagacagtccctgcccaacagtgagatgtgaggaacagaccccgcccacaagaggggaccctagagacacctcactggggcttaagtggcaggcctcatcttcccagtgcttggaagatgtgtcctgctccccagggcttggagcagaggcactgctcactcgctgaggccctccacggctcacctcctcacaagatgccccagtgatggtcaccgggaagatgcgcacgatgccacgccccagattctcccgcttccgctgctggctaaaggctcggagctctttcttttcctcctcttccagtgctgtgcagtactgtgcctgggaggagaaggcatctcccaggctcctcccttgatgcctgtccctgcccctcttccagacttcatccatgccccgcaagtttacttctaggtctttctatagatggtgcctcctgcctgaagtaaccacctcttcttccaaggcccagctgtggttttgccaaggaatgtcccctgatgacccctgcctgtctggaccactcacctcagatcagctcacctttcctcctctgaccctgccctgcattggcccaggctgtgtgctgtgcctggcatgcccttcctgtcttctctctcctcacctcactgtcgtgtgggggcagctggtgcagcagctgcttgatcctgtatttctccccaggactgttgacgtaggggaccttgtcctctgggaggcagctgaaaaattgatatacctgggaggacataggagtgggagaaaacaactgaaatgagaggtgagttgggatgcagtgagatggcgggtccccatttctcagaaaatgaaaggcattaggagggaccttctgactccctcatctctccttcctaaaggcggatcatttccctcagctcccagctcccaaacacgctgagggtcctgcatgtattgacctcacttcctcctccagctgctgatcacctttttttttttttttttttttttgagacggaatctttctctgttgcccaagctggagtggcgcgatctaggctcactgcaacctccgcctcctgggttcaagcgattctcctgcctcagcctcctgagtagctgggattacaggcataccactatgcccagctaattttttatttttagtagagacagggtttcaccatgttggccaggctggtctcgaactcctgacctcaagtgatccgcctgccttggtctcccaaagtgctgggattacaggtgtgagccaccgcgcccagtctactgatccacttttctttttccctttacaggaaaattcctcaaaaagttatgagcacttgtgttcactccacttcctgtccttccaatctctcttgagcctacttgaggcaggcttccgctcccatccctcttccaaagctgtcaaggtcatcgatgacttccccattgttaaaatcattgttcaggtctcagtcgtcatcagacttgatgatggtagcactgcaccgagctgaccactctctcttcctggaaacactttcttcccttggcttccaggacaccacacagtccaggttttccttccaccttattggctgctccttctttgtccctgttttggctcctcctcaactagctgacccctaaatgcaggaggatcctaggactcagctcttggtcctcttgcctctgtctacattcaatttcttgggaattacattcaaccttatggctgtaaatatcatctacttggctggctaatgtgtcacctccagcctgtgacacataatgacaaaacacatacgtccagctctgtaacttatcccttgagttccaggcaatgtggctatttagatgtctaacaggcatctcaaactccagatggccacaaccaaacttatgctcttacccctcaaactgctcctgtcttggcctctcccacatcagttaatctacctatcctcagggtcatctttcactcctctttctcccacccccacaagcaaatcctctgagtgctacttccaaaatataggctgggtgctgtggatcacacctgtaatcccagcactttaggaggcccagaggggaagatagcttgagcccaggagtccaagaccaccctgggcaacatggcaaaaccccatctctacaaaaaatacaaaaatcatccaggcgtgatgatgcgtgcctgtagtcccagctacttgggaggctgaggtgggaggatcacttgagctcaggaagttgaggctgcagtgagctgtgattgagccactgcactcaaacctgggagacagagtgagacccccccccatatatatatatgtgtgtgtgtatatatatatatatatatacacgtataattattatacgtatattatttacgtaaattatatacgtaaaataattattttatatatatgtatatagatgtatacatatgtgtatatatatgtgtatatatacgtatatatgtgtatatatatacgtatatgtgtatatatatacacgtatatgtacgtgtatatatatacgtatatatatatacgtatatgtacgtgtatatatatacgtatatatatacgcgtatatatatacgtatatatacgcgtgtatatatatacgtatatatatacgcgtgtatatatatacgtatatatatacgtgtatatatatatacacacacatatatatatatattaaataattatttattaaacggaattttgctcttgttgcccaggctgcagtgcaatggcatgatctgggctcaccgaaacctccgcctcccgggttcaagcgcttctcctgcttcagccttccaagtagctgggattacaggcatgtgccaccacgcctggctaatttttttgtatttttaatagagacggggtttctccatgttggtcaggctggtctcaaactcccgacctcaggcgatctgcctgcctaggcttcccaaagtggtgggattacaggcgtgaaccactgcacccagcctattttttttttttttgagacagggtcttgctctgtcgcccaggctggagtgcagtggtgcaatctcagctcactgcaacctctgcctcctgggttcaaggaattcttgtggctcagcctcccgagtagctgggattacagacatttgccaccatgccagactaatttttgtatttttagtagagatggggtttcactatgttggccaggctggtctcaaactcctgacctcaagtgatccactcgcctcggcctcccaaagtgctgggattacaggtgtgagccaccatgccggcctttctgtctgtctgtctgtctctctctccatatatatataactccttgcactgccagtgccatcatcatcaggttcctcactggtctcctgattccacccttattcctccaggctgtcttctgctgacaaccctcttgcgacttcccttcattcacaggcaaagccaaagtcctctccatagcccctgccacatctctgacctcatctccagctggtctcccccttgctcactctgcgccagcagcactggccttgccatcccttacatatgccaagcacacgcctgcctcagggccttggcattagccatgccctttgcctgtgtgaatcgctgtaaccttagatgtctgcatggctcacttctcacctcctttcgggcagctcaaccattaaattctcacagaggcttattctgggcaccctatttacaattctagcatctctctccttccctctctctttcttcaccccaccttccttgctttttaattccatagcccttacaccatctgacatatatttacaggtttgcttattgggtgttcctcctttccagaatctaccctctgcctgggcagattttttttttttttttttgagaagtatcactctgttgcccaggctggagtgcagtggcacgatctcagctcactgcaacctccgcttcctgggttcaaacaattctcctgcctcagcctcctgagtagctaggattacaggtgtgcaccaccacacctggctaatttttgtacttttagtagagacggggttttgccatgttggccaggttggtctcaaactcctgacctcaagtaatccgcccgcctcagcctcccgaagtgctgggattacaggcgtgagccaccgtgcccgtgggcagatatgttattttgtgttttgctcattgctgtgtcctcagtgcctagaacagtgtctcacatgcagtaggtgccccataactatgtgttgaatgagtcaatcaatgaagtcatgtggtgaatgaagtgctgggagggtagaatagggagtggggccacgcatggtggcttgctcttgtaatcccagcactttgggaggccgaggcaggatcacttgagcccaggagttcaacatcagcctgggcaacatagggagaccctgtctctacaaaaaaattttaaaaatagccaggcagggtggcatgcacctgcagtcccagctacaagggaggctgtggtgggcaacagagtgagaccctgtctcaaaaacaatcaatcaaaaataataggattggggtgaacaggccctgaggaactggtccctcagtcacccaaggtatggggggctgaccactcttccatcacagaggggccagaagaccctcggtctgactgcacactctagcgtagcccagaaataggttcccacctgagtgtgtgtgtgtgtgtgagcattagtgtgcacccactggacagcaagagtggagggctggcctctggtcacctgctccggcttaaggcctgggggcacccaggcatactcctccgatgcacagcctgagtcgtcgtcggagatggagtggcgctggaagtccgagattagccgacacatgatgcgttccaggtccacaggcaccgcgtgcactgcatgctcctcccgcgggcatttgcaatgctggcagatctttctgagggggccgggatgggggtcaattactaaggagttgcccacccgaacccctcggcagcccaggtccaatggaggagcggggacatacagattatcaccaccaaaggtctgtgagcagggacagggatctgggcctgggggcggggctgcaggaggtgggcctatgagccagggtgtggctgggctgtgagccagaggacaggtcgtggggagtgggatgctttgtgggggaactttcactagacacaggcatctaacctgtggtgaggctctgaacttgtgggctctgagcctgtgggtagggcctgagtctgggggctgtaggctctgtttattgggtgcagggctccagcaggaggataggacgctgggcctgggagagtaggtctgagtctaagaggggtgctggaggccagagggcggcgctcaaagttagagacgaagaatctccctagggatgcgactccgcggctacgggagaacacttctgggggcggggctgcgtagtgggtggagctctcctgggaaaggactttggggaatgagtcagggggcggggctctgaatctgagcctgaggctcttttcccaactgagatccctctgtaggcggagctcaagcgtaggggcgtggcgtaaggctcctggatttccccccgaaggcggagctctgacaaaggcgaggccctttaggggcgccacttacctccagccgtggagcaggaagccagggcactgctccctacaggagttgcagggctggccccggtctgggtcctctgcctctggaggctgcagtgggcgggggcagatgcagggccgggtgaggcgcggaagcagggaaggagaagtcaacgcccgcccctccacttcattgcccgcgaccgcacgctggggcctgtcttacctgggcagcgctgggcaggctgggacagcgcccagagtgcgggggagcgggacacaaccgaggcagaggcggggcagttggagccacctccttatatgtccccttttcagggaattccccttcctaggctggcctcggacccccctccccgtccgcccctagcctcagacacctcccaccagccttagatccttccagggctcaagcacctcccctataattcattgtactctccccactagagcacagaacccctactctgggcatcctctccccggcctcatcccggttccctctccatctacgccgccagcagcactccagttccacagggtaggagacgagaccgcattcttccttgagatccccacgtgaaccctgcccctctcttcagaagctcaggagctcctcccctaaaccctggcctcatgccctgatacccaaggaactggggaccctccccaggatctcaggaggcccctgctccattcagaaacccccatcccaagaaaccttggcctttacccatcccatcctagggctatttattccttctccggaccatcaaacccagaccccacattcccaggtcagagacccactccaaaggaagtgaaagaacctcctgtctaagaagtcaaaaactcccttgctcaggcggaaccctggaagccttgtccccccaaatcccagtctcttgactctcagcatttcggcatcccaggagtgtaggactccatccctccgtgcacattcctccaaggtactgtgtcctttagaagctgaggaggtcggccaggctcggtggctcacgcctataatcccagcactttgggaggccgaggtgggcggatcacctgaggtcaggagttcgagaccagcctggccaacatggtgaaaccttgtctctactaaaaatacaaaaattaggcgggcgcggtggcgggcgtctgtaatcccaggtacatgggaggctgaagcaggagaatcgcttgaacccaggaggcggaggttgcagtgaacggagatagcgccactgcactccagcctgggtgacagagattcagtctcaaaaaaaaaaaaaaaaaaaaaaagcagcagctcaggaggttcctgctcaacctaaggcttcaagacccagttctctggccctcaggattccctcccacaattcataagagaggggtccccaccaggtcccaggagtgctgatgaaagtgtgtggagaggtgattagggggtttgggccaccagatctacaccttcctccatccattcgcctccagcagccccagccccaggtctgggaatgcaggggatgggattcccagatcctctgtggggcacctattcgctatgcctatccattgcccccttgcctgggcctcagtttacccccgacccccaccgctgccctgactcccgctcaccgcacgcccggagcggcgcctccgggacccacgcgcgaacatggcgcgcccgggcagggtcaagccgggccgggtcaggcgaatgtaatccttgcgaccgtcaggccaccgcgcgtccggcctgggaactcggttccgtaaacctgacaccctcgtgggaggagcgcgccccgcaggcccgcccccgggcatgtggtctctccgctgccagggcgccccctgcctagaggtgaactgcacgtagcccggagtgccccgcgggaaaggcctctgccctcccgctccgggccggtgcggggcgtcacaaggcacgacccccagaatcccggcgtgccacgtggcctctcacgggacctggggcttgaaggttctgtagtggaggatggggagactcagaggtggccaactggactagaggggtggcgcgctagggtgcttgtgttgacgttttgtgtcgatttatttcggatgcttatttgggagaggggttaaagacacctcttggctcctccccactggtgaggttccgagggtctccccgatgaatgctgcaacaatgggccccaacctcacccgcagccccagctggtgctcgctgggaacctgggaacctggccctagccaccagagagctagatcttatacgcactcctcccttctcattcccctctcagcgaggccaggttccaaagccctcgtcccctctctcccctcatccttataagcctagctgtccagccccgtccccccaccccaagtcttgagaagtagatcttaaagccttccctcccccacccacatttttctctctccagttatccccttccccagctcagttccagggcggggagcctctccttcacgctctcaggcttggctgtgcctccgggctggggggagggggtcccatggcctcagtcagaactcggcccgggtctctatgcacggagactgcagcggccaggcccttcatcgcgggccccggggacctctccccgccccccattacacatgtccctgtcacttcccgtggagtggagaggtaaaagagaataactaatgaactaaggagtcaccccggcgccccacctcccctccttgcctaacctgtctcccatttctccagcctgggcggaggcagggaaaggagagacagtagggtctgaagattagggatggggtcaggcaatgtgaggtttcctcctattcggaccccttggggatttgaggagagggttccacaggggctcggaagaggcttggctaagggaccagaattagaaccaactcctagaaagaccgggcatttggtggccagtagtgggagggtgagcagggctactcagagagtgacagagtgattggcaggagaggcttcccagaggatgctgctctgcctaacacttttgaaggggcctgaaatggtgcagcaagctgaactgcggtcggtgggtccgggtggagcttgttctcaccacctctccctcctttctcccccggccaacctcctccccggcgcccgaaaaagacacactgagaaatcagagccgggtagactaggtggttaaggagtttatttgggagaggagaatcatatttgttcttccttggggaggggggttctttgaacaataccgaagggtttgggaaagggtaggggtctggaggggagaaggaggggccacagccagacaaaatggcaacacacgatcacaggcactactgacatcacagacatagcagagggtgcaggataggggctccagaccaggcctccaaccaccccaggacgggtggaggtgtggagggagggagggcgcaggggaagggggaagaggggtgggccagtcccacagacccgttggttctgtcctcctattaacctagctgtttcatcacgggagtggggaagggtgtgtgtggtggggtgcttctctctggatcccacgcctcaccctacaagccatatcactcgactcttctcaggccacttccgtcccaagtcgtagccagagccattctcccccacccctaacaaaacccatctggaagctcctatccaagtcccctctccactgcccaaacccagccattgtaaaacattttcttcactgcaccatggggaggggctgccctttctgaaaccaccatggaagccccattctaagccccaccctgtctggaaccctggcttggcccattcctgaatcccacttcttgccttgctcaagatctgtcccctttagaatcaagctcagtctcccaaatgttccaagccacaccctttccataggctctggtaccaatccaagacccacctactctggagcccaccattctgcctcgcttaaagcctcgccccttctagaaccctgccctcagcgcccttccaagccccaccccagaatgctctagcgcactcctctccttcagactccagatccactctgtctggaacccaacccccctgctgacccctccactccacacctcctctccaagaccaccttgggtcctaaactgtcctctctaccccaagcccccccaatctctgcctttctttaaccctggagttggatttccctaacggcctttgttcaggcaggcattgctggaggaaccaaggccagagttgggaggagtggagggagagagaggagagagtctgaagtcacgcccaccctccccacacagccgaggtctgttccctccctgtcctccttttagatccccttaacctcaggggacagggagggtaaacagagaggggccaagggatgcagggaaagggacggggtaagagagggggcccactcaagactgggcacctagtggatgaggggagtggagtgagggcagggctcagacagataaatagatatttatatataatatatatatatatnnncaccccagacagggtctcctggcttgaggggtggagacctagggtataggggtgggaaggggggcagccttcctcctgagctcttgccccccccaggtcctcctgggcttcactgacctgtagagacacaagacacagaaaggagagggggtctgacatgggtggcgccctcagatagggggtgggctgttatgcctttgtcctggctttatgtcttttcttctttcctggagccagcttcatcccagctgcctctgctgagaagatatacctgaccttgcccccactgggttaggtaccaaagagattacagtctccttcctccaacccaaaaaatagtcccttaacaggtactgttctagccatttgtgataaactatattgagcaaaacaaagatccctgtctttgtggagcttatactgaaagcagagatagacttcacacagcgaacatgatgcatgagtggattatctcgtataacatagggtgacaataataagtgaaatggaaaaaataaagtgagctgggcatggtcgctcacacttatagtctcagctacttgggaggctgaggtgggaggatcacctgagcccaggagttcaagtctagcattcctaaagtgctaggattacaggcgtgagctaccacgcccagcctgcgacagggcagagttctgacacaggaggactgtggcctaatttaggatttaacagaatccctccagatgctgtgagtagaacagaatggaaatggagacctgagaagaggtctgggagagatgacagtggaagatgaaggatatattttttgaaggtaggacccacaggattttttgatgaattagatgtgggatgccctttccatcctggctaacccagtgtcagaagctacctccatccaagtattgccaccttcttgccttcccccactttttagccaccccttagccttttcctcctgcctttcctcccctatatcctccctcctatctgagggaaatctcacttctctttttctttttttttttgttttgagacagagtctcgctctgttgcgcaggctggagtgcagtggcgcaatctcgactcactggaacctccgcctcccagattcaagcgattctcctgcctcagcctccagagtagctggaactacagacgtgcgccaccatgcccggctaatttttatatgtttagtagagacggggtttcaccgtgttggccaggctagtctcgaactcctgacctcaggtgatctgcccaccttggtctcccaaagtgctgggattacaggcatgagccacctcacctggcctcttttctttctttctttctttcttttcttcctttctttctttccatttttttttttttttgagacaaggtctcgctctgttgcccaggctggagtgcagtggcaggatcatagctcacggcagcctcaacctcctgggcttaagtgatcctcccacttcagcctcctgagtagatgggtccacagatgcatgccaccacgcccggctaatttttgtattttttgtagaggtgggatttcatcatgttgcccaggctggtctcgaactcttgggctcaagcggcccgcccgcctcggtctcccaaagtgctgagattacaggcatgagccaccaagccccgaccctcacttctcttttaaggcccagcaagaaggccggcaaacctttccagaaccccaccctatccctcttcctcctttgaaattccacactacttccctcccctccagcgttggggagaggcggcagatctatcccctcctcccggattggtgagctcgtctgaccttcaagatccacgcccatttaccctcaccatctattggccttatcacctattggcttatcagtcacttctaagacccacctcctcgtcgcttccgtggctcttgcgtccgctgattcgccactgcgcaagtcccccgatattccctccctttattggttgctctgcttctctccccctgcctttccgccgagttgcccttctacctccctcccattggctcttcattctgtccatcttgaagcaccattcttcttttctccattcattagctagtttttcagctcttagcaggtagttctgcctcttgattggctccttcaaacttcagtccttacttgccccagtaaacgccttacgtactctctacccctgactcttattggttcactgacccgctcgtctccttccttgtaccctccttggccgcaccgctcgccggtcactcaccagactacatctgattggagaaggaggtgggtgcaccctgcgggccgtagccttgctgcccatagtcgccctgaggcccgtagccactgccaccgctgccggctggttgaccatagtcaggctggtagccgccctgaggcccgtaggaatcctggggcccgtacccgccggggccctgcccgtagcctgcatcgccgtaggcgtccccgggtgccggttgtttctcgggggcgccgggaggcgcgcgcaggaacggggcggcccagcctgtctccttaaacacgaaccacaggttgccgacccagagcaccaggttcaggaagccgaacacctgcagggagacaaggctcggctgtggtaccccgcccattgccttggcggccctgcgtgcaggaatgagcatgcggggaatgaatccgtaggctccgcaaggtgggggtttctgaaacccagactctctgagtcccagtgcgagaacgtcgatgtgcagaaaaatcacctctggcggggtgggcgtgttagaagaatttggagccctggggatgctgcgatctatcagtattacatatacaattatttacatatttgcacatatacacattatatacacatttatgcatgtttaaaatgtaaatttgtaatatattcatagtaaaatgtaaggatacaaacttattaaatatagctataccactaacatgcatctaaataaatgtagataaaatatatgtataagtgcacatgtataagatatatgaaacttgcataattttttttttgagatggagtttcgctcttgttgcccaggcgggagtgcaatggcacgatctcggctcaccacaaccttcgcctcccgggttcaagcaattctcctgcctcagcctcccgagtagctgggattacaggcatgcaccaccacaccagctaattttgtatttttagtagagatggggtttctccatgttggtcaggctggtcttgaactcccgacctcaggtgatctgcccgcctcggcctcccatagtgctgggattactggcgtgagctaccgcacccggccacataaagtaattttaagacataaaacactttctgtacctttccttatatgccaagccctcttctaagagctttacatgttataagctcacttaaaattcagttttgggcaggaaatactatctccattttacagttgaggaaactgaggccctagaggctaagttacctgaagtctcacatccagcaagtgacaggaaagaaaagttgtaatcttagcatctgtaacccttgtatacgacttaccttgtgccaggcccttttctgagcactccgtattcttagttcaataaatactcaactttggagcaggacctattattagtcttcgattatgcatgctcaactgaaccttgagaggctgtgactagtttcaggtcagggagcttgcaagaggtagagctgggatttgagcgcagacagtctgactccagccagtagggggcatccaagtggggaaacatttcaagtttttccttcattttgcacatgaggaaactgaggtcccaagagggtgctgagttgcttattttacatgtctaggctgggtctgggatccaggtctcccaaacctgtcatgttccccctttggggacagtctgtggtgtcacagtggttacaattgctagctcatccttcaacgttgttgttggcacgcgttcttcagggacaccccttggatctcccctgactctcctcttattctcccactccaccactccccatgccggactgtactgttttccactctccctcctccagccagcacccagggcttaccaccgaggtgttgagtcccgaggtcacagggtctctcagctccttgcatgtgttccctgtctggcggcagacaggcatctccttgataatgttctctgggtctgtggccatcttcacatctgacagccccttggcccatgccgatgagctaactagccacatgaaggcgaacacagccgtggccagaaagtcctaaggcaggcaggggtgaggaagacagcactgtgagtggactgcttcacgctaggccctggggcctcctcggatcacaggtcccccagaagaggcctgtctctcccctgccttttcagctctcaagcccacaacactttcacctgaaggtggccctcccagcttgagcttgtgtgtgtacatgacacagaggatgtgggagtgtgattgtgatatgtggctgtgggtgttggggggaggggaactctgggatgatttccgaatctgtggaaagtaatgtgtctttctacttttgtctgcatgtgggaatttttgtcattttgtgtctaggctgagggtatgtgagtacagtggtgtaggaatcagtgtgtctgtgtggcatgatgacaggcatgactgtcacagcgaacctctgtgggcctcttcctttgatctaggctgtgtagttgtgtgagagtgggaaggttctcaggtgtgggcctgtctgggattctgcataggctgtatgtctccgtgactctatgactctgtgtcccggatgcctggtgtggattaatagcagcagcaactatatgtgtggctgttatggtggctgtttgcatgtgggcctgtctgggatttggtgtggtctgtgagcatggctgtgtccctggggttccgtgtccccatggtccctacatgcaagtggctgtggggactcaccagcatgggccctttgttattctctcggtacttgttctgcaggaagatgtaggtggccagagcccccatggagtagaggaaggcaaacacggccacggtgacaaagaattcggctgacgaggagtagtccccaactaagaagaccttggtggtgccccctcggcaggtgggtgcatcaaagtacacttggtgcagcctgcaaacagaggtgggcaggtgtggcccagcccctcagaacaccctcaaccctccagcccaatcatgggtccccccatttctgacaaggccccaggaagaggaggaaataaccattcatcgagcacctactatgtaccagtcacatttcactgattgctcaaaacatcctggtgagataggtgttattcatccctcactccaacccaagcactctggcctcttgattatttctagaacttgccaggcatcctccctccctaggatctttgtttgtactggctgttccctttgccaggaatgcttttcccctagatagcttcgggtcttactccctcatctcctttttttttttttttttttttttttgagatggagtcttgctctgtcaccaggctggagtgcggtggcacaatcccggctcactgcaacctctgcctcccgggttcaagcgattctcctgcctcagcctcctgagtagctgggattacaggcatgcgccgctacgcccagctaatttttgtacttttaatagagacggggtttcaccatgttggccaggatagtcttgatctcttgaccttgtgatctgcccgccttggcctcccagagtgctgggattacaggcgtgagccactgcgcccggcctccctcatctccttgaagctttgctcaactgtcaccttctcattgagaccttccctgatctccctacttaaaattaaattgaaacattctctcaaccagcacttcttagcctggcttccttgctccacttttctcgatagtagtggtacccatctgacgtaccaggtattttttttttttttaatcttggtttttgctgtaactacaagagggcagggctttttcctgtgttttcacctccgtttatctccaggccctggaacagtgctggcacctagcagacactcaagaaatgtttatcaaatgaaatgtacagaggcggaaacagaggctcagggaagtgcattaacttgcctaaagtcacacagctggcaagggaatgtcagagttgagatctgaaccttgttttctccctatctcatgttgacttttctcccccaccccagttcaggtccccgagagaaaaaaatgtatgcatagcagaggagaggccagcgactagataacaggaaaagacagacagaaagaaaggagggtaaagggatcttggaacagggtgtgtgtatgtgagggaagaggggaggtgtcctgggactaaggcctttcctgtggtgtgatggaggagaggtgggggttgtagagagaaaatgtctgtgggagaagttctggagcacagtctcagattggaggccaggatcctgagactgagcaaatggtgccaatgcctttgtgtagcaaaggccctgagggaagaggcttgcacttattagtcacctactaagcagtttacataaatgtctcattaatgacagcctccagcaattctctaaagaaggcattattagaccctttttacagatgaataaacagaggcttagcaaggttattacttgcccaaggttgtacagctcctaaatgatggagctaggagttgcatctgggtttgagtttctgtttctagtgggctgggtcaggagagggggtccctaagagggaatgagaggtccttgggtattagggcagtttgggagggattttgctcagggggacccagggccaagactgtttttctaggggacttgtgggctagagccttaggacccaaagttctagacatgggaggcgtggggagggggcacaggggatggttgtggtcttgtggatccccaaaggactggctctaagcagtgtcccttgctgccagctccccctccttccccagactcttttctcccttgcctttgtggacccatggatacctggctgcccctctgcctctcaggccacactttcccggcatctcctctcttttccatcattgctcagggcctgtgctaggttttcttctactttcactcttccatctccccactgggtgatcacttgagcctacatttaccctcagtactcgaagacccccagtttccaactcaacccctgtcctctttcctgagtcccttaaatttattttacttattgaacagacactgatggagcacttattgtgtgccaggcactgtgctaagcacctgatgaatattaactcattgaatgctaaccacgaccctgtgaggtagatattattagtattcctttttacagatgaggaaattgagacccagagtggttatgtgatttggccaaatagtgggggagtctcagaaacctgtgcggggattgtgtctgtgggtctctgtcatcccaccctgcaggaggtaaacatcattgtgagggtagtgcccatgccagccgtgctcattcttgtgcacctagcacccagtgtattgcccggcacacagtgtgagctcaataaatgtcagaattgtttaattgggtttaatttttccctatatctaagcagcacccctcattattctattctctaccataaaaccctacatgaggatctcctcgagtttctctcagtctgctattatcctctttgttaatttatttgttataatgtaggctccatgaaggtagggagttgggtctggtttttttttttttggagatggagtttcgctcttgttgcccaggctggagtgcaatggcgcgatttcggctcccaggttcaagtgattctcctgcttcagcctcctgagtagccgggattacaggcatgcatgaccacgcctggctaattttgtatttttagtagagacggggtttctccatgttggtcaggctggtctcgaactcctgacctcaggtgatccgcccacctcggcctctcaaagtgctgggattacaggcgtgagccactgtgcctggcgggagttgggtctgttttagttactatcatgcttccagcactttgagtagtaccagatataaaataagttctcaaaaatgtgtatagaatgaatgaatggggattaaataataatattggctaacattaattgggtacctactgggttaaggtatgtatatacacctgtcttacttttgtatcttgtttattgcctgtcccttaccccttcgctggaacagagccagagggccacagcctatgtctgccttgctcaccacatagtcctagagtccagagcagtgccaggtacaaggcaggtgctcagtgatcccagtggatgtagcctcgaggtgggagctgggcaggagctacttgcggggggaggtattggccggttccaccctgccccttcctctcccaggtctgttggtatcccagggtgggagcacacctgaaggggtactcgaactcgacctcgatgctgaggtcactctcggtcttgttggcacaatccacgctcagctggagctccccactgtagctgccgcatgtggcaaaggcgaagatggcgaagaccttgggcagcagggatggggatggccacagtgaacctgtgtgcatgtgggagggaggtgccctcctctggacagatcgggggcccagcacaggcagcagcagatggagcagtccccacccccaccccctaatcagggctcatcgggaccaaggacaagctgattacaagggtatggctgtctcttcctgtttctctctctgtgtctctctctgtctctgcctttccatgctgacctccctcttctctgtttgtctctgttgttctctgtgtatctcactgtgtctctgtttctctcggtatctctgtttctctatgtgtctttgtctttctcagatgtctctttgtctctctgtgtctctgatcctctctgcctctgcctatctgatctgtcgatgtctctttttgtctcttttttctctgtctgtgtaagtgtatgcctgtatgtctgtgtctttctgtttcttggtctgtttgtctctgtctctctgtcctgtctctcactcggtctccggatggttctctctctgtctccctcttgcctctgtgtgttggtttctcttttttctgagtgtctctttctctctgtgtctctctctccctcaccctgttttcctgcctctctccctgcgtctgtttctctttgcaatctgttttctgtgtctcctttttctttgtttctgtttgtctcttctctcttatgtctgtatctcttctcatctccatatttcttttttttttctcagtatttccatctctgtctttatcattccctgtccctcattctctctgtcaccttcactgtctctgggtttctctgactttgcatctctcacccagcatctgctacaggctccacctcccccacccctccctcacttcaagagaggaggtaggacgtcacagtctcccacttcacaacgggggtaccctcagccctatgtgacgtcacagctcatctgttttctggcttcagacccctgaaacctcaccctggagcccaattcccccatcccctacaacccccgcactcatccctggctactcgcccctactccacccctgctcttctggaccccatgacctccctctctccctgcactctgccccaacagcccggaccacactcacccattgcagcaccttcacaaagccgaggggctccttgaccacccggaactgacccccagccaccagctgaggagagaaacagtggggaaggggtggggttgttggaggtacagggaggtgagcggcaaggctgcccatcaatgaccccaggggatggagcatgtgacctcggggagagggtgagaaggagaaagtgacaccttggggatggtgtgagccccagggtccaaggactggtgggaaggtctgaagagatggtgagtcagatggcagaggaagtcgggggtgagggagatggggatgaggtcaggactagttaaggagggggagcaggtttgaaacgtaaaggcgagtcggatggggaaggggttcgggtagagaatggggatggagtggggtgcattcgggtgggggggttgtgatggtgaaggtgagtcataacggggcaggagtcggtttggctcaggtgggggaagggtctgcaggggtaaaggtgtgttagacggcggtggcggtagatatttgaggtgatggggatggggaagggttgggactgattgggggtgagtttctgaggtggcaaagacgagagacatggcggagagggtctggactgattaaggtgggggagggctgggacacggcttcagtcgctatgtgttgggggtgaggaggctgggggttttggaaggagtaaaaccggattgtcccctaggtgtgctctgggggaaggggtggtcgcctatgggggtacagtctctgtttgggaggggcgggtgccagccctctcccccatccccgcccccacaccttctgtcgctctatttcctagcttatccgcagcaccccccatcttccttccactctcccctccccttgtcccttgccctcactccagccccaggcccctattcctcccctcgcggtcgccagtaataaacggggctccgggggcccccgctgcggcagtgaggacggccctcgctgcggcaaagagcgcactccttttctccacctcccccttcctccccttcacctgccgcagacccccatccccagcgccggggaccgggtctccgctgccagaccctggccaccacctcccagagtcggctggcctgagcgacccggcctaggcagccgggcggcggcgggctctgtccacggtgctggagcgcgtacctgattcaccacgtccatgtccgccagcagcagcatcagcaatgcagggggcgggaggctcggctagcaagggcggcgcggggcgcggcgggggcggcgcgcgctcgttggaacagcccaggcggctgcagccccgcccctcgcgccccctccttgcccgccacgcgcctgcgcacagcgggttgtaccacagtctcaccggcagccattccggcccggaggctggagccgtgagagcgtgcgggaatatgcgttgggaaaacacaagtcgagggccggggagaggagacctccctgctcggtcctacagtgtgacaactttgccaggctcttttctgagtttgttaaacatgttcactcatttaatgcttacagaagtcctacgttgtagggactattaggccgtttttacagacgaggaaaataattccccagagagcttaagtgactctcacaaggtcagccagctactagctggcagtgcccagagtccctgcagtttaaacacggttcaaggccttccaggttcctttttcatagtctgcattttaagcacaccctgaaactcctgcccccatctagccatctcccttatttctttcttcctctttgtcaaattaatgcctactcgaactctaccactttacctatttattccttagctctctcttaattggaataaccctccttcctgcgactaaaactaggcccatcaaggtcaacagtgatggctatgatgcaaaatccaaaatacagttggggcttaagatgctcaacttcggccaggcgcagtggctcatgcctgtaatcccagcactttgggaggccgaagtggacagtggatcacttgaagtcaggagtttgagactagcctggccaacatagtgaaaccccatctctattaaaaatacaaaaattagctggctgtggtggcaggcgcctgtaatcccagccacttgggaggctgaggcaggagaattgcttgaacccaggaggcggaggttgcactgaggcgagattgcaccactgcactccagcctgggcaacagagcgagactccatctcaaaaacaaacaagcaaacaaaaatactgagatactgtttttcatctttcagggtggtgagtatcaaaaagtttgataacgttccgtattggtaggttggccagaaacaagcgttctcataaatcgcctgtggaagtttcattggtataacgtgtagaaggcaatcgggcaaaatctaaaaaaaaaaaataacaaattcatttactgtttggttcaccttcatacttctaggaattcatcttacagatagactcatacatgtgctaaaagatatatgtataagataatacatgactgggctgtttattttttatttttttttgagacggagttcactctgttgcccaggctggagtgcagtggcatgatctccgcttactgcaacctccgcctcccgggttcaagcaattctccctgcctcaccctccctgagtagctgagattacaggcattcaccaccacgcccatctaatttttttttttttttttgtagttttagtagagatggggtttcgccatattggctagggtggtcatgaactcctgacctcatgtgatctgcctgcctcggcctcccaaagtgctgggattacaggtgtgagccactgggccaggccagggctgtttataataggataaagaatggacactcccaaagtgctcattgttggtagcctgtttaaataaactctgatactatgccgctgtcattataataacatggaactatggaatgattgccaagatatttagttaagtaaaaaatgcaagatgtcaaactgtgtggtaattgtgtacaaagagaagagaagggttatatcagacagagaatagctaacatttaaattgtggctgttttctgtcaagtactctttagagaactttgcctgtattactcacttaaattcttactgtaaccctatgtgacaggtacgacaactatctttgttttacagctgaataaactaagaggcggagaggaattttcctaagttcacacagctggtaaattggtagaaccaggatatgaacccaggaagtctggctccagcacctgttactcttagccactgtgctaacttatcagtacaccatcttttttttttcagcacaccatcttgtatgtctgtgaaagatacctgataatactatttgcttccagagggtagggaaacttttcactttatacccctttgtaccttttgagactccatctcaaataaaataaaaaaataaacagcctggtagtgtatcatcttatacatacaccttttagcacatatatgagtctacctgtaagaaattcctagaagtatgaagctgaacaaaacagtaaatgaatttatttttctagattttgcccagttgccttctacacaggttataccaatgaaacttccacaagcgatttatgagaacgcttgtttctggccaacctgccagtatggaacattatcaaactttttgatactcaccaccctgaaagatgaaaaacagcatctcagtagttttgttttgttttgtttttgagacagagtctcactctgttgcccaggctggagtgcagtggtgcaatctcagttcactgcaacctccgcctcctgggttcaaacgattctcctacctctgcctcctgagtagctgggattacaagcacaaaccaccacgtccggctatttttttttttttttttttttttttttagtagagatggggttttgccatgttggccaggctggttgtgaactcctgaccttaagggatccactgtccacttggcctcccaaagtgctgggattacaggtgtgagccactgcatctggcctacctttggaattttgaaccatctgaatgaatatcttttttttgagacagggtttccctgtgttgcccaggctggagtccagtggcatgaatatggctcactgcagcctcgacctcctgggctcaagcgatcctcctgcctcagcctcctatgtagctgggaccacaggcgtgagacaccatgcccagctaatttttaaatatttttgtagagacgaggtctcactttgttgcccaggctggtcttgaactcctgggctcaagtgatcctcccgcctcagcctcccaaagtgctgagatgacaggcatgagtcaccatgcccagctcaatacctgtttttttaaacatgaaaattcacacatatatgtaatggatacttccctgttgttgccttattggggaagcagtacacaggaggggttaaaagcatggatcttggcatcaaactgcttgaatttgaatgccacctctgatacttcttgtttgaccctggacaggtaagatggtttaaaatgatacctataaggttgttgcactgattcaacgagatgatcactgtaatgcagttagcacagggcccaataaatggttcattttacctcctacacatctctggaatccactcacttctcaccatctcctctgccacctcctctggctaaggcgaccatcattcctgccaattttagcatctccagtctcttccccctcccttctgttttcagcatagccgtcagaacatctatttaaaatgcaatgttaactatgtcactaccctactcaaatccctcccatggctccccactgcttataggaaaaatcccagagtttgggacctggcattcaaggttccacctgatctggcctcagtggcttctcccacctcatccctcaacagtctcccttcactctctgtgccctgcccatgacttgctgttctcacctaactccagcccaaccactttaagcctttgtttcaaggcctaatgtaactcaatcttctcagtcctagtctccaattctggcttccctcaaatttcagtcctggcttgattggcgcagattatacaaatgagacacccctgttctgggagctgggaagagttcctccccgactggtggtctcatcctgcaccactcccaatgctaccttcaattcctctggagtggggctgactcccactttggatgagacctgtcccgtgtttcaaccagttcagtttgccccgagagaaacccagagccggtgcctggcacatagtaaatgcctgataagccttcagtgagcgaatgtaaccccaaaggctgggtgaagagtaaagctggggcaagaagcagagaggacctctgggatctgtgtgggataagagtaggttactgttaggtggtctcaggaaagccaggtgggccctgagtgggttccccagggctgggagccctgacctttgctgtcacctatgttgtctactgatggatttaggttttcttttctttctcaggcagaaagtgggagatgggagacagagcgatctcaatttagccaccctaaaattcctgttgccgtcagaggacccctctgcctaagatgcatcacataccaggccgattccaacctccaggcctctcccctggcaggattcttctctgggtttccttgtcctttccttctcatccgtctacccttcctagtttgacctggctgagccctggtgaaatctctgcctctcttcctctctgggtccaagcacccctcacacccgctctctcccctttcctccatctctgtccagtgccctccccctcccccctcctccactctgcctccagctttttttggctgctgtctcttcctcctcctcctcctcctccctccttccctgacgctgaataatcaggcctggctgtcctggtttctggaaatacccgtgtgtgggcagtggctcagggctagaacaggggatggatggatgggggcccctgggcagccccagacccccagtgcaaagacaacaaaatccagggatgtggtccatgcctgcctcctgctggggaggggagggcaggaggtttattgagcagttggggaggggtgggaattcagagggcgtggacgcaggccatctcgtctcccaagtcctcctcatcgaagcgggagaggatggactcctcgtcgctatagagagagctggttccctgtgccagcaggtcactggcagcattgtccatctcatccagcgtcaggcgacacgcatctgcaatctcctgcttggccagggccacgaaacgtgggtctcgagcaaagaggcccagaccctctgagataagcacctgggggcacaggtgggatcagtgttgacggacggcacagtgtgcacagaaggttcagtgtggataaatgacgtgcccatgagggcatgtagggaagtcagtgggggacaggggtgagcagaggtcgtagggcaaagggatatctacatgcacaacacaggacctggggactcctttccgtcctcctccagtacccacctcctccccttctcccccatccgtcttgtctatatgccctctggactcacagcctccaccaagctgtcggcactgcccctcttcccatggctggggtccgagtgggttccaggcacgtgcagacaggtgaaggtgcgcagtgggccactggatctgccgaggtacccctccccccctgcgccctcttccaccaacaacagcggggcatacaggagccgaccccgctgaggtggtgttgcccaggaaccctgagccagaataaacatcagaggggcagggatggatgagtagggtatgagggtctaggactcaccgctgtgcctacttctttccctcagtatacaactggagtgaaattgaatgggtataagtcaggcttgagtttatttatgtaagagtgcaggaggcctgggtttaaatgtcagctctgccacttactagctgcatgatctggggtaaacctctcaggacctcagtttcctcacaagtacagtgagcattgtgtgcattcattcatatgtgtcctgttcttcagaaggctctgaggccaggcgcggtggcttatgcctgtaatcccagcactttgggaggctgagacaggcggatcacctgaggtcaggggtttgagaccagcccggccaacatggtgaaaccccatctctactaaaaatgcaaaaattagccaggcatggtggtgagcacctgtaatcccagctacttgggaggctgaggcaggagaattgcttggacccgggaggcaggggttacagtgagccaagatctcaacactgtactccagcctgggcagcagagcaaaactctgtctcaaaaaaaaaaaaaaaaaaaaaaaaaaaagggcctgatatgtgctgtgtttgagaaattcagcctaggctgcccccatctctccagaccccagaccccagcaccacctccacagcctcacctgagccctattgggccctgaatttcgcccacgatgataggtgcctgggatgggtaaatcctcacaactgccctggcgctgcagacactggatggtgaaggagggcttccgacctgggggtgggtggggcaccaggggcaaatagcaatgtcagtgcttccccagatctctgtcctgcaggcccgtgggggccccttggatccatccctgctctcacctgcaggtgtggggggcagcagacggcggcgtggtaccaggtgcccatccatgtatctctgagctctgtgaggtggcaaaaggactgagcacgggggagtccctgcctgctcatctaggtaggaaagcctgtgtgggtgggagggccaggggtgaacttgggtctgggcctggacctgggcctgggagatggggcacaaacagtcctccccgacccagttcccacccctcctccaccccagctcatgggttcatcccatgtggcatggccagtgtaccgatcagggacttcctcatcctcatcttgcttgttttgccctttggttcccttgggctgagaatttccttcttctgggatggtgaaaatgagagccccagagcctctcctggggaaagggaggcacgttaggcagaccagatccctcaatatgtggccctggacccctggttcctctcatcccatgccccaacccttacagaaacactgggcttttggatttttttgttgaggacaagtcacataaaattaaccattaaccattttaaagtgaccatgggcttttgtttaatagatgttcatctaattaggactgaaagtttcaaaaaaatcaaagttgacctgtagagagacaccttgaacacaaaactgggcatgtattaggagtggggggagcctgtaaaagctaggcactttatttttttatttctattttttattttctgagacgaggtcttactctgtcacttaggctggagtgcagcagcatgatctcagctcactgcagcctcaacctcccaggctcaatttatcctcccacctcagcctcccaagtagctgggactacaggcatgcgccaccatgctcggctatttttttattttttgtatggacggggtctcattatgttgtgcaggctggtcttgtactcctgggctcaagcgatcctcccaccttggctcccaaagtgctgggattacgagtgtgagccaccgtgcctaggcaagctagacactctgaaatttttttttaaaatttttctttaatctgcttatgtattgtctagcagctaagtgtttgacatgcattacctcatttcatcctttctttatccctgtgaagtaagtgctttgtcatcccccttaaacaggtgaggaaactgaggctcatagaaacgaagtgactaggcagggcacggtggctcaagcttgtaatcccagcactttgggaggctgaggtgggcagatcacctgaggtcaggagttcgaaaccagcctggccaacatggcaaaacctcgtctctactgaaaaaaaaaaaaaaaattagcctggcattatggcgcacgcctgtaatcccagctactcgggaggctcaggcaggagaatcgcttgaacccgggaggcagaggttgcagtgagccgaaattgtgccactgcactccagcctgggagacagagcgggactctgtctcaaaaaaaaaaaaaaaaaaaagtgattagctcaaggtcacttagcaaatggcagaggcagaatgtgaactgaaactcttggtttcacacaatgtgctttttgcattaaacctttgtattgcctttctcatatgaatctcttatcaccctctattcttacctgagcccttgaaacacctccattcttcccaaatttctgcttgaaggcctctaggccctccctcccacccccctcaacttcctgcctcctgaattgcctctatccagtgtctagtccttgccttccctcacaatctacttccagacacttgataatacctgtgggtgttggatccagcctggggcacactgggctgactggaggtgggagtccccctgtcatcatcactgggcccaaaggagagtgaatctggaagtctgtccccgacaggcagagacacagaaatcccggagccccggcgagctgagggctgggagaccatcgtggcctgtggagagtcacaggactgagtgttgcatgcactttgtggctaagtcatttggtcatataacatgtctcccccacaggtccatgaatgtgggccttgccctccaacagcaatggtaaatgtcaaataaataaatacgtaaataaataaataaatatttgcgatagggtcttgtcctgtcaccaggcgggagtgcagtggcatgatcacagctcactgtggcctcatcctcccaggttcaagcaatcctcctgcctcagcctcccaagtagctgggactacaggcttgcaccaccactcctagctaatttttaaatttttttgtagagaggcggtttcactattttgccaggactggtcttgaaccctagggttcaagcgatccttccaccctggactcccaaagtgctgggattataggcatgagccaccactcccagcctcaaataaatatttttctattgcagagggggcttctctgggggagcttcttcccagaagcagtgtcaaaatcactcaggggattgacgaagtattttacaatcaagttcctgggagagtgaaaacttgtccccactttgttagtttccaagtccttttcatcttcctcctccactccctcctgcccctcttcttcctcctcctctgtgtcacaggtgagggcctgccgcatctcaggacccaagtcctgcaggctccgcagaccagcctgtgggggtggagaaataggtaagcaggcagctcagggtctgaactttccctctgtttcccctgcaggcgggtagggtgggggaaggagtccttcagccaccctggccctccgtgaggcctggggcctcagtttccttatctgtgacatgggtttcacaagatcaaaatgggggtcagcctcagccacagcactgccacacgtgcccatccacactaggccctgccccgaagacctgaagggcggaagaggtgctaggggcggcgtcgttgcctagtagccctttttctttcctccgccggaatttgcggaaatagtcctggatcagaaatgtggcgtagaatttgcccacggtgacctcctcctctaggggcaagggagagaaggcaagatcacacaggggccctctgacccagcccacctcgccgcctctctacccaccagcatggacttcccctcgccctctgcccagcgctggttttgtggtggagagcgatcatctgccattcaggggctggcgcggggaactggggcggggatagctcaccgtctggtggggggatgacctcatctagcagcttctgtttcatccgcttccagatctttttgatgacaatccgcagctcctggttggcttgctccaggttccctgcgttggaggaggatgtggggcatgagccaataggaagaacctccacagctgccccctcactgttgggtggggggaacttcacaagctgctaccgcagatgcacaccgcccccattggacggggtggggggaaacaggcctggagaatcctgtcacccattctggggttcagagctaggagtggggcccatgattcaatgagtttgctccttgcaccctccccaggaacgatcccactcctgcccctcccctacaccttctgttttgatcttcagggatgtccggaccagggcaaagagtgtggcgttgaatgtcaccgtcccatctgagttgaggggcatgttcattgccacaagtctctgcaaacacgagagacatgaaacccactctgggaaaatgccgggtatgcaggaacgaatgtcaaggggcagaaacctctgaggatgcgatcaaacacccctccccacccaaggcagatcccttcccacccttgccatgtgatagacagttctctcaggagcctgggggtgggcaggtgcacagaccttgcaggccactcggtgtgggcacagcttcccaaatcccagagggggctggatacgtctcagcagggcaaccacatccaagtgtttgatgcggcccctggaggagttggggaggtaccactggattggcgatgcccccactagccctttctcaaggccccaccagctcatcactacctcctcctaccaataccccagagcttgccagggaagaactggagggcagtcagagagggcagaggatggggcagtggaaactttggggcatctattgactgggtaatgagatgcagcagtcggaggtttgggggctaggggactgtgtagggcaatacattgtcccctggattctaggtaagggtatagagggcatacttggccccagggtcatattcagaccagatcctcttgaattcatcaaggtgatgggggcccaggatggaccaatctctggtgagataatcaaagttgtccatgatcacagccacaaagagatttatgatctgtgggccagtgagcaagggagcagttaggtgaagggcagaacactgtcatggacggatggtgggaggctggggcgggcttatatggtcatgagtctctgggttgatcttgtcatcagaccagccctctcacccactatgaagatctgggctgcccacgtcacatccctgagcccctcagggccagcccccgtgacggtggtggtggttgtgaggaaatggttctcaccaggaaggcacagagcatgaagaagctgatgaaataggcgatggcaaaattgctaccacaggtaaactcttcaccagggccgaagtcagactcaggatcacaccgatttccgggaaggctggcaagcattatctcctgccatgcctcaccagtggcacacctggtgggagtcacacaggggtagcatcctgaaggggaggctatgaagtcatggtaaatggagttgggggaggactggggaatgaggagatgacctacttctcaccaggggctacatctggcacagataacatttcaatattttaacagccagtgtggccatgttgacgacagtcatgtttgcatcttacagatgaggcactgagacctgagaaggggaggcgtcttacagtcagaaagaaaatggctgaggctagaatactctaacagactcctcacatcatagccaggaaacatctcgggctgtatggagccccatgctgccatattattcccatagctcaagcagtctggggctcagagagggtgggtgggcacccacgggcataaggtggcaggggagtgagtagatgtcacctgaacagaagcagcacagcctgtggaaaggtctggaagttgttgtttcggtttatctgtgtgccatcctgaagagccaccttgccgaacatctgtggacacatcaaggctgtgtcagtggggtgaacccatgccccacccatttcacacctcctaatacctaaaggagcctcataaccctgacaaacagggcatcactgctgatctcatttcacagatgtgtagattgacccagggccgtccagcttgtctgtctacctgccacccctactttggggctattcttaacccatcccctgccagcagaggagtgcttaagggatgcttcctagggtccccacttgcctgcatgccaatgacggcatagatgaagaatatcattgcgatgagaagagccacatagggcaaggcctatagggatgggggaggggggcagagaatagatgcacaggctcaggcaaagaactataagccccagaatgcactgctttccctggcctgggcctactgggagatgcagtccatctccaaagtgccaaggactgtggtgtctctcaaatgtgaacatagtgttaagtagatagagtaaggtcagtgagaccagaggtgtgttggaaactgagagcccagaaaaaagagaaaattggaataataatttggaaatgggtatggcatgttgggagatgtagttctgagggtggtaaaggggcaggctgagaagtgtgaaatgggggcgaggtatggtcaaagggatggggtaggggattacctggaaggacttgatgaatgtccagagcaatgtgcggatcccttcacccttactgagaagcttgaccagccgcataactcggaagaggcgaaagaaggtaatggaaatgcgggagctgtcctcagagctctggggtgaggggtgcagtagggatgctcagtttgcatttactccagctatctccctatctcatgctttggccctcccagtacccaaatcactcaggccctagggtaatccggagggatggagggacagagggacatgggaaaagaagcagagagtccctgttattagggtgggctacctcgccaaggtggccaccattctggagggagatatggccaagaaaaaggtgatacaggagatgatgacatcataggcccaaatgaacaaggtgagatatgatggagcagatatagggggtgatggtggggtcattacacaggggacaatgggaaagtttatatggtagtggattaggattaggaaaaagtgggtaatgggaatggaagggagaggagagagtaaaggaggtgatggatcagagacattggagccaatagaggaaatgatggaaccagtggtgtcatagagatgatggagatgagagaaccgatggagaagccaatggagaagccagtgatggagatagggaaccagcagcgttgtcagttgaggtgacagaaccatgtagtacccaatggaggtgatggagccaatgatatagtcaatggtgatgacagagccatgaaagagccagtgtcagagatgatgaagttggtggagaaatgaagccaatgaagtcatcagaaaagatggagccaaagcaggagccagtgaacatgacggagccaatggatgggggatgtagaggcaatgaaagagataacagaaataacaggagaggcatttcaggagatggtggagccagtagataggttacaaaatggaatgagaaagccagtagagggggacttttgctgaacccaacagggactcagaagagatagagctagaatgaggactgagtctccaggagtagggaggatgtgcgtgggagccacccacccacgtgaaagggaaccccgggatagaggtgagggaaggtgtatagggcgagagtggattagtggaaaggccagttctcacattgacttcagtgacggcaatatccactatgctgcccaccacaataagagcgtcaaacgtgttccaggcatcagtgaagtaatgctgcaagtaggagaaaagcagtgccctgtcttctcaaagctcgcaagccagggtagggggccagtagtagtagggggcgccggaggggggcagggcttcgcttggatcacacgatgggcctgcacctgagtccctctcactccctagactcacactccctggctgctgcccgcatcgccaaccccagagctctgcaatgagctccactcccaaggaattcatccactggtgggtggggctagagaaggggggccaccttgggcttgaaggcgatgattttgagcaccatcacaatagtgaagaggccagtgaagaccatgttgaggatgtccatggcatagttgaagggagcagtctgctcatagtgctgcaggagaaaatcaggttgagatggagcctgaggcagagatgccgccacacccaaccaaatattccctggcctgggctgaggcgagtctggggacttgattgcactgtgtattggtcaaacctcttgcactgtctgcctcccattatggatactggaaagtttagttcttgattactagcttttcttgtagttaggcaaggccaggttgactagtgagacataaacataaatctgctgttggttagcagcttgtgtaaaaaaaattttgctttccgatgaaaggatcaaataaggagaggccccaggtgcagctctccctgccttgagtgtggttttgatgcctggagctgtgatcatgaaacaacaatcatgaaaatgaatgccaacttgctaagaatggtgaagcagaaagatagagcatgggtcccggatgaacaatgaacaaacagcctacctctgcacttctcaatacatgaggtaattaccacagttcattgactccaggaggcacatctttttacattttagaatctctgaaattggggcgcattttataacaaatggcaacttacaatggccactggctacttttttttttttttccacattcttacatctccgaaatcagaatgcaacttacaagtactggccatagacttaaagaaatgtggcaaatgtctttatagcttaagttgctgttagttggcagggggtttgttatttgcagccttaaatgttcccaatggttcccaagggattatgtggagataatagggtcaggagtctggcgggggtcaggcagggatcc

SEQ ID NO: 1481 - protein, 3 aa, Homo sapiens
KHG

SEQ ID NO: 1482 - DNA, 1566 bp, Homo sapiens
atcgcgccagttcctcagcctcagtgctatgaaggtgacagcgtgaggtgacccatctggcccgccgcgatgctggcaacacggcggctgctcggctggtcgcttcccgcgcgggtatctgtgcgtttcagcggcgacacgacagcacccaagaaaacctcatttggctcgctgaaggatgaagaccggattttcaccaacctgtacggccgccatgactggaggctgaaaggttccctgagtcgaggtgactggtacaagacaaaggagatcctgctgaaggggcccgactggatcctgggcgagatcaagacatcgggtttgaggggccgtggaggcgctggcttccccactggcctcaagtggagcttcatgaataagccctcagatggcaggcccaagtatctggtggtgaacgcagacgagggggagccgggcacctgcaaggaccgggagatcttacgccatgatcctcacaagctgctggaaggctgcctggtggggggccgggccatgggcgcccgcgctgcctatatctacatccgaggggaattctacaatgaggcctccaatctgcaggtggccatccgagaggcctatgaggcaggtctgattggcaagaatgcttgtggctctggctatgattttgacgtgtttgtggtgcgcggggctggggcctacatctgtggagaggagacagcgctcatcgagtccattgagggcaagcagggcaagccccgcctgaagccccccttccccgcagacgtgggagtgtttggctgccccacaactgtggccaacgtggagacagtggcagtgtcccccacaatctgccgccgtggaggtacctggtttgctggctttggcagagaacgcaactcaggcaccaaactattcaacatctctggccatgtcaaccacccttgcactgtggaggaggagatgtctgtgcccttgaaagaactgattgagaagcatgctgggggtgtcacgggcggctgggacaacctccttgctgtgatccctggcggctcgtctaccccactgatccccaagtctgtgtgtgagacggtgctgatggacttcgatgcgctggtgcaggcacagacaggcctgggcacagctgcggtgatcgtcatggaccgctcgacggacatcgtgaaagccatcgcccgcctcattgagttctataagcacgagagctgtggccagtgtaccccatgccgtgagggtgtggactggatgaacaaggtgatggcacgtttcgtgaggggggatgcccggccggccgagatcgactccctgtgggagatcagcaagcagatagaaggccatacgatttgtgctctgggtgacggggccgcctggcctgtgcagggtctgatccgccactttcggccggagctcgaggagcggatgcagcggtttgcccagcagcatcaggcccggcaggctgcctcttagcccaccaccctggcctgctgtcctgcgtctatccatgtggaatgctggacaataaagcgagtgctgcccaccctccaaaaaaaaaaaaaaaaaaaaaaaaaa

SEQ ID NO: 1483 - protein, 464 aa, Homo sapiens
MLATRRLLGWSLPARVSVRFSGDTTAPKKTSFGSLKDEDRIFTNLYGRHDWRLKGSLSRGDWYKTKEILLKGPDWILGEIKTSGLRGRGGAGFPTGLKWSFMNKPSDGRPKYLVVNADEGEPGTCKDREILRHDPHKLLEGCLVGGRAMGARAAYIYIRGEFYNEASNLQVAIREAYEAGLIGKNACGSGYDFDVFVVRGAGAYICGEETALIESIEGKQGKPRLKPPFPADVGVFGCPTTVANVETVAVSPTICRRGGTWFAGFGRERNSGTKLFNISGHVNHPCTVEEEMSVPLKELIEKHAGFVTGGWDYLLAVIPGGSSTPLIPKSVCETVLMDFDALVQAQTGLGTAAVIVMDRSTDIVKAIARLIEFYKHESCGQCTPCREGVDWMNKVMARFVRGDARPAEIDSLWEISKQIEGHTICALGDGAAWPVQGLIRHFRPELEERMQRFAQQHQARQAAS

SEQ ID NO: 1484 - DNA, 1728 bp, Homo sapiens
ggtgcgcaagggcacggacctcggagctctccccgttcccccgccggccatgaacgccgctcgcaccggctaccgagtcttcctcgccaactccacggccgcctgcacggagctggccaagcgcatcacagagcgccttggtgctgaattggggaagtctgttgtatatcaagagaccaatggagaaacaagagttgaaataaaagaatttgttcgtggccaagatattttcattatacagacaatacccagagatgtgaatacagctgtgatggagttgctcatcatggcttacgcactgaagactgcctgtgccaggaacattattggggtcatcccctacttcccctacagcaagcagagcaagatgaggaagaggggttccattgtgtgcaagctgctagcatccatgctggcgaaagcaggtttaactcacattatcactatggatcttcatcaaaaggaaatacaaggctttttcagctttcctgtggacaaccttagagcctcacctttcctgcttcagtatatccaggaagaaattccaaattacagaaatgcagtcattgtagctaagtctcctgatgctgcaaagagggcccagtcctatgcggagagactgcgtctgggtttggccgtcattcacggggaagctcagtgcacggaactggacatggacgatggtcgtcactccccgcctatggtcaaaaatgctactgtgcacccaggcctggagttgccattgatgatggccaaagagaagccaccgataactgtagttggagatgttggaggccgcatcgcaatcatcgtggatgacattattgacgatgtggagagttttgttgctgccgcggagatcctgaaagagagaggcgcctataagatctatgttatggccacccacggcatcctgtctgcagaggcccctcgcctgattgaggagtcctccgtagacgaggtggtggtgacgaatactgtccctcatgaggttcagaagctgcaatgtcccaagataaagactgtggatatcagtttgattctttctgaagccattcggagaatccacaatggagagtccatggcctaccttttccgaaacatcactgtggatgactagctttcacgagggtctcgaccctggacctcctgagggaaacatggaaaaagcagtgccatgagtgatacagtgtttccttgcaagggaggactcgaaacagcctggagttagatatcttcttttgcccggattgatggggaggagggattaaaagagtcaggaagaagacagagctaatggataaatatcataacatggccttacatgtctgctgtcatcagccctgttccttaaaagttctagctgctttcttaaaaataatctgaaaatcttattgatactaaagaggagttaaaggcacataaagtcttaactctataatgttcatttagttgtttcagctccagggaaatggaggtattgatgttgaacctggttagggaagctgagcgcctgtggccctattactatccagttggcctctcccaaatcaacttcaagtcttttatagagaatcgtatttttctttcagaaattgctatgcctacagccattgaaaaatgaagcattcatgttgttacatcttccaaggatgtcagattagaaaatagcatcccacctctgggtatctgagtggctctgaagttgcaaataaaataatttgttgt

SEQ ID NO: 1485 - protein, 356 aa, Homo sapiens
MNAARTGYRVFLANSTAACTELAKRITERLGAELGKSVVYQETNGETRVEIKEFVRGQDIFIIQTIPRDVNTAVMELLIMAYALKTACARNIIGVIPYFPYSKQSKMRKRGSIVCKLLASMLAKAGLTHIITMDLHQKEIQGFFSFPVDNLRASPFLLQYIQEEIPNYRNAVIVAKSPDAAKRAQSYAERLRLGLAVIHGEAQCTELDMDDGRHSPPMVKNATVHPGLELPLMMAKEKPPITVVGDVGGRIAIIVDDIIDDVESFVAAAEILKERGAYKIYVMATHGILSAEAPRLIEESSVDEVVVTNTVPHEVQKLQCPKIKTVDISLILSEAIRRIHNGESMAYLFRNITVDD

SEQ ID NO: 1486 - DNA, 978 bp, Homo sapiens
ccgcgtcggtgcccgcgcccctccccgggccccgccatgggcctcaccgtgtccgcgctcttttcgcggatcttcgggaagaagcagatgcggattctcatggttggcttggatgcggctggcaagaccacaatcctgtacaaactgaagttgggggagattgtcaccaccatcccaaccataggcttcaatgtagaaacagtggaatataagaacatctgtttcacagtctgggacgtgggaggccaggacaagattcggcctctgtggcggcactacttccagaacactcagggcctcatctttgtggtggacagtaatgaccgggagcgggtccaagaatctgctgatgaactccagaagatgctgcaggaggacgagctgcgggatgcagtgctgctggtatttgccaacaagcaggacatgcccaacgccatgcccgtgagcgagctgactgacaagctggggctacagcacttacgcagccgcacgtggtatgtccaggccacctgtgccacccaaggcacaggtctgtacgatggtctggactggctgtcccacgagctgtcaaagcgctaaccagccaggggcaggcccctgatgcccggaagctcctgcgtgcatccccgggatgaccagactcccggactcctcaggcagtgccctttcctcccacttttcctcccccatagccacaggcctctgctcctgctcctgcctgcatgttctctctgttgttggagcctggagccttgctctctgggcacagaggggtccactctcctgcctgctgggacctatggaaggggcttcctggccaaggccccctcttccagaggaggagcagggatctgggtttccttttttttttctgttttgggtgtactctaggggccaggttgggagggggaaggtgagggcttcgggtggtgctataatgtggcactggatcttgagtaataaatttgctgtggtttg

SEQ ID NO: 1487 - protein, 180 aa, Homo sapiens
MGLTVSALFSRIFGKKQMRILMVGLDAAGKTTILYKLKLGEIVTTIPTIGFNVETVEYKNICFTVWDVGGQDKIRPLWRHYFQNTQGLIFVVDSNDRERVQESADELQKMLQEDELRDAVLLVFANKQDMPNAMPVSELTDKLGLQHLRSRTWYVQATCATQGTGLYDGLDWLSHELSKR

SEQ ID NO: 1488 - DNA, 1145 bp, Homo sapiens
gctccggccagccgcggtccagagcgcgcgaggttcggggagctccgccaggctgctggtacctgcgtccgcccggcgagcaggacaggctgctttggtttgtgacctccaggcaggacggccatcctctccagaatgaagatcttcttgccagtgctgctggctgcccttctgggtgtggagcgagccagctcgctgatgtgcttctcctgcttgaaccagaagagcaatctgtactgcctgaagccgaccatctgctccgaccaggacaactactgcgtgactgtgtctgctagtgccggcattgggaatctcgtgacatttggccacagcctgagcaagacctgttccccggcctgccccatcccagaaggcgtcaatgttggtgtggcttccatgggcatcagctgctgccagagctttctgtgcaatttcagtgcggccgatggcgggctgcgggcaagcgtcaccctgctgggtgccgggctgctgctgagcctgctgccggccctgctgcggtttggcccctgaccgcccagaccctgtcccccgatcccccagctcaggaaggaaagcccagccctttctggatcccacagtgtatgggagcccctgactcctcacgtgcctgatctgtgcccttggtcccaggtcaggcccaccccctgcacctccacctgccccagcccctgcctctgcccaagtgggccagctgccctcacttctggggtggatgatgtgaccttccttgggggactgcggaagggacgagggttccctggagtcttacggtccaacatcagaccaagtcccatggacatgctgacagggtccccagggagaccgtgtcagtagggatgtgtgcctggctgtgtacgtgggtgtgcagtgcacgtgagagcacgtggcggcttctgggggccatgtttggggagggaggtgtgccagcagcctggagagcctcagtccctgtagccccctgccctggcacagctgcatgcacttcaagggcagcctttgggggttggggtttctgccacttccgggtctaggccctgcccaaatccagccagtcctgccccagcccacccccacattggagccctcctgctgctttggtgcctcaaataaatacagatgtcccc

SEQ ID NO: 1489 - protein, 131 aa, Homo sapiens
MKIFLPVLLAALLGVERASSLMCFSCLNQKSNLYCLKPTICSDQDNYCVTVSASAGIGNLVTFGHSLSKTCSPACPIPEGVNVGVASMGISCCQSFLCNFSAADGGLRASVTLLGAGLLLSLLPALLRFGP

SEQ ID NO: 1490 - DNA, 3050 bp, Homo sapiens
ggcacgagggcaccgctgacgcatgcctgcgcgcacagctgggccgggcgcgtcctacgcagcagccgcgagccgggctgcgggtgccagacggttcccggcggggggcaggggcggggcgccgcaggaggccgggactcctggcggaggagccccaaggaggcccgcctgacgactgaccagttgccatggcatcctactacgagatcctagacgtgccgcgaagtgcgtccgctgatgacatcaagaaggcgtatcggcgcaaggctctccagtggcacccagacaaaaacccagataataaagagtttgctgagaagaaatttaaggaggtggccgaggcatatgaagtgctgtctgacaagcacaagcgggagatttacgaccgctatggccgggaagggctgacagggacaggaactggcccatctcgggcagaagctggcagtggtgggcctggcttcaccttcaccttccgcagccccgaggaggtcttccgggaattctttgggagtggagacccttttgcagagctctttgatgacctgggccccttctcagagcttcagaaccggggttcccgacactcaggccccttctttaccttctcttcctccttccctgggcactccgatttctcctcctcatctttctccttcagtcctggggctggtgcttttcgctctgtttctacatctaccacctttgtccaaggacgccgcatcaccacacgcagaatcatggagaacgggcaggagcgggtggaagtggaggaggatgggcagctgaagtcagtcacaatcaatggtgtcccagatgacctggcactgggcttggagctgagccgtcgcgagcagcagccgtcagtcacttccaggtctgggggcactcaggtccagcagacccctgcctcatgccccttggacagcgacctctctgaggatgaggacctgcagctggccatggcctacagcctgtcagagatggaggcagctgggaagaaacccgcaggtgggcgggaggcacagcaccgacggcaggggcggcccaaggcccagcaccaagatccaggcttgggggggacccaggagggtgcgaggggtgaagcaaccaaacgcagtccatccccagaggagaaggcctctcgctgcctcatcctctgaacaccgggcccaacctgatctgatccagatcttgactggggggtctgactcactgtgggaagagaagaggggagtatcctgagttgtaggaactgctttccaactccaagctccctccacaagtttccctcccaggccccccacaccccagtgtggacttgggatttgctgtgctcagcccagggctgataggtccctggtgaagcccagggtggggggtgtcagggcagtggaggggcccgaggagccaggttgcatttattggatggggagctccaaggggcattagtggtttgggctgggccttttgtgccctggtactctgccacctgtgttgctgatggtgtcaaggaaggaggacttggcctagggttgtctgagccggagccggcagctccactggagagcagtgcaggcagagtggagcctcctgctctcctggaccagctgcagacccccaaccctggtttctgtgccatgttgcgctctgaccgtctctgttgcttctcttctggtgttgcttctcctccctcccattctctctgcaactccctgcgggccgcatcgcttgctttcactgccgtctggctaggactcccttcttccttccttccccgagaaggcctcaatgtggcgaggaagatgctggggccggtagggctgtgagatcttctggggaggctagccgggtggggcgggagcctctcagctgtccagattcagaactggagcccactcctcctccctctcgttgcctcagcctgccctcaccctcaggactaggcagaggtgaggctggctcaccctgaagaggtgggataggaccgggggaccccagagggaggcctaggaggggactgcacccatactgcttccctaccacaaatcagggctcagggagaggccatgcggccagcccaggtctgcatgctgagccccatcctccacagcttgccgctgacgctctctcctgtcaccccgcccctgctctctccccagatgtgttctgagctggatgccgggttccagaatcgctgcacagttccaacaggacagcgccttcccccatgcgctgggaggggaccctccatttctccccctcacccatgctgagtgtagagccggggcctgggtggcgggtgggggccgggtgggaggtggcagtagtcttagcctgtgcactctcttccttgggtgtttggtgctggctcctggggactacaaatcccagagtgcggtgtgcccggcctcatttctgatagatcccgcttgggggaggtggtgtatggttacggagctgtgcatcttgggacatgtagtagcccaggtcggcttgtcactcgctgtgagatggggagattttgtcttttgatttagccccagggttagagtgggcagggcagagccgcgcagcacctgggagcggtacctttcccttgggcagcctggggtcccaggaacaagccagggcgagtggcatgtctgcctgagcagggtgtggccccagaaagctgaggagtgtgggctggcagagagcttcgagggcaaggccacccgcgggggcgtgtgtgtggtggggcttggcatgtgatggcagctccaggcatgccgctgcttgtatggctttctttggcctctgaccctgctgcccattctttccaacatcacagatgaactgcctctcctcctccctgcctggggagcccagtggccagggaggggagtggtggagccagtcgctgtaacactgagcctcagagacgaaccaaaaccagctgggctgagctcagatccagggggaaatgctggaagtcaataaaactgagttttgagagcttgaaaaaaaaaaaaaaaaaaaaaaaaaaaaaaaaaaaaaaaaaaaaaaaa

SEQ ID NO: 1491 - protein, 351 aa, Homo sapiens [sequence omitted]

SEQ ID NO: 1492 - DNA, 1086 bp, Homo sapiens
ctaaaggtcccctccccggagcggagcgcacctagggtccctcttccgtccccccagcccagctacccgttcagaccagcagcctcggggggcaccccccgccagcctgcctccctcccgctcagccctgccagggttccccagccatgaatctcttccgattcctgggagacctctcccacctcctcgccatcatcttgctactgctcaaaatctggaagtcccgctcgtgcgccggaatttcagggaagagccaggtcctgtttgctgtggtgttcactgcccgatatctggacctcttcaccaactacatctcactctacaacacgtgtatgaaggtggtctacatagcctgctccttcaccacggtctggttgatttatagcaagttcaaagctacttacgatgggaaccatgacacgttcagagtggagttcctggtcgttcccacagccattctggcgttcctggtcaatcatgacttcacccctctggagatcctctggaccttctccatctacctggagtcagtggccatcttgccgcagctgttcatggtgagcaagaccggcgaggcggagaccatcaccagccactacttgtttgcgctaggcgtttaccgcacgctctatctcttcaactggatctggcgctaccatttcgagggcttcttcgacctcatcgccattgtggcaggcctggtccagacagtcctctactgcgatttcttctacctctatatcaccaaagtcctaaaggggaagaagttgagtttgccggcatagccccggtcctctccatctctctcctcggcagcagcgggaggcagaggaaggcggcagaagatgaagagctttcccatccaggggtgacttttttaagaacccacctcttgtgctccccatcccgcctcctgccgggtttcagggggacagtggaggatccaggtcttggggagctcaggacttgggctgtttgtagttttttgccttttagacaagaaaaaaaaatctttccactctttagtttttgattctgatgactcgttttttcttctactctgtggccccaaattttataaagtga

SEQ ID NO: 1493 - protein, 212 aa, Homo sapiens
MNLFRFLGDLSHLLAIILLLLKIWKSRSCAGISGKSQVLFAVVFTARYLDLFTNYISLYNTCMKVVYIACSFTTVWLIYSKFKATYDGNHDTFRVEFLVVPTAILAFLVNHDFTPLEILWTFSIYLESVAILPQLFMVSKTGEAETITSHYLFALGVYRTLYLFNWIWRYHFEGFFDLIAIVAGLVQTVLYCDFFYLYITKVLKGKKLSLPA

SEQ ID NO: 1494 - DNA, 691 bp, Homo sapiens
ggcggaggcggggtttcagtggcttctggtgctctagggtgagctctgcccggctgcagggatggcggggaggggtaagctcatcgcagtgatcggagacgaggacacggtgactggtttcctgctgggcggcataggggagcttaacaagaaccgccatcccaatttcctggtggtggagaaggatacaaccatcaatgagatcgaagacactttccggcaatttctaaaccgggatgacattggcatcatcctcatcaaccagtacatcgcagagatggtgcggcatgccctggacgcccaccagcagtccatccccgctgtcctggagatcccctccaaggagcacccatatgacgccgccaaggactccatcctgcgcagggccaggggcatgttcactgccgaagacctgcgctaggggactcctcatagccctcagcccttccctcgtttccaggcctctccccaggcttgccatcagccttctttactttttgagcctctgatttccaattccctgctccttcccactccattaagaggctaggtgaggcgcttctaggttgctggggctctgctggttaaggaacaggaagcctgaccatctccctccactacctcttccctgtgctgttacacagtgtcattgttgatgttaaattaaagtcatattcttgcttctctccag

SEQ ID NO: 1495 - protein, 119 aa, Homo sapiens
MAGRGKLIAVIGDEDTVTGFLLGGIGELNKNRHPNFLVVEKDTTINEIEDTFRQFLNRDDIGIILINQYIAEMVRHALDAHQQSIPAVLEIPSKEHPYDAAKDSILRRARGMFTAEDLR

SEQ ID NO: 1496 - DNA, 1593 bp, Homo sapiens
ccgccgccgccgcagcccggccgcgccccgccgccgccgccgccgccatgggctgcctcgggaacagtaagaccgaggaccagcgcaacgaggagaaggcgcagcgtgaggccaacaaaaagatcgagaagcagctgcagaaggacaagcaggtctaccgggccacgcaccgcctgctgctgctgggtgctggagaatctggtaaaagcaccattgtgaagcagatgaggatcctgcatgttaatgggtttaatggagagggcggcgaagaggacccgcaggctgcaaggagcaacagcgatggtgagaaggcaaccaaagtgcaggacatcaaaaacaacctgaaagaggcgattgaaaccattgtggccgccatgagcaacctggtgccccccgtggagctggccaaccccgagaaccagttcagagtggactacatcctgagtgtgatgaacgtgcctgactttgacttccctcccgaattctatgagcatgccaaggctctgtgggaggatgaaggagtgcgtgcctgctacgaacgctccaacgagtaccagctgattgactgtgcccagtacttcctggacaagatcgacgtgatcaagcaggctgactatgtgccgagcgatcaggacctgcttcgctgccgtgtcctgacttctggaatctttgagaccaagttccaggtggacaaagtcaacttccacatgtttgacgtgggtggccagcgcgatgaacgccgcaagtggatccagtgcttcaacgatgtgactgccatcatcttcgtggtggccagcagcagctacaacatggtcatccgggaggacaaccagaccaaccgcctgcaggaggctctgaacctcttcaagagcatctggaacaacagatggctgcgcaccatctctgtgatcctgttcctcaacaagcaagatctgctcgctgagaaagtccttgctgggaaatcgaagattgaggactactttccagaatttgctcgctacactactcctgaggatgctactcccgagcccggagaggacccacgcgtgacccgggccaagtacttcattcgagatgagtttctgaggatcagcactgccagtggagatgggcgtcactactgctaccctcatttcacctgcgctgtggacactgagaacatccgccgtgtgttcaacgactgccgtgacatcattcagcgcatgcaccttcgtcagtacgagctgctctaagaagggaacccccaaatttaattaaagccttaagcacaattaattaaaagtgaaacgtaattgtacaagcagttaatcacccaccatagggcatgattaacaaagcaacctttcccttcccccgagtgattttgcgaaacccccttttcccttcagcttgcttagatgttccaaatttagaaagcttaaggcggcctacagaaaaaggaaaaaaggccacaaaagttccctctcactttcagtaaaaataaataaaacagcagcagcaaacaaataaaatgaaataaaagaaacaaatgaaataaatattgtgttgtgcagcattaaaaaaaatcaaaataaaaattaaatgtgagcaaag

SEQ ID NO: 1497 - protein, 394 aa, Homo sapiens
MGCLGNSKTEDQRNEEKAQREANKKIEKQLQKDKQVYRATHRLLLLGAGESGKSTIVKQMRILHVNGFNGEGGEEDPQAARSNSDGEKATKVQDIKNNLKEAIETIVAAMSNLVPPVELANPENQFRVDYILSVMNVPDFDFPPEFYEHAKALWEDEGVRACYERSNEYQLIDCAQYFLDKIDVIKQADYVPSDQDLLRCRVLTSGIFETKFQVDKVNFHMFDVGGQRDERRKWIQCFNDVTAIIFVVASSSYNMVIREDNQTNRLQEALNLFKSIWNNRWLRTISVILFLNKQDLLAEKVLAGKSKIEDYFPEFARYTTPEDATPEPGEDPRVTRAKYFIRDEFLRISTASGDGRHYCYPHFTCAVDTENIRRVFNDCRDIIQRMHLRQYELL

SEQ ID NO: 1498 - DNA, 2566 bp, Homo sapiens
ctcgcctcagtctcctctgtcctctcccaggcaagaggaccggcggaggcacctctctcgagtcttaggctgcggaatctaagactcagcgagaggagcccgggaggagacagaactttccccttttttcccatcccttcttcttgctcagagaggcaagcaaggcgcggagctttagaaagttcttaagtggtcaggaaggtaggtgcttccctttttctcctcacaaggaggtgaggctgggacctccgggccagcttctcacctcatagggtgtacctttcccggctccagcagccaatgtgcttcggagccgctctctgcagagccagagggcaggccggcttctcggtgtgtgcctaagaggatggatcggaggtcccgggctcagcagtggcgccgagctcgccataattacaacgacctgtgcccgcccataggccgccgggcagccaccgcgctcctctggctctcctgctccatcgcgctcctccgcgcccttgccacctccaacgcccgtgcccagcagcgcgcggctgcccaacagcgccggagcttccttaacgcccaccaccgctccggcgcccaggtattccctgagtcccccgaatcggaatctgaccacgagcacgaggaggcagaccttgagctgtccctccccgagtgcctagagtacgaggaagagttcgactacgagaccgagagcgagaccgagtccgaaatcgagtccgagaccgacttcgagaccgagcctgagaccgcccccaccactgagcccgagaccgagcctgaagacgatcgcggcccggtggtgcccaagcactccaccttcggccagtccctcacccagcgtctgcacgctctcaagttgcgaagccccgacgcctccccaagtcgcgcgccgcccagcactcaggagccccagagccccagggaaggggaggagctcaagcccgaggacaaagatccaagggaccccgaagagtcgaaggagcccaaggaggagaagcagcggcgtcgctgcaagccaaagaagcccacccgccgtgacgcgtccccggagtccccttccaaaaagggacccatccccatccggcgtcactaatggaggacgccgtccagattctccttgttttcatggattcaggtgctggagaatctggtaaaagcaccattgtgaagcagatgaggatcctgcatgttaatgggtttaatggagagggcggcgaagaggacccgcaggctgcaaggagcaacagcgatggcagtgagaaggcaaccaaagtgcaggacatcaaaaacaacctgaaagaggcgattgaaaccattgtggccgccatgagcaacctggtgccccccgtggagctggccaaccccgagaaccagttcagagtggactacatcctgagtgtgatgaacgtgcctgactttgacttccctcccgaattctatgagcatgccaaggctctgtgggaggatgaaggagtgcgtgcctgctacgaacgctccaacgagtaccagctgattgactgtgcccagtacttcctggacaagatcgacgtgatcaagcaggctgactatgtgccgagcgatcaggacctgcttcgctgccgtgtcctgacttctggaatctttgagaccaagttccaggtggacaaagtcaacttccacatgtttgacgtgggtggccagcgcgatgaacgccgcaagtggatccagtgcttcaacgatgtgactgccatcatcttcgtggtggccagcagcagctacaacatggtcatccgggaggacaaccagaccaaccgcctgcaggaggctctgaacctcttcaagagcatctggaacaacagatggctgcgcaccatctctgtgatcctgttcctcaacaagcaagatctgctcgctgagaaagtccttgctgggaaatcgaagattgaggactactttccagaatttgctcgctacactactcctgaggatgctactcccgagcccggagaggacccacgcgtgacccgggccaagtacttcattcgagatgagtttctgaggatcagcactgccagtggagatgggcgtcactactgctaccctcatttcacctgcgctgtggacactgagaacatccgccgtgtgttcaacgactgccgtgacatcattcagcgcatgcaccttcgtcagtacgagctgctctaagaagggaacccccaaatttaattaaagccttaagcacaattaattaaaagtgaaacgtaattgtacaagcagttaatcacccaccatagggcatgattaacaaagcaacctttcccttcccccgagtgattttgcgaaacccccttttcccttcagcttgcttagatgttccaaatttagaaagcttaaggcggcctacagaaaaaggaaaaaaggccacaaaagttccctctcactttcagtaaaaataaataaaacagcagcagcaaacaaataaaatgaaataaaagaaacaaatgaaataaatattgtgttgtgcagcattaaaaaaaatcaaaataaaaattaaatgtgagcaaagaaaaaaaaa

SEQ ID NO: 1499 - protein, 245 aa, Homo sapiens
MDRRSRAQQWRRARHNYNDLCPPIGRRAATALLWLSCSIALLRALATSNARAQQRAAAQQRRSFLNAHHRSGAQVFPESPESESDHEHEEADLELSLPECLEYEEEFDYETESETESEIESETDFETEPETAPTTEPETEPEDDRGPVVPKHSTFGQSLTQRLHALKLRSPDASPSRAPPSTQEPQSPREGEELKPEDKDPRDPEESKEPKEEKQRRRCKPKKPTRRDASPESPSKKGPIPIRRH

SEQ ID NO: 1500 - DNA, 3091 bp, Homo sapiens
atgcaggccttgaggcttcggccagcactcatggagcccggagccttcagtggtgccagaccaggcctgggaggatacagccctccaccagaagaagctatgccctttgagtttgaccagcctgcccagagaggctgcagtcaacttctcttacaggtcccagaccttgctccaggaggcccaggtgctgcaggggtccccggagctcctcccgaggagccccaagccctcaggcctgcaaaggctggctccagaggaggctacagccctccccctgaggagactatgccatttgagcttgatggagaaggatttggggacgacagcccacccccggggctttcccgagttatcgcacaagtcgacggcagcagccagttcgcggcagtcgcggcctcgagtgcggtccgcctcactcccgccgcgaacgcgcctcccctctgggtcccaggcgccatcggcagcccatcccaagaggctgtcagacctccttctaacttcacgggcagcagcccctggatggagatctccggacccccgttcgagattggcagcgcccccgctggggtcgacgacactcccgtcaacatggacagccccccaatcgcgcttgacggcccgcccatcaaggtctccggagccccagataagagagagcgagcagagagacccccagttgaggaggaagcagcagagatggaaggagccgctgatgccgcggagggaggaaaagtaccctctccggggtacggatcccctgccgccggggcagcctcagcggataccgctgccagggcagcccctgcagccccagccgatcctgactccggggcaaccccagaagatcccgactccgggacagcaccagccgatcctgactccggggcattcgcagccgatcccgactccggggcagcccctgccgccccagccgatcccgactccggggcggcccctgacgccccagccgatcccgactccggggcggcccctgacgccccagccgatccagatgccggggcggcccctgaggctcccgccgcccctgcggctgctgagacccgggcagcccatgtcgccccagctgcgccagacgcaggggctcccactgccccagccgcttctgccacccgggcagcccaagtccgccgggcggcctctgcagcccctgcctccggggccagacgcaagatccatctcagaccccccagccccgagatccaggctgccgatccgcctactccgcggcctactcgcgcgtctgcctggcggggcaagtccgagagcagccgcggccgccgcgtgtactacgatgaaggggtggccagcagcgacgatgactccagcggagacgagtccgacgatgggacctccggatgcctccgctggtttcagcatcggcgaaatcgccgccgccgaaagccccagcgcaacttactccgcaactttctcgtgcaagccttcgggggctgcttcggtcgatctgagagtccccagcccaaagcctcgcgctctctcaaggtcaagaaggtacccctggcggagaagcgcagacagatgcgcaaagaagccctggagaagcgggcccagaagcgcgcagagaagaaacgcagtaagctcatcgacaaacaactccaggacgaaaagatgggctacatgtgtacgcaccgcctgctgcttctaggtgctggagaatctggtaaaagcaccattgtgaagcagatgaggatcctgcatgttaatgggtttaatggagagggcggcgaagaggacccgcaggctgcaaggagcaacagcgatggtgagaaggcaaccaaagtgcaggacatcaaaaacaacctgaaagaggcgattgaaaccattgtggccgccatgagcaacctggtgccccccgtggagctggccaaccccgagaaccagttcagagtggactacatcctgagtgtgatgaacgtgcctgactttgacttccctcccgaattctatgagcatgccaaggctctgtgggaggatgaaggagtgcgtgcctgctacgaacgctccaacgagtaccagctgattgactgtgcccagtacttcctggacaagatcgacgtgatcaagcaggctgactatgtgccgagcgatcaggacctgcttcgctgccgtgtcctgacttctggaatctttgagaccaagttccaggtggacaaagtcaacttccacatgtttgacgtgggtggccagcgcgatgaacgccgcaagtggatccagtgcttcaacgatgtgactgccatcatcttcgtggtggccagcagcagctacaacatggtcatccgggaggacaaccagaccaaccgcctgcaggaggctctgaacctcttcaagagcatctggaacaacagatggctgcgcaccatctctgtgatcctgttcctcaacaagcaagatctgctcgctgagaaagtccttgctgggaaatcgaagattgaggactactttccagaatttgctcgctacactactcctgaggatgctactcccgagcccggagaggacccacgcgtgacccgggccaagtacttcattcgagatgagtttctgaggatcagcactgccagtggagatgggcgtcactactgctaccctcatttcacctgcgctgtggacactgagaacatccgccgtgtgttcaacgactgccgtgacatcattcagcgcatgcaccttcgtcagtacgagctgctctaagaagggaacccccaaatttaattaaagccttaagcacaattaattaaaagtgaaacgtaattgtacaagcagttaatcacccaccatagggcatgattaacaaagcaacctttcccttcccccgagtgattttgcgaaacccccttttcccttcagcttgcttagatgttccaaatttagaaagcttaaggcggcctacagaaaaaggaaaaaaggccacaaaagttccctctcactttcagtaaaaataaataaaacagcagcagcaaacaaataaaatgaaataaaagaaacaaatgaaataaatattgtgttgtgcagcattaaaaaaaatcaaaataaaaattaaatgtgagcaaag

SEQ ID NO: 1501 - protein, 909 aa, Homo sapiens
MQALRLRPALMEPGAFSGARPGLGGYSPPPEEAMPFEFDQPAQRGCSQLLLQVPDLAPGGPGAAGVPGAPPEEPQALRPAKAGSRGGYSPPPEETMPFELDGEGFGDDSPPPGLSRVIAQVDGSSQFAAVAASSAVRLTPAANAPPLWVPGAIGSPSQEAVRPPSNFTGSSPWMEISGPPFEIGSAPAGVDDTPVNMDSPPIALDGPPIKVSGAPDKRERAERPPVEEEAAEMEGAADAAEGGKVPSPGYGSPAAGAASADTAARAAPAAPADPDSGATPEDPDSGTAPADPDSGAFAADPDSGAAPAAPADPDSGAAPDAPADPDSGAAPDAPADPDAGAAPEAPAAPAAAETRAAHVAPAAPDAGAPTAPAASATRAAQVRRAASAAPASGARRKIHLRPPSPEIQAADPPTPRPTRASAWRGKSESSRGRRVYYDEGVASSDDDSSGDESDDGTSGCLRWFQHRRNRRRRKPQRNLLRNFLVQAFGGCFGRSESPQPKASRSLKVKKVPLAEKRRQMRKEALEKRAQKRAEKKRSKLIDKQLQDEKMGYMCTHRLLLLGAGESGKSTIVKQMRILHVNGFNGEGGEEDPQAARSNSDGEKATKVQDIKNNLKEAIETIVAAMSNLVPPVELANPENQFRVDYILSVMNVPDFDFPPEFYEHAKALWEDEGVRACYERSNEYQLIDCAQYFLDKIDVIKQADYVPSDQDLLRCRVLTSGIFETKFQVDKVNFHMFDVGGQRDERRKWIQCFNDVTAIIFVVASSSYNMVIREDNQTNRLQEALNLFKSIWNNRWLRTISVILFLNKQDLLAEKVLAGKSKIEDYFPEFARYTTPEDATPEPGEDPRVTRAKYFIRDEFLRISTASGDGRHYCYPHFTCAVDTENIRRVFNDCRDIIQRMHLRQYELL

SEQ ID NO: 1502 - DNA, 1404 bp, Homo sapiens
tcaggggtaggagcgggagccgagaggaggcggaggagatggcgtcccagccgccacctccccccaaaccctgggagacccgccgaattccgggagccggaccgggaccaggaccgggccccactttccaatctgctgatttgggtcctactttaatgacaagacctggacaaccagcacttaccagagtgcccccacctattcttccaaggccatcacagcagacaggaagtagcagtgtgaacacttttagacctgcttacagttcattttcttctggatatggtgcctatggaaattcattttatggaggctatagtccttatagttatggatataatgggctgggctacaaccgcctccgtgtagatgatcttccacccagtagatttgttcagcaagctgaagaaagcagcaggggtgcatttcagtccattgaaagtattgtgcatgcatttgcctctgtcagtatgatgatggatgctaccttttcagctgtctataacagtttcagggctgtattggatgtagcaaatcacttttcccgattgaaaatacactttacaaaagtgttttcagcttttgcattggttaggactatacggtatctttacagacggctacagcggatgttaggtttaagaagaggctctgagaatgaagacctctgggcagagagtgaaggaactgtggcatgccttggtgctgaggaccgagcagctacctcagcaaaatcttggccaatattcttgttctttgctgttatccttggtggtccttacctcatttggaaactattgtctactcacagtgatgaagtaacagacagcatcaactgggcaagtggtgaggatgaccatgtagttgccagagcagaatatgattttgctgccgtatctgaagaagaaatttctttccgggctggtgatatgctgaacttagctctcaaagaacaacaacccaaagtgcgtggttggcttctggctagccttgatggccaaacaacaggacttatacctgcgaattatgtcaaaattcttggcaaaagaaaaggtaggaaaacggtggaatcaagtaaagtttccaagcagcaacaatcttttaccaacccaacactaactaaaggagccacggttgctgattctttggatgaacaggaagctgcctttgaatctgtttttgttgaaactaataaggttccagttgcacctgattccattgggaaagatggagaaaagcaagatctttgatatctttcatgtttgcctgcagttgaacaatactttagagtactttttaaaattatttctcacaaagaaatgaatgtacaatccaatgaaaacatttgttattggctatttcaggtgttttgctgctagaaattattaaagttacacactagta

SEQ ID NO: 1503 - protein, 403 aa, Homo sapiens
MASQPPPPPKPWETRRIPGAGPGPGPGPTFQSADLGPTLMTRPGQPALTRVPPPILPRPSQQTGSSSVNTFRPAYSSFSSGYGAYGNSFYGGYSPYSYGYNGLGYNRLRVDDLPPSRFVQQAEESSRGAFQSIESIVHAFASVSMMMDATFSAVYNSFRAVLDVANHFSRLKIHFTKVFSAFALVRTIRYLYRRLQRMLGLRRGSENEDLWAESEGTVACLGAEDRAATSAKSWPIFLFFAVILGGPYLIWKLLSTHSDEVTDSINWASGEDDHVVARAEYDFAAVSEEEISFRAGDMLNLALKEQQPKVRGWLLASLDGQTTGLIPANYVKILGKRKGRKTVESSKVSKQQQSFTNPTLTKGATVADSLDEQEAAFESVFVETNKVPVAPDSIGKDGEKQDL

SEQ ID NO: 1504 - DNA, 909 bp, Homo sapiens
atgaacactggaccctattactttgtgaagaatttacctcttcatgaattaattacacctgaattcatcagtacctttataaagaaaggttcttgctatgcactaacatacaatacacatattgatgaagataatactgttgccctgctaccaaatgggaaattaattttgtcactggataaagacacttatgaagaaactggacttcagggtcatccatctcagttttctggcagaaaaattatgaaatttattgtttccattgatttgatggaattatccttaaacttggattctaagaagtatgaaagaatatcttggtctttcaaagaaaagaagccattgaaatttgattttcttttggcttggcataaaacaggttcagaagaatcgacaatgatgtcatatttttccaagtaccaaattcaggagcaccagccaaaagtagcactgagcacgttgagagatctccagtgcccagtgctgcagagcagcgagctggagggaacgccagaggtgtcctgccgggctctggagctcttcgactggctcggcgccgtcttcagtaatgtcgacctaaatgagcctaataatttcatatcaacctattgctgtcctgagccaagcacagtggtggcaaaagcttatttgtgtacaatcactggcttcatacttccagagaagatctgtctcctattggaacatctctgtcactactttgatgaaccgaagttagctccatgggttacactgtccgttcaaggctttgcagacagccctgtttcttgggaaaaaaatgaacatggttttcgaaaaggaggagaacatttatataactttgtgatttttaataatcaggactattggcttcagatggctgttggggcaaatgatcactgtccaccataa

SEQ ID NO: 1505 - protein, 302 aa, Homo sapiens
MNTGPYYFVKNLPLHELITPEFISTFIKKGSCYALTYNTHIDEDNTVALLPNGKLILSLDKDTYEETGLQGHPSQFSGRKIMKFIVSIDLMELSLNLDSKKYERISWSFKEKKPLKFDFLLAWHKTGSEESTMMSYFSKYQIQEHQPKVALSTLRDLQCPVLQSSELEGTPEVSCRALELFDWLGAVFSNVDLNEPNNFISTYCCPEPSTVVAKAYLCTITGFILPEKICLLLEHLCHYFDEPKLAPWVTLSVQGFADSPVSWEKNEHGFRKGGEHLYNFVIFNNQDYWLQMAVGANDHCPP

SEQ ID NO: 1506 - DNA, 3736 bp, Homo sapiens
cagagtaatgacatggttccttccatcctccaaaggtgaccaataatagtttgtaagtatcattatgaactaatgaattttcaacatatttgatatatttcaatccattgccatcattgttcttatcgatatttgagttggctcactttgccagtaagagtctattcaaattggcttctgagtccatttgacacaacacctttgatctttgacagtttccttggttttaggtgctagatgatttctcaggctcaccttagacatttcctgccacagacttagaatcagccatttctctaaggaccctgattccatttcatgagaaatgatagagaccacaatcaaaacaagtcatgaatttatactgatattttcaattcaaattaaagatgaggtttttgctaaatttttttgagtttatatttgtatgtcttatgctgaaaaatcttgtttcctaattagtaacataattattcatttgatgggtaaatattttagggccgattctttggttttatagccaagataccctgttgataaagtcttgtgggagcaattataagactggcttattttgaagctttttaaaaaagacatccttacctgttttaactgtagattatattaacttaaataggtacagcccacgcttgatggaaaaaattctccaaatggctgaaggtattgatattggggagatgccttcatatgatctggtgctgtccaaaccttccaaaggtcaaaaacgccacctctcaacatgtgatggtcaaaatcctcctaaaaagcaagccggttccaaattccatgcgagacctcgttttgagcctgtacattttgtagctagtagttcaaaagatgaaggacaggaagatccttatggccctcaaacaaaagaggtaaatgaacaaacacattttgccagcatgccaagagacatctaccaagattatactcaagactctttcagtatacaagatgggaattctcagtattgtgattcatcaggattcattctcacaaaagaccagcctgtaacagccaacatgtattttgacagtgggaaccctgccccaagcaccacatcacagcaggcaaactctcagtcaactcctgagccttcaccatcacagacatttcccgagtctgtggtagccgagaagcagtattttattgaaaaattaacggcgacaatctggaagaacctttctaatccagaaatgacttctggatctgataaaattaattatacatatatgttaactcgttgtattcaggcgtgtaagacaaatcctgagtatatatatgctcctttaaaggaaattcctcctgccgacatccccaaaaataaaaaacttctaactgatggctatgcttgtgaagttagatgccaaaatatctacttaactacaggttatgctggcagcaagaatgggtccagggatcgagctacagagctagctgtaaaactcttgcagaaacgtattgaagttagagttgtccggcggaaattcaagcatacatttggagaggacctcgtggtgtgtcagattggcatgtcctcctatgaatttcctccagctctgaagccaccagaagacctggtggtgctgggtaaagatgcttccgggcagccaatttttaatgcttctgccaaacactggaccaattttgtcattacagaaaatgcaaatgatgcaattggtatccttaacaattctgcctcattcaacaagatgtcaattgaatacaaatatgagatgatgccaaatcgcacatggcgttcgtcgagtgtttttacaagatcactgcttagctgaaggttatggaaccaagaaaacaagtaaacatgcagctgccgacgagtttgaaaattcttcaaaaacacagcccacttatccatctgtcaaaagttcacaatgccatacaggctcttcacccagaggatctggaaagaagaaagatataaaggctctgtagtttatgagaattcttcaaatcccgtgtgcacgctgaacgacacagctcagtttaaccgaatgacagttgagtatgtctatgaaaggatgacaggcctccgctggaaatgcaaagtgattctagagagtgaagtaattgcagaagcagttggggtgaagaaaactgtcaaatataagctgctggggaagctgtgaaaaccctcaaaaagacccagcaactgtcattaacaacttgaagaaaggagctgttgaagatgtgatttcaagaaatgaaattcagggccgctcagcagaggaggcttacaaacagcaaatcaaagaagataatattggaaatcagctgctgagaaagatgggttggactggtggtggtttaggtaaatctggtgagggcatacgggagcctatctcagtgaaagagcagcataacggaagggcttggtctggatgtagagagggtgataaaatgccaagagagatattgaacagatcatcagaaactacgaaagctccgagagccacacagatttgactttctctagagagctgactaatgatgaacggaagcaaatacatcagattgcccagaagtatggtcttaagagtaagtctcatggggtgggccatgataggtacctagtggtaggtagaaaaagacggaaggaagacctactagatcagctcaaacaggaaggccaagtgggcattacgagcttgttatgcctcaagcaaattgagatcttactaatttattttgtaaatgcctaatgaggtagatttttgaattaaagaaatgctacatgttccggttgcagagtatattcataagatgtctcaccttgttcatttcacatagtggtttattagatattggaacctaaagaattctgtccacttgtattagcttaatccagcagatgatattgtgcagttactgtttgtgtctttgatattgctgtgtccctcagattttagtagtttgacaagcaagaacacatatccaaatggaattttaccctgagaaattagcattttaaagggcatagcacagcaatctgcaacaatatgtaaagttgatattgactacaataaaaatccagtcttaattccagatttactgaaaatgtcagatcattttgtattaatctattttcatctttgtgtgaagccagttatagaatgtttgacaataaattgtgctgtacatgtccttaccaacaaatgatgtaaaactttcttaaagtaattttagtgttatttatttataacttctaccatgtgatttccagactattggaagtgatttactgtatcttgtggggatatatttttaacaaattctactcttcacgctgagagagcactacttgagagagcagttgaaagtttcaaaaactttggttcaatctgaagaaaggaagcttgaactgtttgttcttggtgccttgcagagagactcacagcaactctccattatagctttcacacggtttggatgtgcagcacatccaaggcacaccacagctgtggtagagcttggtaaaagactgaatacattggtgctttgatgaaaaggtcagttggctggtccctctctcaaaaagcttattaagcctgaaaagccaactttgtaacatatttaaaactgctattttcgcttatttctggaatgtaaaaaaaaaatgtataaaaagaattagtgtatgcttcctgaataaaaaggagccaaagttgatcagaaaaaaaaaaaaaaaaaa

SEQ ID NO: 1507 - protein, 388 aa, Homo sapiens
MEKILQMAEGIDIGEMPSYDLVLSKPSKGQKRHLSTCDGQNPPKKQAGSKFHARPRFEPVHFVASSSKDEGQEDPYGPQTKEVNEQTHFASMPRDIYQDYTQDSFSIQDGNSQYCDSSGFILTKDQPVTANMYFDSGNPAPSTTSQQANSQSTPEPSPSQTFPESVVAEKQYFIEKLTATIWKNLSNPEMTSGSDKINYTYMLTRCIQACKTNPEYIYAPLKEIPPADIPKNKKLLTDGYACEVRCQNIYLTTGYAGSKNGSRDRATELAVKLLQKRIEVRVVRRKFKHTFGEDLVVCQIGMSSYEFPPALKPPEDLVVLGKDASGQPIFNASAKHWTNFVITENANDAIGILNNSASFNKMSIEYKYEMMPNRTWRSSSVFTRSLLS

SEQ ID NO: 1508 - DNA, 103738 bp, Homo sapiens
cctggcctgataggatttttttaaaaagcatttcactctttcagtggtaataaaataatgatgtgccttctagttgacagcatgttaacattggtggattatggtgggacatgatctcggctgatcatttaacttccaggtgttctttttgcatccttaagatgggaacggtacacagctcagtaaagggtgagatgatccaacctacagaaggaagggacatttagcagttttagtgctttgataacttgagtttatttatcattcatatcaatctatatcttaatagaatttttggaaattcatttctgaaactttatatttcaaagaaccattgtaaatgaaattttcctaaattttaagttcttattcctgttaaacaaaatagtatatcttacagttctgttgggaatttccaagtactgaaaaggatctgctaagtacctaaccagtagataattccttgcctccctgcagtgtgcagggaggtcctgtggggagccagcagggcccacaagccattgcaggtcaccacggatgcgctgcagaggagggggccgtgaggggtcatgagtcaggctggttggggaaggtgtccagctgtgtggaggtcaggcggaagagaggtggctgtgaggtgaagatctgagacaggtgtaagggccagggcacagttgagacgtgctgtcactggaatgactgtaaactcggatgcagtgaaatgccggctgtaactcggatgaattcctaggttaatgacaacaccaacacagcggggtcccctggggaggtgctctctcgccggtgtgtgaaccttctgaagactgcgttgcggccagacatgtggcccaagtccgaactcaagctgcagtggttcgacaagctgctgatgactgtggtgagtgcgagtgtctgaagggccagggcagcgccaccgaggccactagcagatactgtcacctgggcagggactggacatttgtggatcactctgacccttatgcctaaaccccaaatctcctgtcccctttgccagtcatggcctctcccacattggcctccactgctctctccagggagagagtttgactaattgataatggctttgctcttgaggctttaggagttcgagaccagtctgggcagcatagtgagatcccaattctacaaaagagaagacagaaaattagctgggcatgatggtgtgagcttgtagtcccagctacttagaagagcctaaagcaggagggttggctgaacctgggaggttgaggctgcagtgagctatgattggtgccactgcactacagcttgggagacagagcaagcaagacctggtctcttaaaaaaaaaaaaaaaaaagaaaaagaaaagaaaagaaagaatggctttgggacttgagctttcatgctggccccaactacacgtaggagtgtttaaccttaatacagttctcttgcattttgtggactcgtttctaaaacttacctaccagttggcttgggataagcatttttaattgactgttgcaacaacctttaagatgagctttggatttttaaaacagatttaatgatggagctataatttgttatcaagtaccatgtagcacttaggtaacaaggagctagtcccaaaatgctaattatcttattttggtggctgtttttttgcttataaaaaccatgatcctgtgcttttctggtggcagcaaaagctattttcttgccttatccacatttggtttttctagttcttgacaggatttggaaacttttgctattgagattataaaacctattgcaagcacttgttattctggactgcaaaggccatgttgcttctatttgacctctgctatgaaccacgaactctgtcttctattttattctgtttctttggtttgtttttattaatttttagtgcttccatcatctgttagttgattccatgatacatagtttgaaagatgcttgtctttggaaggatatttgttttttgtttttgtttcgtttttttgagacagtctcactctgtcgcccaggctggattgcagtggcacagtcttggctcactgcaacctccacctcccgggttcaagcgattctcatgcctcaacctcccaagtagctgagactacaggcgtatgccaccatgcctggctttttgtgtgtgtgtgtgtgtgtgtgtgtgtgtgtatttttagtagagacggggtttcaccatgttgaccaggccagcctcaaattcctggcctcaagtgatccatccacttcagcctcccaaagtgctgggattacaggcgtaaccactgcgcctggcctggaaggatatttgtatttttgtatcttaagaaaatgggaagagaaaagcaaaattcattgcaggaacttttttagaattttaccaatttcaaaatattaatattgtttattatcgaatattaatattttagtaagtatttttaaaaaagagtttgagtagttatttaaagtgattttataaagtaatcattcttgtgaaatacgattgtcattctctagtggttttttttacttagtctccaaataattaatccagtgctagattttgccagactcttgtttctagaatttgttgtcattgagtgtttgtttcctctgtgagtggcctgtgttgtccattgcaggagcagccaaaccaagtgaactatgggaatatctgcacgggcctagaagtgctgagcttcctgctaactgtcctccagtccccagccatcctcagtagcttcaaacctctgcagcgtggaattgccgcctgcatgacatgtggaaacaccaaggtgttgcgagccgtccacagccttctctcgcgcctgatgagcattttcccaacagagccgagtatgtgacctttcccaccggtgcttttctttcaaagtggacggtgggcgcggagcttgctatgagagcgcttgtcctccagttattgtgtcgagcgctttgttatcactttcctttctacttgcaaactttcttttaaaaactgacatggaaacatagaatgggccgggtgtggtggctcacgcctgtaatcccagcactttgggaggccgaggcgggcggatcacctgaggtcaggaattcaagaccagcctgaccaacgtggagaaaccccatctctactaaaaatacaaatttagctgggtgtggtggcacgcacctgtaatcccagctactcgggaggctgaggcaggagaatcgcttgaacccaggaggccagaggttgcggtgagccgagatcgtgccattgcaatccagcctgggcaacaagagcaaaactccatctcaaaaaaagcatagaatggcagctctcactgaatgttgtctgctttggaaattcagttcttcatcagttgaatattatttttttaagctactaaagagaagtattaaaagtattcaaatgttgaacatttggcaggatcaaattttagcatgttataaataagtatatttcaaggagattctgttagcttttttgagtattctgcatatagctgtgtagaacgggaaccagcccagaggtgaggcccacactgtcctgcagggagagaagtgcccgtgccaatccctcctgatacccaagcagccagcactcagtccctggcatcagcactggtgggcccaagagccataaccacagtgcctgggtccctgccctgttgtaggtacttccagtgtggcctccaaatatgaagagctggagtgcctctacgcagccgtcggaaaggtcatctatgaagggctcaccaactacgagaaggccaccaatgccaatccctcccagctcttcggtgagtgtgtgtctgtcctggtgttcgtggtggctcagtttggcctctttccccgctcactggacgtgcttccctttgggaaagggctccggttgttgggcagagctttgagccgctgcgttgttcaggtgtctgttgcctggggccctcaaggccgccgtctcctgtagactgcatcccccttcgccgatgcttgctctgtgctccctcctcagcttccagcacaggctttggtgtgagggatgttgccagggtgcatgtgtcctgccaccccagtgtcacactaaacaggcaccgcaagagctacatgacaatgtgtggactctgcctttcaccaccagcctgcctgtgagtcagccactcacaagatgagaacttgtcccgtcttattgctgaggctctggctggcccaggtgagacggaaactgcctccctccttaggtgatcagggcagctgggtcactctggccccaggtacgcaggagtcagatttatagatgtgccctcagttttgtggcagacacatgtctttgatcctagactttggattagtgcctcaaaatttattttctcctttattgcatattcattgggtgaaactttgaaaatacaaatgaaggaatactaagtagaagtcacctgtcaggctctcttcccaatagcaatcagtcccagtattttagagtgattatcatattctatacacacgtatacaaatacctatatagatagcccttgttaggcaaacgcttttctgaatttgccaactgaatatatttggatgagttccttgctctccaaacttgccaggagctaggagaatttggttaacatggtgtcccttgctctcttagcttgctgtctctcttcaggcagcagctgggtgcggagagtgaggagtgcttctgggtctttttttaagtggagtcaccctgcagaagatgccagcttccatcacagggcagcacaagtatctcctcccgctgctcattctctggaggactcttgttgagaagggctgacctcatgggccctgcctccctcctctgtggggtgtcgaaggccggggcagcctcggggtgaggtgggcctaggaagttggccacaccgtcgtccccatgccggatctggggtgtagtctcagccgtctgctccatagaggagagcatagcactcgggaaccacagagtacaccccatttccatcactgtcatcaagtgtcatgggttgcctgggttacaaccagactggtcttttgttgactgctctgttaagaattggtcttttaacaaagctagcctgaaatcacctcataactggcaaacactctttggttgatccgtgaatacagatttaaaatttaacgagtagggccaggtgcagtaactcacgcctataatcccagcactttgggaggctgaggcaggcggattacttgaggtcaggagtttgagaccagcctggccaacatggtgaaaccccgtctctactaaaaatacaaaaattagccgggcgtggtggcaggtgcctgtaatcccacctactcgggaggctgaggcaggagaattgcttgaatcctggaggcagaggttgcagtgagccgagattacgccactgcactccagcctgggtgatagagcaagactcgacattaaaaaaaaaaaaaaaaaaagtttaatgggtaggttgaaatcaaggtgattgtcacaatgccaaatatgaaagataattctactcagtgtttctgttctagtattggctttgctgatttttattgatcttaggctgtttctcagaatgaagtgcaaattgaattcaaagatatttggcatgtcctttagatagactagatttttcttcctctttttcttatttttcccaaacctattataggagtaaaaacttagggtaatttgccatcacccaaaaataaaatgcagaactgaaggtaagaacgttgtttctactgaagcacaaaaatcagttctcattcatgatgatttgatctagttgagaattaggagtggaaatacagtgtttcattcagaatgtagcgtgagccatgtaaaagctcacagtgttgacactgggattaactatgcttttgtcagaatacattgttttgaataatgtgttgctttcactctgtttttcgtggttgttacttttctgtgaaacacttggcaatttctacattttagggacccttatgatcctcaagtctgcctgcagcaacaaccccagctacatagacaggctgatctccgtctttatgcgctccctgcagaagatggtccgggagcatttaaaccctcaggcagcgtcaggaagcaccgaagccacctcaggtgatgtgctggccaccgggggcctttcctcagactctgttgaacagagaacagactctgttgtgcaggctggggctgaactctaaagggaatgtgcattcaccaagtcctgttgtttggtcgtaaatcgttaccatttgctcttcaatgtaggggtttaaaaaacaactcattgttaaaaatggactgttattaagctgggtacggtggcacgcctgtggtcccagctcctcagcgggctgaggcaagaggattgcatgaggcccagagttggaggctgctgtgagctgtgatcacgcctgtgaatatccactgcactcagtctgcaacagattgagactctctctcacgtgtgcatgcgtgtgcatgtgcacacacacacacacctgcttttaaagtctgtgagtgtaagaatgcagaaattttaaaatagttggacttttagatgctgcattcaccactgagacttaccagtgcttactgtgaaacagatactgcttaatcagagttgctggttctgaagagttaagtcacaggctccagagctgagcagtgggctcctggaatctggatgctgtgtgggggtgtggggctgcctggcaggggctgtggtgggcatggcttctgggtgcacctcagagtacaggggccatgattaggacttcacagctgggtgtggagaggccggagccacctgcactggtccgtcagctccctcatccctctccctgcagagagggctacatttccaagatgcacgtaagaacatatgagtgcttcaaatcccagagctctagttgcaggaaaaaacattgagggggaaaatgggcagaacccagcatgccaggcaaggcttagtggctgcctgtttaaatcaacgtttagagacccgtgggtttgttcttaattggggcgagcaggtacaagcgagctggtgatgctgagtctggagctggtgaagacgcgcctggcagtgatgagcatggagatgcggaagaacttcatccaggccatcctgacatccctcatcgaaaaatcaccagatgccaaaatcctccgggctgtggtcaaaatcgtggaagaatgggtcaagaataactccccaatggcagccaatcaggtgagctgggacggtgtgccatgtgatctccctttcaataaaagaaaattcaagcctcaacatcttggtctttctgaaacttgaagcaaaacatttttttctgctgtaattgcactcacagcatcttttcttaattaagatggatttttgtctgtaatctcagcactttgggaggctgaggtggacagatcacaaggtcaggagattgagaccgtcctggctaacacggtgaaaccccgtctctactaaaaatacaaaaaattagccaggcatggtggcgggcgcctgcagtcccagctactcgggaggctgaggcaggagaatggcgtgaacccaggaggtggagcttgcggtgagctgagatcacgccattgcactccagcctgggcgacagagcaagactctgtcttggaaaaaaaaaaagaaagatggatttttttcagtgcacttaacagatgttaaatagaaactgagttgctcatcttaatgtggctttgctcctcttaaaatgttaaatgaagactcactcctgtcatcccagcactttgggagaccgaggcaggtggatcacttgaggtcaggagtttgagaccagcctggccaacatggtgaaaccccgtctctactaaaaatacaaaaattagtcaggtatggtggcgcatgcctgtaatcccggctgctcaggatgctgaggccagagaatcgcttgaatccaggaggcagaggttgcagtaagccaagatcacaccactgtactccagtctgggcatcacggcgagacactgtcttagaaaaaaaaaaaagttgttaaatgaaccttgttaacctttttatggcgataaagataagacaaataatacttaaagtaaaagtaataatagagactatcatttcacttagatgcttgcaaacttctgatttgttttataatttacagttgctttctctctaaaatgagttgtagcccctacgaaaattacattggcatgtcttgattttaagcatccaaagataaagccatctttgccttactgtttaggaatgaccttgtcttattgtgcttgataaaattgtaggagcttaaaaaatactagagcagatggttgaaatacttttaactgcgtcttttctcaaatttcatacagacacctacactccgggagaagtccattttgcttgtgaagatgatgacttacatagaaaaacgctttccggaagaccttgaattaaatgcccagtttttagatcttgttaactatgtctacaggtaattacagcaattaatcaagtactacatatattggtccttaatgtgctccccggccagccagccatgcagccatgattttaatcttttactcatacctaagtttaaaatattcatttaaatgctaaattgtgtgacctactttggtgtcattaaaggaccttgtgttgtaatgctgcatgagcctgccacgatttataacatactcttggttttcatagtggcatttcagcaagttcacatccacgttcacctgtttctgcttgtttgcatatgacttggggagtccatcgtcttgcctgtctctgacttggtgttacagggatgagaccctctctggcagcgagctgacggcgaaacttgagcctgcctttctctctgggctgcgctgtgcccagccactcatcagggcaaagtttttcgaggtttttgacaactccatgaaacgtcgtgtctacgagcgcttgctctatgtgacctgttcgcagaactgggaagccatggggaaccacttctggatcaagcagtgcattgaggtaggaagactcggctcacatctgtggccgggggcagctgtgggttttctgagttggggctccaaagccaggaggtgttcacacacactgagatgaattggaaatctccagcacaaacctgcttctgatctccaggaagaaaataaagacttcagggcaagcgttcatctaaagcgtttttgggctgatttaaaatcctgtgtcagaaagttgaatagtatatttttgtaggtgaagattcattttttcttcaaatataaaaaagtttgaattctgtctgcgtgccctagaaaataaaactgtggacttgtcaactcccattgttcttttttttttttgagacagagtcctgctctgttgcccaggttggagtgaagtggtatgatctcagctcactgcaacctctgccttccaggtttaagcaattgttgtgccccagcctccccggtagctgggattataggcccatgtaaccacacccggctgatttttgtatttttagtagagatggggtttcaccatgttgcccgggctggtcacaaactcccaagctcaagtgatctgacttcctcggcctcccaaaatgctgtgattacaggcatgaggcaccatgcctggcccccatcattccttaagcagaaagatggagcagccgggccagggcctgaccacgctgtcggttttggttccttagtgtgaggagtcgggtgctggcaacacaagcgtgtttaacatgctcagtgttatgaaagcgaggtccagacctagagtagaattgacttttcatggaaggcaagtcagatgttctttgagtttccagcaggattgtggtaagcttctagcttgctagagtttcagcctgtggctcactcatcagcttgagtttgctgtggcaggttaccagtgctgtgcaggtagttctcgtccatttacctggagtgaatgaaaccaggtcaccacgtactatgtctcctgagacagctgggacagaaggtggattagttctctttgatgagaagaagggagtgagttgtggtgctgggtctcaggagagcctgctagcatgtttcctgttcgtgccggatgggcgttctcttggcgcgtgtgcagcgtgcgtttggaattttgcctatggccacacctgggcagagttccctgctcttccatcactcgttcaggagacctttcgactgctggttagttgccaggcactgggtcaggtgctaaaaagacaaagacagacgacatattggctgtggcaggtccatgtgaatcggtcaggggaagggcacaagccaagagtcctcgactccctccttcctttgcccctgagtatctgctccctcactgcgggtgacagttcagggcccactggccaccgccatctctcattaggacgatggaaccatttccgtagtgttcaaccacctcccctcctactgataagttttctctgtcgttacaaaattattcttaataaagcagataacaatactctttccattgtgcgtggcataaaatccagcctccaggctatggtccccatagcctctctctgccaggtgactggccccctgcctctctctgcatccccatctcatccctctccctccagcatcagtctccagtgtgctggccttccatattcttgatcttgcctcactcttgccactcaggctaatgtgcagctccttttaattctgtcagtccaccctgtttcctggccatgttaccacagtgagcacatgcctggctgtgtccttccccctgacacttcagctccttgaggcaggggacactatctctgtgcagtcaacagatgagtctgcagggcccccatggcacccagtgggtgctcagggaatattcgcccaagatggcaagagtgtcgtggccaggcagcttgtgcacggcctgtggggaagaacggtgtggtggcgagtggcccaactgcagaggcaggcaggggcttcagtacatcacggaggggctcgcaactcacacggggaagcctacactgtcgcctgaggctgcgggaagctatgggtgggtgggccggggtaaagggccactgtgtggaaagagatgggttcaggaggacgagtctgggggtgaggtgggaggttccacccaggtgggagcaggaaccgcctaggtgttcaggagttaagagtggcaggacctggtgtgtgctatgagtgaaccagaggtcttctgtatgtggacgatgccttggaggggttggaggagaggaagcccgtctggttggggacaggtgggaaagggtgctgagctcatacttggacctgcagagtcagaggtgcctgagtgaggggcatctgggagagaagtccagatgccctgaatgccacgcgcatgccttgggtctgtctcctttccgcaccccttgcagctgcttctggccgtgtgtgagaagagcacccccattggcaccagctgccaaggagccatgctcccgtccatcaccaacgtcatcaacctggccgatagccacgaccgtgccgccttcgccatggtcacacatgtcaagcaggagccccgggagcgggagaacagcgagtccaaagaggaggtgaggccctgcaccccacaggcagaatcccagagaggaggtgaggccccacaccccacgggcagaatcccagagaggaggtgagaccccgtgccccacgggcagaatcccagagaggaggtgaggccccgcgccccacgggcagaatcccagaggagtggaggtgaggccccgcgccccacgggcagaatccttggtcctgcggaagaagtttttgtatcagctttagatttgttttgggcatgaacaaggtataaaaacctgtctacctgaaagctctgaatgtggtacctaagttcagctagattttttttttttttagttagaattgagaagcatcttgcactcccattcggttttgagatgaatcacgttaccatgagctagtactgctgagaacagaacatttccctgtgccgtgatttttctctcctggtgagaaaagcccgtgttcattacagaaagcgctgcctgggggaatgctgcctgccacacaggggctggggctctagttggttcctccagcagcctgctcagaacccatgtctctgcctagtcccgggacgggcagcagggagcctttgctcctccgagaacctgtacgaaggttgatgccttaggcttggtggctttctgtcctccatgaagtagtggctgccgctgttcctggcagggatttttgtaggctgtatctccttaaggtcgttggtttttggaggctcagcctgtgtggagcgttgcgtcttaggagacagtcaccccgtgctgcaggcgggcatggcaccttctttgctctaaaaggggtggtgcgtcccctcttccatgtgcaggatgtctactcattaataatttcgaattaaaatttttttcctttttttactgttgctaaaacactagattacctggtcatttggtcttttctttctgtaatcttcctgtgtgaaataaattgccaagtctgaagttcttcattttcaagggcacacaccaaattgtcgatacctgacttcaaggagtagtttgattgttgactgacttctccaaaccttcagacagaaataaggtgtattcctctttgggaatggtcatataaaacattgcaccagcaacatgctccgccgtggccctgaagggattctcagtcggagcaagccaggcagctgggcgactgtattgcattttgagtaatgatagactatgattccattaatctttattatttttacgtttaaagtttattcttttaaattgtgcttttgacaaaaaacccaaatgtgaaagcacactggtggcttctttatagtcatttttaaaaagagagcgatctggtctagttaatccaggttttgtttattttaggattgaagattatttaaatacttacacacttccaggaaacgaacacgaattttaccaaaattgtaacaagaagcctacaggaggtgtgtttgttgggttttcttgaagcctttgaccttttggttttgcttgctgctttgtttcttaggatgtagagatagacatcgaactagctcctggggatcagaccagcacgcccaaaaccaaagaactttcagaaaaggacattggaaaccagctgcacatgctaaccaacaggcacgacaagtttctggacactctccgagaggtgaaggtctgtacgcagcttggaaaggattcgttgctttcctcccatggacagttcaaagcctaaatcaggatcattccacagcagtgtaactttttctgtttcttttctttttctttttgagatgggatgttgctttgtcacccagcctgcagtctagtggcgcagtcgcacctcactgcggcctcagtctcctgggccaagcgatcctcccacctcagcctcccaggtagctgggaccacagacataggctgccacacccagctaatttgttaattttttagtagatacagggtcttgatatgttgctcagactggtcttggattcctggactcaagtgatccacccaccttggcctcccaaagtgctgggattataggcgtgaagcagagatttggagtgtcacagtgtcttataggagaaaataggaaaaaagttaatttctccaccaccatctcttgaaagaaacggtaaaaccgtgtacaaaaaatgtgtgaggagacataataatgttggattatttttcaagtgcactaaaagaggagaaaatgataaatgagttaatttgctaaatcaagcccactttgtggaactgggggcctccaggtgcatctgtgtttgaatctagccaggtagaaactctctggcttctgcaaactctcaggtaaattataagtctgtttttatgtcctgaccttgaaagactggttgaagctccgtgtaccaggttgcttttgatgaggaggtatttttctgttctttcaggagctgggtgatgattctgattattctgttcatatcaggagctaggtgggaaaaaagcacaaactacttttcgcaagtgatttttacgttaaaatcttttggtgacctatgttgaacttgtgcactggatcagtctttgaacttatacccaagtgacaccattgtcatcttggataaggataaaatgcttttctgtgggatggagcgggaagcagagcagcctgatacatgtgagtgatagctctcatgttatgggccaggcacttcttttgtttgtttgtttgtttgtgtgagacagggtctcactctgttgctcaggctggagtatagtggtgcaatctcggctcacagcaacctccatctcccaggttctagcgattctcctgcctcagcctcctgagtagctgggattacaggcacacaccaccacacctggccaatttttgtatttttagtagagacagggtttcaccatgttggccaggctgatcttgaactcctgacctcaggtgatctgcctgcctcggcctcccaaagtgctgggattacaggcatcttaatagacccatgtccctactgccgccaccaccagaaaaaagggctataagtccatgtcctgaagcccaaggcctcctttggctgatggtcaccatgacacatcaccacgtcatcaggtgcctgggcctcagttttagcctcagctcctggtgcgagtgccatcaggagaggaagttctagcagtatgttgtgcgaggggtcaggatatttggttttactcaacaatatttttgtcttggctcagttggtcacagctgtacacctccacgtcctctgtggggccatggctgctctctggatggcggctgggctagaccagacgtggctgaaatctcggcagatctcacagaaaatcttgcccacagatgtccccatggtcttctcttgatctgaggcttcatagcctgagtctcagggcccatctgtgtcaccctttgtaagaggattgctcaggccggagctgcagacgtcagccatactgttcccagatgcgtgtcacagaggagaccctcgaactcagtgcccagcacaggtgggcacaccatcacccctgagcctggtgtgccgcccacttgctgcatgtccttgggccgctctggcagacctgtgcccgcctcttagcagggtgtggttctcagggtacttgggtgtgatttaattcttcccttctccttgggttcttttgtgtcccattttcctcgttcaccttttacatttgatctcatttcatcatttcagcatctttttactgagagcctgctctgtgtcaggtgatgttctggacactggaaacacagtggtagctggtcctcagtagggtgtatgttctagtgaggggaaataatgaacagaaagaagtgctaatccctcaggaggcgagatgggtgccggggtaaagcagccagggctggtggggttggagagggtggtgtcgtgttatttcatcttctgtgtatttatgggagttgagatttttcatggagcaagatggggttacaaatcattgtgtttgttgtttccaccctgatgttctccttcctggagctcctctaccctgtgaagtggtcaggtgccaccagctcttcttagactcttggattctaaatgtggagagggcggtcctcaccccaggcacacaggctctttctctttcacctcatttcccaggtctggccattgttccctgtgggaattctgtggaggcagcaacccctcgctgggctcttttgacactgtggggccaccacggggtcctcacccctgcacctctttgggacagtgtgtacatcagaacaagccatggacttggggagcaggagcggactgtaatcctgagacacaaaaccctgaacatcataatcccggatgttgaaatccctaaagatcaaaatttctaacctctcaaatcccgaaaatataatgctggaaaaaaacaatttaaaaattctttaaaacatacacagagataccccaaataatactttactaggtaggtttccaggtattccttagtccagtcaagttgatgctgtaaacatggcacccataggcatctccttaaaccatgcagacagtaacatgtaatagtttctaacctgatgcagctgtgctgtgatgatgattttttcagggattttgatctttgaggatttcgacacttggggttagggtgtatagaattgtgtcttttgggattctgatccaaacccccacggttggagttgagcagctttatcagcaggtcagtgaccttgctgggctcttcaattctccccagctcttggtctccgctaaactgacgtggagctgagagcccctgatgggctggtcagggtgaagtgtgtggccatgtgagggaaactgtgcttacttcatcacagtcctcacagggcagcctgatgacagatacttaggagcgttctttacctaaatgttttcacccattttccttgaaagatttgtatccttggtgtctgtttttagtagaaacgtgaatgtgcccatggtttcccccttgggtttgctgcaggacaaatgaaagcataatcatgtccctggcactctgccaccgtgccagggcagcagggacagtgtggctgtcagcatgtgccccagccctgttgcgccactgcctgatgccatgtagggtgtctcctgtgggctagagcagcctcaggcagacctagaaacctggctgttaataaggaatgttggcagctaattcagatcagatcttcaaaaacaagagggctgggatgagataaacacaactgtgaatttgctgtgccctccaggccctcagtttcgacttcgggctctagttgtccaggcgttccgttccagtccgttccattctcttctgttctgtttcagtccgtctcggtcattttctcctgcctcttgtccactgcagattgcagagactgaactttcagttcttgatttgttcttcagaataatacctgttggcaaatagtttatgtcatatacgtgtgttttcactttcctattttcagtggcctgggcctcggtgacatctgtgtccttctaagttactctttcagtcttgtcagtgtttttgtccttcttggatatggtgggatcagtagtgttaagaaacccccttaaaaactaaggacaaatgcaggcgccattgctgagcctctcgggatgcctgggcttggctgctaagtgcaccatggcttcccaccactcaggatctgtgggcttttactctaacatggcattttctcagatctttgaaactttgaaagtggaggagcatcggtaatgtatgagacagatcatgggtgtcttctgagcgtggttgtgcgaggcacccccagcccgtggccatctcagcctgttgtctttctgttcatagactggagcgctgctcagcgctttcgttcagctgtgccacatttccacgacgctggcagagaagacgtgggtccagcttttccccagattgtggaagatcctctctgacagacagcagcatgtgagtgtatctttaaaatcctgttttggaaaattgtagttttagcttttggtaagtattcataaaagaacacagtctcgaacaagtttcagaaaatgagggaaccgctggctgtcactcgagcgaattaggaaaggtattcttgcatcgagagagacagcaagacttgccgatttttgaatgaaggcctaaatgacatgtgctttggtttcaggcactcgcgggtgagataagtccatttctgtgcagcggcagtcaccaggtgcagcgggactgccagcccagcgcgctgaactgctttgtggaagccatgtcccagtgcgtgccgccaatccccatccgaccctgcgtcctgaagtacctggggaagacacacaacctctggttccggtccacgctgatgttggagcaccaggcttttgaaaagggtctgagtcttcagattaagccgaagcaaacaacggagttttatgagcaggagagcatcaccccgccgcagcaggtgagggtgcgcctcagtttgttaattacctcttccctgccagtgacttcacactttaaataaatactcctcccaaatgatttcaaatgacagcacagtgaaactatttttaggggggaaaaaaagtctctgtctcaagcactcaggaaccttactttgtgttttcaggagatactggattcccttgcggagctttactccctgttacaagaggaagatatgtgggctggtctgtggcagaagcggtgcaagtactcggagacagcgactgcgattgcttacgagcagcacgggttctttgagcaggtaaacctcagaccactgacggtcttgggtgtgtaatgagaggtcatttataacggttctttaataaaatgtcctcaagtcggagttcacgttctctttttttgagatggagtcttgctctgtcgcccagcctggagtgcagtggcacaatctcggctcactgcaacctccacctcccaggttcaagcgattctcctgcctcagcctcccaagtagctgggattacaggcgcccaccaccatgcccagctaatctttgtatttttagtagagacggggttttgccatgttggccgtgctggtctcgaactcctgacctaagatccgcccacctcggcctcccaaagtgctaggattacaggtatgagccactgcgcctggcccatagttcacatttaaatacgttttaaagcatttcagtcccgcacgtaaaggctctatgactgaagtctgcatttaagagatacctacgtatatgacatgagctaaagcacagtcctgataagtcctttgcattagatgccagcgtggatgctttttccctcccgtcgttggtcctgttggaagtgataggttttgtttttgcttacgttttactccctgtgtctgcccttcagtgtggctcaggccaccatttcagggtgcaattcctagcactgtgtagggtgctgtgccgcggaagctccagaagcagatgtggccttgcggctcctgctccgattactaaaggatggagaaagtaatcccacgtctggacagcctctcctccttccattctgttcagggaatcccactgtcttctgtctctgaacagagagctgcgggcatttagtgctcctggagaagagctccatgtgctcccaggtctgtgattcagcctgctctagacaactgggccatggcagtgaaaaggctgtgtttcttagccaggtgcaggcaggcacctgtagcccagctactcagggagtctgaggcaggagggtcccttgagcctaggaattaagagtttgagtccagctttggcaacatagcaaaacctcatctcaaaaaacttagttctaagttttaaatttaaaaagaaagaaaaggtgtgtttctagttaaacagtgatttaaaaacattaactttttttaggcacaagaatcctatgaaaaggcaatggataaagccaaaaaagaacatgagaggagtaacgcctcccctgctattttccctgaataccagctctgggaagaccactggattcggtaagccaaacacagtgcttgacgtgtgcatgaatcagttaagggaaccagggaaaaatctctgaccttttcttgtaatgagcgttttttaaagaaagctttgctactttatggccacataaagaacaaatagaaacccaaaaccagcatttaaagccttgagtaattaaacaagtcaactggagaagcagtaaactgtccctgcatctcccctggctccagtgctctgggctgtctgctgaatagcaggtggtttgtggtgtccagggtgggcagggggctctccccacaatggagcacacctccatgtcccacagaagtccactcttactgtgttgttcttctgtagaatggaaatttgctccttaaaaccctgtccctgcctttgtgaattcatgagtgtgctggtgattgagcttttgctctgggatctgtggtcttctagatgctccaaggaattgaaccagtgggaagccctgacggagtacggtcagtccaaaggccacatcaacccctacctcgtcctggagtgcgcctggcgggtgtccaactggactgccatgaaggaggcgctggtgcaggtgagacgccccgggggcatccctgccgctgcctgggtcccttttcctgaagctgcaggtgtctcttgggagatttcccttagaacaagcattttggcagtggaaagacagcttttgggaaggaaaggttccttttgattgtctaacacctttcctgaatttgagtaatgacacttttacaaaatgagaaattgaagattagaaatagtcacaaactatgaactagaagatggaatcgaggccaggtgttgacttctggtttgggacctgggaaatgactcattggatgcagggagtttgtgttccttagagaaataaccagtcatttatatcagtaaaaatacattcttccctcagtatccaggacaccccagcggtaccaaaatccacggacactcaagtccctgatataaaacggtgtagtattgcatgtaatctctgcacagccgcctgggttctttaaatcctgtctaggttacttacagtacctaatacagtgtaattgctacttacacagttgttttgttacactgtagtttttagggaatgacaagaaaaagctctgtacatgcttagtacagatgcagttttttttcccccaaatattttccatccacagttggtcaaatccacacatatggaggaccagttgtatatattttgctgtcagaatgcatttacgatgcttattccttctttactctgacaaaacataaaattgaataagtatttgtagctcaccttaacgttcccttctttctccttcccaaagtttcccttagctggatatatgcagcgtcacatggtcccgaggtctcacagatgcatttcttctttcatagattcttgatcattttataaaacttgtaaattactcactgcttagaaaaaaactcaaatatgtgagtaaacatcctgggtaatctgcactaaattaatttcaaatagtcttgaaaaggattcagcaaattacttctgtctgtttctgtgcttcctagggtagtttcttggtttcatttagtaagtgggttagctttttttcagtggggaaaatagaagagatgccgtttttcttagtgtaactgagggtaggtgttgtaattggcaaaaatctatctcaactaatgttcgagtccagaccctgtgacattggtgccaatgtggagggtaatgttggaagctgctgtagtcttgtttgccttcctgaatttcttcttcagtgggttatcgagaactaagaggtaccatgaatgtgctttggaagagtaagatgtcaaaaacaagccacagtgtcatataattgtggggtggtgtcattattaccattattgcatgcagtccttgggacagataccatcatggcactcatgtgtgtcccttttattgttatttattgttttccaaagaggaatgtttattgatcttgctacagcaattcctgtaaacttcccatcatagagatgtccttccatctttctaatcacagagatgtttgaaaactttcatgaaaaaaattttttaaatatttttaaatgagattaacaaaatgtgaggcgttccagtgctttcttcagaaggtaatgagccaaaaaaaaaagaaaaggccttttagggcagaaaggaacacatggtctccacctggctgaggagcggttggcccaggctcatcggctgctccatggaactgacgctggagtgcaggaaatctgggggacattttatagtaggcaagaaagtgtggctttaaaatgacagtaaaatttgcacatgttccctcatgttcatgtaaacctgaattaacacctgaacggtttaatttcccaggataacaatatgaattggaagcaattcaaaattacacccatgtggccgggcgtggtggctcacgcctgtgatcccaacgctttgggaggccaaggcaggcagatcacttgagcccaggagtttgagaccagcctgggtaacagcaagacccccgtttctacaaaaaataaacaaaaattagcctggtgtggggtacatgcctgtagttccagctgcttgggacactgaggcaggaagatcacttgagccctggaggggctgtagtgtgctatgagcatgaccctgcagtctagcttgaacgacagagggggaccctgtctcaaaaaaaatcacactgatgtttatcatactggagattaatatatatataacagcttaaaatgtgctgattggccaggcacggtggctcatgcctgtaatcccagcactttgggaggctgaggcaggcagatcacctgaggtcaggagttcaagaccagcctgaccaacatggtgaaacccatctctactaaaaacacaagaaattatctgggcatggtggcacacgcctgtaatcccagctgctcaggaggctgaggcaggagaatagcttgaacctgggaggcagaggttgcagtgagccacgatcacaccactgctctgcaggctgggcaacagagcaagattccgtctcaaaaaaataataataataatgccggctgacttgttagcagactgtgtgatttttcatctgatctgtcataacagcattgatcagtttcttttctttggaacaactgatgaccttaaagccagaagcctgtggtatgctttcatagctagagagattggccgctcactggaatttagaaaaggagagtatccagaaaagactgtgtaaacgcatgacttctctaaagaaaatacatttctatagcctaatttctgtgtattgccttgcatacctagtgaccaaaaaaagtgatctttttcctgtttgacactttacactgagggaaagaaggcccctcacgtcctgtgtcacgttctttcactgccaggtggaagtgagctgtccgaaggagatggcctggaaggtgaacatgtaccgcggatacctggccatctgccaccccgaggagcagcagctcagcttcatcgagcgcctggtggagatggccagcagcctggccatccgcgagtggcggcggctgccccacgtagtgtcccacgtgcacacgcctctcctacaggtgcgtgcggtgcccccatgcgagcacaggcctgtggcctgtcgcagccaagcgccggtgtccaggcttaggtctgcagactgctccggacagcagagatgaaactccttctgcttgtcttgtcctctcccacttatacgcgtcctcaggaaaggaaggccacagttaaaacgttgagaaaaacatgtcggtgtttctgcgggattgaagacatcctcacagtgattctggttttgaattttgcctgagggattgttttcagtgcccactgtgccaccctcagttacagagtccatcgctctgttttcagcaagcttttggcgggagctggagggacagggttaggaaatgttttccgaaatctgaatgtaatgagttaaatttgaaatataaacagaaagcacagattgttctaggcaatttcaaaaattactgtcaaccaagatacagagtattgaactaagtgttatgtttaggagattaaaaaacattttaaaacaatagattctgcctcaaaggagcattgaacctgagacagcgggcatagccatagaaacaaatttacatttggagggagactgtgattcagagccatgctcatcagacagaaaatcaggataatgaggatcgagggaaggaagatatcgtgtgcgccatagaagccaaggacagaatttggataggctgaggattgtggccagggccttccaggtgagaaggtggtatcagaagtttggtgccaacagcgcatctggaatttaagggtagtctacctcccaggctcataggacggtgactcaaaaatgtgtttacattttatgggtccaaagaggtcatgagaaccacgtttgcaggtgcttagtgtggctgtggggtttagcaggcacgttgggaaaaggcacgcctgcagcagggatgccaggctgtcccgaccttaggcattgctggacaaagagccgggcagggagggtggcaaagggcatggacagcaggaggaggagttttgaggactgcccattagctaggtttggtgtctgtaccatcgttctcccagtctcctgtctctcaggagccacaagctgaggttttaaaattggagacaccataaggaaagtagtgtttggggtgaacagtaaatgaaatgtgggatctcaggtgtctgtggtgtaaatgagagtgcttcctttggtaattgcatcataagatctttgcgataatcatgtccccaatggactctggtgtgtttttcccgtttgatctttactgacatttaccgcagagtctcttatgctggtcccatcaggcagcccagcaaatcatcgaactccaggaagctgcacaaatcaacgcaggcttacagccaaccaacctgggaaggaacaacagcctgcacgacatgaagacggtggtgaagacctggaggaaccgactgcccatcgtgtctgacgacttgtcccactggagcagcatcttcatgtggaggcagcatcattaccagggtaaaccgacctggtccggcatgcattcatcatgtaattttccagacgccccacggttctggtttcgtctctgtgttttggtttggtttggtttggtttttttttcccccaggttttctattttggggtagggaatgacaggtcggggtggtaatggtacagggaaagatgaaggtggtagaagaagtaaagttttgttttttgtttctgtacctgttacatttttctagttggggcagaatcgtacaggccggggggatcaatgctctgagccatggcactctgcgttgaaggtcccatcccaggacgagttgtgctcaggtggctctgcgtggccttttctggttttcctggtccccctcttatcccctaaacctgtcaggcatccacgtgtttagagcagcctttgtcattttatgatttggttagccaagatggtaacactccactcaagaattagcaccttttaaaagttgcttatggcataaaatacaaagtaacgagggtttatcacagagctgcccattttcataagccatgtgtgtgtgtgtttcattttttatttaagccttgttgtgaagtgctttgaaagaggatcggtgtgggctaatgattcctttctttgccctctagcgattgtaactgcctatgagaatagctctcagcatgatcccagttcaaataacgctatgcttggggttcatgcatcagcttcagcgatcatccagtatggaaaaatcgcccggaaacaaggactggtcaatgtagctctggatatattaagtcggattcatactattccaactgttcctatcgtggattgcttccagaagattcgacagcaagttaaatgctacctccagctggcaggcgtcatgggcaaaaacgagtgcatgcaggtgcggacaggacacttgaagaatgaggccaggtggagattgaggccaggtggagaatgaggcaatgtggggtctcctggttcagaatataaggaaggtggactcgaactttccacaaatacagcctcagtaagggggaaacagtccttccaaaacacaaaagggaaaggaagctacttgactgtgaattacagtctcttgtggtctctgtcctactatatacttagttaatgtgtttaaggaaagaaaaaaattacacactacagaattatgaggatctaagatagattttgactattttcagaggaatcttgataagaacaataaaaccgaccagacctataaagctttggagaaaataagacccctaagtatttaggattaaatacttaaagttagctttagtaattcagtttaaattctgaacgtcaatcaataaatattcatggtaggcaaatcttttgtcaatttaaagtacattggtcaatgactcataggacttactgcctagattagtattttatgaggttttcatattgtttagaaatttcaagaactttttttctgctcattttttttgaacagggccttgaagttattgaatctacaaatttaaaatacttcacaaaagagatgacagccgaattttatgcactgaagggaatgttcttggctcagatcaacaagtatgtatgttatattgaaaggataagagaaaaaatgcatcagattatttaaagttatttataacctgaagccaatgtgaagctcaagctagaaatgggtatgatttggtgacagtcattaggtaggattttttaggtactgcacctctgcaaaaagagtaacttgtgacaaattgataagcctatttgatgtgtagtattttaaaagcttttctcaaatgagctactggatcacagaactgctgataacatggattcatttccccatttcctcagtccgccatttacagagctggttcgttttgtggagatgattcctgctttagaccaggggtcagtaaaggatggcctgggggccagccacatccagccactgccctgtttttgtcagtgaagtgatattggaacacatccctccccactgatgttgcctgtgactgctttcgctttactgcagagttgaggagttgtgataggaatcgtatggtctgcagagcctaaaccatttgctgtctagcccatcgcaggaaaggttgccaaaccctggtttagagaagtaaacgtcagaggagattttgtaaatatcatgcaaatgaggtagactcacaagatgctgcctgttgccttgtgtaggctccagtgcctgcttttcacatcttcagtctgtggggcttgcatgtttagcttatttttaaattaggaagcagttttgtcaacataaaaaggttttatctttttgtgtaatgttttaaattcatgtgacagacacaaccattccaaagtgtacaatttagtgggttttagtatatttacagtgttacacaaccattaccactagctaattctagaatatttccatcatcccccaagtaaaccctgtatctgttagtagtcactctcctttctcccctccccctttctcttgacaactactaatgtactttctgcctctatggatttgcttattctgaacattcatataaatagaagcatacactgtgtggccttttgtgactgtcttctttcacttagcaggatgttttcaagcttcatccatgtgctgtcatgtatcagtaacctgttctttttcatggctgaataatattccattggatatccatacattttgtttatccatgcagcagttgatggatgtgtgggttgttcctactttttagctacatgagtaatgctggtgtaaacactgaatatgtgtctttgtgtgagcatgtttgagttctcttggttatatacctggggacagaatatctgggtcatattgtacttctctgtttatctttttgagacattgtcaatcttccacagttggccgtaccatttttacattcccaccagcaatgtttaaggttttaatttctccatatcctcaccagcacttgttattttcttattatttatctgattatagccatcctaatgagtataaaatatatttcattgtggttttgaattgcattttcctaatgactgttgatgctgagcttcttttcttggttttgattgttagtttgtaattctttataggtctggataaaagtctcttgcagatatatgatttccaagtattttgtcacgttctgtgggctgtcttttcacttttttgatagtgtcctttaatgtacaagtttttaattttgatgaagtccaattcatgtatttttttcttttgttgctcatacttttcacgtcttctaagaaaccataccctaatccaggatcagaagcatttattcttatgttttcttctaagcatttcatagatttagctcttacatttgggtctctgatccattttgaataattttttatgtggtgtgaggtaggggtctatatttattatgctgcatgtggatatacggttgtcccagcaccatttgctgaaaagtctagtctttctccattgaatggtcttgacaccctcatcaaaaatcagttgaggccaggcccagtggctcacacctgtaatcctagcactttgggaggctgaggtgggaggatcacttgagcccaggagtttgagaccaacctggacaatatagtggagacccccatttccaaaacccaaaaaacaaaaatccgttgaccattttttgtgggcttatttctggactctcacttctattccattgatctgctatgtagagtctcatatttccatatgaattttaggttattttcatgtatttctgccaaaacagttggaattacgacagagattgcattgaatctgtagatcagtttgtgagcattttgccatctgaagcaagttttccagtttgtgaacacgagatgtctttccactagtttaggtcttctttagtttaattcaacaatgttttttagtttttagtgtacaagtcttgcacttatgttaaatttattcctcaatattgtcacgtgaatggagccattttcttcattttcacattgctcattgctaacatttggaaataccagggttttgtatattgatcttagatttctcaaccttgctgagtgtatttgctctaatagctttttggggattcttcttttctgtgtataagatcgtgtcaactgcaggtagagatggactgacatcttctcttccaataaggatgccttttatttctttttcttcccaattgccctgactagaacctcaagtacagtgctgaattaaagagatgagatccttgtctttttcttgatcttggggaaagccattcagtctttcagccttgagtatgatgttagctgtgggtgttctgtagatgccttttataagcttgaggaacttcccttctgttctaaatttgctgggtatttttatcatgagatgttgttggacttttttcaaatggctttttctgtgtcctctgagatgattgtgttttttttccttcattgttttaatgtggtatatcacattgattggttttatttatattgacttttttgttttctgtgttgaaccacccttattgctgggataaatcccacttggtcatgatggataatccttttaatccgctgctggagttgggttgctcatttttgtcgaggatgtttgcgtctgtatcataaagcacctgggtctgaagttcccttgctatgtctggtacattgctggtgtaatagtgaagcggtataactgctgtggaaacagtttgacggttccacaaaaagtaagcatagagttcccacgtgaccagcatttccactccctggtatacacccagaagtgttgaaacaaacagatacctgttcgggaatgtttgtagcaggactatttgcaataatcaagatgtggaaacaacacaaatgaacagataaacaaaatgtttatgttctatgtgtgcaatggaatgttattcacttgttaaagagaatgaagcactgacacaggcttcaacatggataaacctcgaaaacactgtgctaggtgaaagaagccagattcaaaagatcacatggtgtatgattcaatttatatgaaatgtacagaaccggtcaatccacagagacagaaggcagactgcaggttcccaggggctggaggtgggaggggttcagagcgactgcttatggggcggttgcacaacattgtgaatggaccaaatgccccgcagtgttcattttataatggttaatttcagattacgtgaagctcgcttcaattgaaaaccatacacgttttggttttctgtctcctcacaggtccgaggaggcaaacaaagccttctctgcagctgtgcagatgcacgatgtgctggtgaaagcctgggccatgtggggcgactacctggagaacatctttgtgaaggagcggcagctgcacctgggcgtgtctgccatcacctgctacctgcacgcctgccggcatcagaacgagagcaaatcgaggaaatacttagccaaggtgagaccgaaaaaacgagctttgaccagaggccatctgtcaccttcagatttggacagaaatttagctatagtttactcatccgtgccgggtgtgaggcatgatttcatgccttaactcttaatcctcatcactgttcgaagtatctttcacagttccatttcaaagctgagaaaactgaggcctggacactcttagggccccagaacttccaagtggcaaagcctcacgtagagcccaagtctagcactgcctgtgggagctcacacgaaacagagggctgaggaggggatgtggagctagaacttccctcctagacgcccgttaggttgtcatccctcccctgcagggctgttgtcagcacagccacagagctggcgtgctggggtggttgtgggtttctctctgcaccgtgccccccagcagccctgagctcagggtgggtgtcacccacgtgctcactgaaggatgtgcacttgacactcaggttcccccttcatgtggcttcctgtcttcccccaagaagcagacaaataaaacccagaattaattccagcaggaaacccaagaataaattgttccctttcctattttgtccattaaaggtttggattttttagaattccttgatttaacataaaaatttggaatgtacaccagcacatggcagttaaagccgactacagagacagctacacgcactgcttcagtgcctggctccgggttgcttacacccagatgtaattgtttcagtcgtccatggacacctggctgccagcctgtggcctacctgttgccggggtgatgagcatctgagagttttagcaaaagttcattttgtttggatgagatcatgagtgtaggttaacgggtgggcaggccccaggcatcttcctgttgctgtcttgcagtcggtcactggtcagtgctagtcagtggattagatcagcgagtaattgtcattaaaactaaatcaaaaggccgggagtggtggctcacgcttgtaaacccagcactttgggaggccaaggtgggtggatcacttgatgtcaggagttcaagaccagcctggccgacatggcaaaaccccatctctactaaaaatacaaaaattagccaggcgtggtggtgtgtgcctgtagtcccagctactggggaggctgaggcaggagaattgcttgaacccgggaggtggaggttgcagtgagccaagatcgcaccacggcactccagtcctgggtgacaaagcaagactgtctcaaaaacaaaacacaaaaaaactaaagagaaaatctatttttaaattttaggttttatatactgtaagatttacattaagtttagcaataatgttggcctgcttatagatactttttttacatggccagtaaagccgctctatacagtgttgtaatgttggggaaaaagtctcttgcttgagggcttcagaattgtcattctactctagaatttctccttctgtctcaggtgctgtggcttttgagttttgatgatgacaaaaacactttggcagatgccgtcgacaagtactgcattggtgtgccacccatccagtggctggcctggatcccacagctgctcacctgcctggttggctcggagggaaagctgctcttgaacctcattagccaggtgggaagagcagggtggccttgttcacgtgcacaaaacattgtgtcttcattttgcgttcttttttctcccagaaagtaaatttgagtgttcaaagtattaaaaacaagttaaagagatgggaagatataatcatgtagatattatttaatataaagcataattaaaagttattaaagaatatatcagagttgaaatgaaatagctaataaagcagttcagtgttaaaattctaatttcttaaacattttcccatatataatgtaagtaaaataaacttgtagtaaaacatacaattgccagtgggtaccctgagaatgacagtgagccctgaatctgattggtagttttcctctgattttttgtcatatgctgggagctcttcggagctgcccttaaactaaaacatgcccaattgtggctgtcgccctttcgacagttgagctgcatcataaggaacccatggttctcaagggcagtggggccaggccggggaagcggacagcccagggccctatggaaaggctctcataaccatctcttgagaatgattccaggatgtccctctcccgtgaaaagacccaggcatagaggaaggaccagaaacggcggaagcgtggctacagtgaggtttgggacacagcgcctttgtggttgcttttgtaaaatcacgaagcaccgcaggagtccgtgaaggtgttcaggaaggagctgggcccgcgcgttctgcccacccattcctctggctccttcctgcacgcagcacctgtgctatgtgggccctgagcgatgccctggttttccttgaggaggcagctgtgtttttgagtcccagcattctgtgtagcacttatcctcaggatgcaggtccgacctacttggtctcatcacttctggagcatctcaggttcaagagcagccgcctctgcctgtgacggcttagatgttattcctttcttcctttcatgggcacattctgaaagattcaagtgacatggtactgtcctgtcagccacagaactccagttcaatcaaatgggagtttcttaactgaaacggacatccctccatctcctcccagctgcagttaggcagaataaagttatttgataatggaattagttcacaatccacagtgaattgtgcctgacagattagctggtatttgtttgtttttttatttgcttcagtgagatctggggacacatgtattttgccttcctcagatttactgcctggaaggaaagcgtggtttccctgtcactcacagttcctgggtggagttgatgaaatgcatgtgttgatgtgtcttggctcttttaaagtgaattaaatattttgcctgctgttgaacctggccttgtgcgtcagatcagtgctgcagtatttgcttccttggtccaaaggcagatcagacacctgtttctgacttgacattggttattttcagtacaaattatctttatccagagctcagcagagagcagcactgtttataacatcttgtctctgagcaggttggacgcgtgtatccccaagcggtctactttcccatccggaccctgtacctgaccctgaaaatagaacagcgggaacgctacaagagcggtacgtctcgggtggggccggtaggccaggccgggaagggctcattccagggggtgccccacatccagacagaccaccgcagccacccctgccctgcagctcactcatagccgtggccaatctctcctcagtgggcagcaccgtagggcaggaagcaaagtctgatctgagtacagtctctcttttgccaggatgtaataagcgttcatttatccgagtgatttgatctataggtagagaaaatatgtgaaattttcagcttcagaaaactgtaaagtttacctttctccttagtagtaagtgcatcccaatacacagcagatgccagctgccgtgtgtgtgtgtgtgtgtgtgtgtgtgtttaagttatgaggagtatcttcagctgtgagaagaatcagcattgaagtcagtcttaccagatgttggtgaaatttcactcacagtgtaagacttttaatctatattgaatagcccttgtatgcaaagcaacaactgatttgatggcttcagttacccactaggcagggtgctttaaataatgagacgaccgtttactgccccttgttttcaatgctgagtctcctaagggccgtgggccgtgtgtggttggtgagaggcggtggatgagggctgcatggcacatttcagctctaacctctggggagtcagtctgcctaggtggcttcatgtcttggtcatttgaaaattaaggttttttagttttaagactaagtgtagagaggtaaattcagaaaaaaatggtcattaaaggctctgcaatgtatctcacagggaaaaatgaccgtatttttcaaaagcagtattttgcaattggcttggctttccaaaccagtttcctattaactgcttttagattctctgagtttatagtagcaaggaacgtgtaacagattgtgagatatttttccaaacatttatgtttaggatgatcagacgtaacagaaacgttaaaaggagttctcagggaactcttgtgcgccctcacctggactcaccaggcggcgtgttgtcacatctgcatcctcctaaaacacatacacgggtttatttaatggaatggattgaagccgcattgtagacaactgcgctgtccctccccgcgtccctcagcgcacctgcgcctagaaccagggccttctcccacgcagtccttggggaagcggtcttgtagggattcacacgccggcaggaaccagcgctcctttggcccatgggtcctgcagcgctccgagccctggcgtctgtcggttttgcgctgacactggcgttgtgtgtgttgctctcagattctggacagcagcagccaagttcagtgggtaaccagtcccattctgcatcagatccagggcccataagagcaacagcacccatgtggcgctgcagccgaatcatgcacatgcagcgagagctccaccccacccttctgtcttccctggaaggcatcgtcgatcagatggtctggttcagagaaaattggcatgaagaggtatttggctctgatcttgcacatggtggctccttgtagaggggacgtggtgttctgtatgcttctgtggctctcttcccttgagctttagttgccggtccttttatatatttgttgttgaacttaaccatggaccaggcaaatagctatctctgcacactagtacagccttaaagattcaaagtacaagacatgaaagagggtggaattgaggaagccacttcttgctgttaaaatgctggccgtgctcatgtccctgagctcagtgacctgagtgccactgttaaccaggtgtgagcaggagcagtggcatgagtaacagggttataatttccatagatgggaaattgtagggatgtggggtcttttcagcagtcagaccacttccttaataacgttggcttaagctgatgacagaatagtccacgcctcactgcccagatgcttacctggttgagccccggggccagctccttactgctgtgaagtctcgtgtgtgcacagtgcacgcagacacgcggtgggaacagtacagctgcctgaaaatgcaggggttttgtggctaatcgcagacgggtgtatgatccaaaaaagtggggcttttctgttttcgctttttgaatgttcaggtcccttactccccaaggtcaaaagcgcctgctcccatgtggcatgcacaggcgtcccgtttcttgcacacgccgatttcatgcctgctgtgtgtgggtcctgccggggagtgcagagatgaccctgggctgggagggccgcactcaataggcgcttttggctgctggttctggagtggagggctgtgtttgtcagttgtctctggctcttttctaccaggttctcaggcagctccaacagggcctggcgaaatgttactccgtggcgtttgagaaaagtggagcggtgtccgatgctaaaatcaccccccacactctcaattttgtgaagaagttggtgagcacgtttggggtgggcctggagaatgtgtccaacgtctcgaccatgttctccagcgcagcctctgagtctctggcccggcgggcgcaggccactgcacaagaccctgtctttcagaagctgaaaggccagttcacgacgggtgagtctccattttccttcccttccatagggagaattgtgcacgctgatttcctccggctttagtgttgaagctgattggatccttggttttctgatcactgcacggggcacactggttacactctgtttacagtgcagacttcagagtgcatagctgagaccacatgtttttctcccagggaggggtcaaggtttggagcaggagctgccaggatccaagacggggtagaaaatgcatggtttcaggccacactgccctcctgccctcctgccttcctgagacccttccttcacttgtttttggtgggaaacagggtagggtggggtggtgggagacattgttagtgtgaaccagtaggagacagagtcctggtgagccggtgggagatggggccgggtgagccggtaggagatggcaccaggtgggatggtgggagatggtgttagtgagccagtaggagacagcgtctggcgggccagtgggagacagggtccggtgggcccatggaagactgggtctgggtgcgccggtgggagatggcgccgggtgagccagtaggatttataggggcagggcctgcagcgacgagctaagtgcaagctcactgtggattctgggcatcgtaatagggagatgtattttcaatgcttgtctgtagttcagattaatgcgttttcctaggctcacagcttaactcctggctctgcctcttatgttgtgatgtgaggaaaggagtccaatttccttcagcccaggtttcttcctctgtcaaacagggatcctcaccccacagtatcccccccccaccatctacacacccctgttccatccttgcacccccatcccatcatacacacacatgtcccatctacgcacccacgtcccgtccatgcaccccatccactcacctgtatcctatcacctgcatcccatcactcccatgtcccatctacacacccgcgtcccatctacttactcttgtcccatcatagacacctacatcccatttacacacgcatgtcccatcatacacacccctgtcccatctacacacccgcgtcccatcctcgcatccccatcccgtcctcacactcccgtcccatcctcgcatccccatcccatcctcatacccccatcccatccatgcacccccgtcccatctactcacccctgtcccattcacactcccccgtctagtccacacaccccatccacttacctgcgtcccctcatcctcatgtcccatctacacaccaacgtcccatctacttaccctcatcccatcatacacacctacatcccatttacacacgcgtgtccccgcgtatgcactgtgtcccatctacacacccacatcacatctgcgcatccacatcccattgtgcacacccacatccaccgcggtgcgcacaggcacagctgcttctcgtgctgtctggaacacgttgcttcttactcctcattcagcctccatcccacttacctgcgggctccctagtagagaagcgcgtggcgggctctcttgccaggttctcactgagagctcctggtcccaggatgtggcttcagctgcctgagtaacttccccaagccttcatctctcaagtgtcagcacatgagtgattgcagcacatgagtgattgctgtgtgaaaacgagatttgtctggtacagtttcccagagatgaaagaaagattaaatcattcacatttaaaagcttaattactgcatttttaaaattgtagaacaaatcattttaattttcatttcttatcttcaacttattctttaaattaacttcaatttttatacaaaatgtcctgaatggaagtgcatgaaactatctggttaaaacaaaatatgggccttcaaacctaagctcagtcactagcccaggtaaaaagaagagatgctattctgtgacctttttcctcttaataatatgttatatgccgaacagtttaaaaatgtgattagttgccttggtgacagaataaatagcagcaactctgttctaattataagatgattttaaattttatttttaagattaagtatcctctttgacaatccagaaacatagtctttgctgactctgtggacacacacctaaaacagttaaaaaggattcctcaattttcaatgacaaagtacaaaaaaagagtatgttcttggtgggcacggtggctcacgtctgtaatcccagcactttcagaggccgaggtgggcgggtcacttgaggtcaggagttcgagaccagcctgaccaacatggtgaaaccccatctctactaaaaatacaaaaattagcctgtcgtggtggcgtgcgcctgtaatcccagctactcaggaggcttaggtgggaggatcgctggaacttgggagacggaggttgcagtgagccaaaatcacgccactgcactccagcctgggcaacagtgagactctgtctcaaaaaagaatatgttctcaagctgcagttcagtttttctgtccccttttccaaaaaatcttactttactaccaagccactcacctaactataaggaaagacagtttttcaaaaaggcaacaaaatccagaaaaaggagtaggtatcagtccaaaattatcacccaaaacactgctgttgcaaaaaaaaaaaaaaaaaaaaaaaaaaaaattagagtaggaagccgaattcccatagcttgttagagaagatcttttaaaagaattcagaaagttaagagtggaactacagtggtatagacaggctcaaaatgcagataattcaggaacattcagcttggaaatatattaggctttctcctagtccagcagaggaaataaaatcatgtgttgctggaattaatattaaaattgtccccacacgcagaaggtaaagaaagagaatgtggaacaaacgtagcaaagacaagtcaccttaagtctaggctctactgcccaggaaaattgaatcgaacttaaattcttcctgagtcattatcactaaattctagatttggcctgaaaccagtggaccacatacaccactaataaataccaagtgatccacagtgtttgtggtattacatttttttaattattataagtttatattctgaaaagcagtagatcaaaatgatgctgcaccatccagtcggttacagactaaacggctccctccaaagaggactgacttggcagaaacctaggctggaaggaatgtgagtaacatgaagtacatcaggctctcagtataatttccgtaaggcttttctacccaccccagttgtagggagtagtactgagggagctccaacacagtgtcttacaggggtgcttcccagagacagaagggctctaagtttaactcttgacccctcttctccttacctaaagcttggggaagaaaataaatatttaatttttaacttttcagagctttgagcacattataatatttaatattctgtagcttcattttctgaacctttggcttagaatttttttctcaacttacattaaaaaaaagtatgaatgctccttcaccagatgaaaatataagccatgttcttccatctcttctacacaggaagagtgaatgaatagtactgtaaatatcctgtgaggttactttgtgtacttgacgaaagattagggaaaaccaatccacttccatagctcgagcagtagttaactagtcttcaatctcatcttccccaatgtctccattcatatccaagcatgaaacagccggttacaacacggtgaagtagggttggcgaaatgtttgtaaggggttgctagagagagaacccatgccgacccaatagaaatagagcctgcagccagtacatggcatccacctcacttctctatgtgaattccacagcatgggcatctcttcgagttctcttctagccactcctttctttccatctcttccagtgccctctgactcaccctcttaccttacctctgttacagaaatcttgtcttggcctcatctgcttgcaggtattcgttttgtaagtctgttaatttctctgccatcaccttacatggagaggccccatggtaggtcagtctgcacaaggtacagaaggcaaagttacagctggagcagatgcccgtggtacagccaggccctgcaggcccccacaggcgggggcagcacaccacatctgccaccagctccaaggtggatgggaggagaaggcagccatgacgggcagagaactctgcttccgctggctctttgacctggccaggagtggccaccgaagggcactttggttctgagcagttgaggcattgaacctggccatctctgatctggatttcaaagcagtccttcagataggctttgcagtacacaggcttcactccaagaagtacatgcattcactgcccagcttctcgcagaaacagatgtcgtacaggaacagtctactattaaagcattttatctgctaagcttgatcaaagtccaagatttcctggatcagacttgacagtgattccacatcctgcacagctctctcatccacaatttcctcttgatctacatgagatccagcagctcctccaaaatctagctctgatgggaggggcttgagctatccttctcggcactttttcctgagaacttatcgtgagctcagagggagagacaatattggggtgcaccagggtctcttgcttaagaaactgcatccaggcagacaggatcccactgccactgtgttcttcccataggttgtctaagtgcttgcatagagcagagagctgagttggtgacagcaatttgccactaagtgtgaatgaaggtgggaaggaggatggataatctggtggcagttcagagttcagcacaagtggagggagaaagcaaatggtatattcaaagctactattctgggggcactcatctgaattgccgctcacaaataacttgaagttctgtggcaaatcccgatcgatgctgatttctccacctcagacaggctttgcttttccgaattcatctccatcttaaatactcgccagggccagcagctcacctcctgagcttctcagtcttctgacaacatttaattttatgaggaattgttaataacaatcagaaaaaaaggatgtcagcaccgcaatctgtatttcagtttgtttatttatttatttatttattttaaggtggagttttgctctgttgcccaggctggagtgcagtggcgtgatctcagctcaccgccacctctgcctcccaggttcaagtgattctcccgcctcagcctcccgagtagctgggattacaggtgcacgtgccaccacacctggctaatttttgatttttagtacaggtggggtttcactacgttggccaggctggttttgaactcctgacctcaaatgatccacccacttcgacctcccaaagtgctgggattacaggtgtgagtcactgcccggccatgtatttcagtttagagtggagttcgtgcagatcccatttattctccaggtggtggagatgagactgccaaagccgggtaacaggccaagatgtagaactcatactacatatactatggaaatcctgccatgtggggcaagccggaaactgctaccccagtgagggaagcccctcctccacagtgtttccctccagcctgcgaaactctttttcattcttccaggccacactctgcgcactccagccttggggccagccctggtctgggttcagcatgccactgccgccgtctccagcactcgccagccggcgtcacttgggcaactgaccaacaagtggggcaggccgcagcctagctctctgccccagcgctgggatcagagggcgctgtgtgggcctgtgagcaatgggccagcctggggtgtcctgaaggagcagggcccacacctttcccttcctcatcagcaccctgaagggtcgtggccaggctgggctgggggcaccctgtctcgagtttgggggatcgaagcccactgagcagttctggcccggcccccttctctgccttgcacacccagagtgtggtccctaccataccttccagctgccctgcagtgcccaacttagcgcttttgtaatgatctttgccacgttctttcttcactgatgggttaaatcgtagactaagtggttcacatgtgtggtattcaaagaatctcctaaagactcattgtgtcctagatgacacagttaatattaagtcacataaaagaaaatcttcatctccttaatcggaaaggacactcaacagccatagctgtgaccagggttgcatcgaggttgcatccagctgaagtgtggcgtgtgccctgcagttgctccaggcagtctgggggcgcagctccctgttcgtgatgtgtgggttgggcttgccttaggtgaacccacagctgagggaggtgctctttgaaaagtgaagggcaagcccggtcctccccgtctatacgtgaagcgctttcatctcctcaggcttattgtgaagtgtgtgtgatgtgtggtctttcacccttctgagaacggaagagtccgagatgaaagttttatggaaatcatattttacttgaaagaaatggtggtattcagcatgcttttatcttaaaatgtccacattattaaatcaaaaaagtagagaatcagaaatgggatagatcttctggcttttgatgtaaaaaaaaataaaaaatcacaaaaccaaaactggaaaaagtcagcatgaggctcctgactcatctcaaagtgcagtgggtctcagacacgcacagccagagctcatccaccttccgctctcctgtacacaggggaggctgtttctgtctctttgtctgtgttccgttcgtggaatgcagtccgattctctagcagagctgcatgtgtgggctgccaaccacatgtctgtaaagaggtggaagaaagctcagaaatggcgcactccatttatcccacagaaatgaagacttccattcatgtgggaactggtacacaaatattcagagcctttgttactttatttataatagctcaaaactggaaaccatgcagatgccctttcagaaggtattgaatacattagaaacacctcagcaatgaggagttaattattgatacacagtaacgtgggtgaacctccaggaaatcatgctgagtgcaaaaagccaacttggatgtgtactgagggattcttaattgtgaaataccacagtggagacggagaagggattcatgctggccaggtgttcgggatgcaggggagaggcgggggggtggggtggtgggggtgggtggtagctgtgaagggcagccaagggcatcccgtgctgatggtgcagctcagcaactgattgtgctggtggctctgcgaggccacacagtgacatgaccagaggtgtgcgcatgcatacacacatgtgcgcacacacacgtgcacacataactggtgaagtctgaatcagctcttcagctctttggactgtgccaatgtcactttttggtgttggcatcgcactgggttgcataggatgctggtgtgggaggaagagggttaggagtacatgggactttctgtatattttgtttgcatcctgttgtgaatctctaggaatttcagaataaaagttaaaaagagatcaggcatgagcttggcagcacgttcttggtccagcgtggagagggaacaatgaggtggcctgcgtccttggtggtggcctctgtctctcgcggctctgctgggggatctcaccttggtgcacagcagcctgtccagccacctgcctgtgtggagtcctggcactgtgaggaatgcagaggagggaggtgccacagagcttaaaatgaaagggaaaccagacaagtgctatgaaaaaaaaacacacacacacaaaatacattggctttcatgaaaccaatgacatttgtggacagccaagttcagacatggtcaggaataggccactcgtatagctgggtgttatcacgcgtgggcagggatggtcaggccacttgaatagctgggtgttatgcccagcgcctcatgtgcgctgcctcgtttaatttcatcctttcggggcaggtgttaaattattcccgttcctataccacgggttagaaaagtgaggccctaagaggttcagcggcgtgctccaaggtctaagctggcatgtctcccgccacgactcagccagcattccatttgggctcaggacgccagccctggggacggtgcctcctcgtggctcccccagggcccctgctttgctgcagttttggttgggttcgtcctgacctccagtcgccctggtgagttagggtgacgaggctccttccagcactggcgctcgtctgggaggaagtcgaggcgttctacagaaagacattttaatatgagtggcctgagaaatatattaaccagggatttttgaattgcttcagtgaaaaatgtttttggcttttgccattttggtatcctgcattagttccttctcatggctcatttaggatctatctcctgggtggtcgtttccgttgccttaggctcactttgattacaatatcagctttgacacgagacctagggctccgtgtgacacttgtgctcagaggcggggttgccgttggatgctggtcttcaggccctggtgacacgggctcctggttgttgggtttcacaggccgccctcaggctcctgtgtctcccagggccccagcctcacacactgaggtagacgttgcctcaacggcattgttcccggaagggcctgtggggttggggatggggtttcaggctggtggttcctctcttcctcttcctctccacgcggtgggaggtccctgacggggcttctcttgttctgtcagcctcttggggagcaagggacataaaatgttttgctccacaccatgtataaaacgtgtaattcggctgggcatagtggttcacgcctgtaatcccagcactttgggaggctgaggtgggcggatcatctgaggtcgggagttcaagaccagcctggccaacatggtgaaaccctgtctctactaaaaatacaaaagaaaaagaaattggccaagcctggtggcgggtgcctgtaatcccagctactcgggaggctgaggcaggagaatcactgaaacccgggaggcggacgttgcagtgagcggagatcgcaccactgcactccagccagggcaacaagagtgaaacttcatctcaaaacaaacaaacaaaacatgtaattcgtagctggtaggggcttgagcgttttttgcagtgtgttagaactggcccagatgactaaaaacgtttttaatcatgttttatttttaagattttgacttcagcgttccaggatccatgaagcttcataatcttatttctaagttgaaaaagtggatcaaaatcttggaggccaagaccaagcaactccccaaattcttcctcatagaggaaaagtgccggttcttgagcaatttctcggcacagacagctgaagtggaaattcctggggagtttctgatgccaaagccaacgcattattacatcaagattgcacggtgagtgggccagcctggcaggtggaactaacccacggcgcccatggacatggagccccatgggagctccagggtggaccctgtggggaattttggacacagattccctgacatgggagaacataagatgattctggaatgtaagtggtcaggcactttacaagttctgcccgcgctgactggttagctgtcctgagtgcagtctgggtttgcattcagcagaccttcttccgagtcaccatagaacttgacaaaacagtgtgtgtcccactcttgtaaatcctcgaagcacagtattgaggcagaatcagatgattgtagcatttcctagagtgtgctgcatctcatttgaaatgctgaaagggctttgaagaggtttcttttaacaaaaagtgtgtttcgtctttatttctgaaccagacacagctctgcttttctatatgtccagagtttagttgccctttcctccaaatctggctcctgtcctggccagctctccctcctccttgacttccgtccgtggctgctgaattgaaaatattgtgactcatttacaccgcatcagggtgaggcagggtacaaataaattgataaacgaccgctggcctacacagtccgttttcccgtgacagttcggacattcctagcttcttctcaagacaaggactggtagcagagatgcagggcatgtcctcatggcttctcgctctggcaggttcatgccccgggtagagattgtgcagaagcacaacaccgcagcccggcggctgtacatccggggacacaatggcaagatctacccatacctcgtcatgaacgacgcctgcctcacagagtcacggcgagaggagcgtgtgttgcagctgctgcgtctgctgaacccctgtttggagaagagaaaggagaccaccaagaggcacttgtttttcacaggtagggttgagagccacagctcgctgggtacacaggcagcttcacaggtggggatgagagccacacctcgtggggtgcacaggcagctcacgttagcctttgagggtccagctgcgtcagcagagaatgttgtagtctgtgctgaccagggaaggcctcaggaagaggagcagctccaggccttcaggcttctcactgagagatgagagctgtgtccacctttcctctaaggcgagcttgtccaacctgcgggctccatggggcccacgatgcctttgaatgtggttcgacacaaattcgtcaactttcttaggacattatgagatttctttttctttttttttttcttttttagctcatcacctgtcgtgtcagtgtattttatgtgtggcctgagacaattcttccaatgtggcccagggaagccaaaagattggacatccctgttctaaggtcttttgcactctacggagtgggcccctggagagctggggcgtctcagtgggtgctgccggttttgcttctcctcccgggaacccaggctgctgggaggagaagtgaaaccaccccggccgagcctgggcgccagcgaggcagcagcatgcatcaggtttccagcgcgcctctagctgcttcacacgctgcactctgggccctccctgaatttcattcctgggtgaaatgcaggactcgggaaagtctagctgccctgttaaggccacagaaattgccagggggacacaaatagctgataagcaacctctgaatgaagtctttgtcactgagttatcgtgagtggcctgattgtaccggcacgtagatgagatgcttataatgttatccagagaagagagccactttgatgactttttagcatgtaatccctgaagtcgggagcccgctgcaatgtatgttatctagtcctttatggaactttcttttgccaccaaagctgtgatcagccccttttgacctgaaatctctgacccttaatttttttatatctcaaaataagatttttttaaaagcctaaagaaagctcaaaatgcatcacagaaagctgtgtatgttttaacatgtatataacatgacctgtagtgttgattccagctgtgggttattgatttctctgcttccaaatgcttggtcagcacagaatggtggtcctaatgtgtgtcctggagtcatttggggatttctttatgggtagacgccaggacagcaagccatcagctgtggcttaactgacattagacagaatcagccacttggttcacagaagtcagaatcatctgtgtgcacttcacatgcccctgactccacgtcaggggttacagtggctgggacacagctgccactgggaccctcaccgggcaggcttaatctgccatcttctggaaatctttcagctccctccaacttcattgcaacaagatatctgaatattccctgaacctagtatcttcacaaagtattatctcatttaatccacaaacaaccctatggggtaggtactattatcccacttttggaagagaaactgcacacaagtctggtgctgctccccaaggtgacgtcactggggagacaggctctggagtggtcgcccagcgctcctgccgcctccagctgactcagaccacagtggtttcggtgcaggttagcatcctgtctggcaggttgtagattaactgcatctccaataccgaatggtgattgggaacagagtactggtcaccatgtgtggacagggatttacacattaatggggctagacgatcaggttgatgctggttgctttccttatgtggacagaacacagaagatgacctgagggatgattttcctcctccaaagatggggcacagccgtcctaggtgctgaaagacaagtttgcatcattagacagcagctgtctcagagcaggaaggccggactcttcccatagactctgattaaggaaagcctctaagagtgagcatttggcagagtctgtttttttttatttttagttttttgagacggagtctcactctctcattcaggctggagtgcagtggcgcaatctcagttcactgccacctccacctcctgggttcaagcaattcttctgcctcagcctcccgagtagctgggactacaggtgcgcaccaccacgcctggctaatttttgtatttttagtagagatggggttttgccatgttggccaggctggtctcaaactcctgacctcatgtgatccacccaccttggcctcccaaagtgctgggattacaggcgtgagccaccatggccagccatgtttattcttattttttagacagggtcctgctctgtcacccagactggagtgcagtggcgcagtcacagctcactgcagcctccaactcctgggctcaagcgattctcccacctcagcctcccgagtagctgggactataggctatcctttattttttgtttttttaagatgtcttttttttttttttttctttgagatggagtctcgctctgtcgccaggctggagtgctgtggcgtgatctcggctcaaggcaacctctgactccctggttcaggtgattctcctgcctcagcctcctgagtagttgggattacaggcacctgccaccactcccggctaatttttgtatttttagtagagacgaggtttcaccatgttgaccaggatggtctcgatctcctgacctcgtgatccgcccactgtggcctcccaaagtgctgtgattacaggcgtgagccactgtgtccggccaagatgtctttttaagattgccttctaaagcatttctgtttgtggacacaaggtgacgatcagttcgtgccgtcagagcctcatgccatctgttgagcaaatggatggtgcatgaccaccgggttcttccagctaagcccccaaggcatacagagccgggtcagctctgctcccagtggcactctgacggtggagctgagcactggcccgcggtcaccctcagcctgccccgtttctcttcctctctccccagtgccccgggttgtggcagtttccccacagatgcgcctcgtggaggacaacccctcttcactttcccttgtggagatctacaagcagcgctgcgccaagaagggcatcgagcatgacaaccccatctcccgttactatgaccggctggctacggtgcaggcgcggggaacccaagccagccaccaggtagcagtggggccgggccgggggccgagctgccgcctgcagccctcctgtgtggggcagtgcctggagacaggggtgtttaggagatgaacaggcatttgttgggggccacctctgtcatttaaagtaactttattagactcatgagatggtggaaatgagacagctattgaccttggtgagaggacacttgtcgtggacggtttgttatgaccagacacgggtcagtcctcgaccttggagaggccccttgccctctgcctgtacttacaaagaagcgccgaaattagaattttaaagtaagtttctggcaggctcacttgacagccacacctgatctgaggtgatgggaggctgtttataggcttcattcatccacttcatgttcctgttcacctggtctgctgctggaggtgttaggcgatgtgcagcatgtgtgctgttttctaaaatacaaaaagcgacagactctggagtgcatggggcccagctgtttcggttgcctgagcccggagcatggtgcccgcaggagtcttgggtggccctggcctgcagcccctcggaggtacagaggcccctcattcacctgcacgtttttgcccttggtaggaggcagggcaggtatgggctttaggtggggagatttttgggggattgtgtggggcacccaggggcagctgttttggcctctccctgggtgccccgtggtcctttctatgggtcccaagaaggagagaccacagaggtggatgctgtgaccttgtcccgagtcacccagggacttgttccagttctcctggctcctggaggacttagtttggttgaggaaggttgagcccatggtgtactctgtggcccagggcacggcagggcccgaggtattccaggctgcagcatcaggtgcagcctccagctctgtgcaggcagaggcatggatccctgtttctgatcagcctctgttgacagagttcatggcctctcttgggaattgacaccagggcttttttgtggcacaggccatggcctggtcattctgtggatgatgggcagttctgaggtatttgcaggagaggaatggattatattcttaaggcgacattaactttcgacagcgtggaagccagtgacaaatacatgctgacctcagagtcatcctgtttctaaacagcgtgagtgaccgactaggcagtttgttccagcttagcagctgccagggcctataggcagagggagatgcccacagcacagaggaatccagcttcagagccgcttcctcctcttgtttattttgttatttattctactccttcattcttctctttttttttttttttttttttttttagatagagtttcgctgttgttgcccaggctggagtgcaatggcgcgatctcggctcaccgcatcctccgcctcctgggttcaagcgattcttctgcctcagcctcctgagtagctgggattataggtgcctgtgaccacacctggctaatttttgtatttttaggagagatggggtttcaccatgttggccaggctggtcttgaactcctgacctcgtgatccacccacctcggcctcccaaagcgctgggattacaggcgtgagccaccacgcccagcccaggcttttttgttttgttttgttttttaactaaataaaaaagctcctccagactgttgtaagcctttaatttctagagttctgacaaagttgattttgatggttttgccagcattctcactgcttaaggagcagattttggaactcctttgcagtctcagaagtgcttcttcccatttgacggatgaggaaacaaacaaactgcatgtgtcgccggtggcctcccttgttcttgccggcagaagggcctgctttctcacagccattcccacagagcacgtgggtaggactaagctgggaaaagaccccgtagatggcctgtaccagatggtcgaacgggaagtccattaactgagtgaactcttactgagttggtgatgtctgcagtagtctatgagtctctagtacagagttcagtctctcgtgtggtgtgtgtggttagaccagctccttcagtttgtgaaacatctgtcattagtataaagtcttggttggaagtggtgctgctgttgtccagctgttgtgttctgttaattggcctgatatattccatagtcagcaagggtggaaatgttcagatatttacctgcattcttgtcaggtatcgcatattaggtaactgcagctttgacgcagaccagccgcattggtgctttagagcagacagtggcgaaccctggagggaaacagccatcttgtgcctcctcgccttcagtctcctaacaatgcgtgcgttaaatctgtcaccagaatttacagaatttgctcttggtgctaagttaaagaggaattgcaatttgagaatttttcttttccaaaaaaaatcagtgagtgagatgggagtgtcacggagcgctgtgtttcaggtcctccgcgacatcctcaaggaggttcagagtaacatggtgccgcgcagcatgctcaaggagtgggcgctgcacaccttccccaatgccacggactactggacgttccggaagatgttcaccatccagctggctctgataggcttcgcggaattcgtcctgcatttaaatagactcaaccccgagatgttacagatcgctcaggtaacctgctttgaacagccagatcctctcctcgtgacatcgcctttctgctgaagttcctaaagtgtctccttctgaaatttaggacactggcaaactgaatgttgcctactttcgatttgacataaacgacgcgactggagacctggatgccaaccgtcctgtcccatttcgactcacgcccaacatttctgagtttctgaccaccatcggggtctccggcccgttgacagcgtccatgattgcggtcgcccggtgcttcgcccagccaaactttaaggtgggtctccacgtcgtcctatcacaggcgcaggctagagccactcagatgcccgcgcgtcacggccttgcaggagctgctgatgtgcctcacgggctctgcgctctccacagtggccagcacccctgtgtgttatgtcctttgctgtgagggcaagggatggttttctctttggttcactcttgtctgtagtgcttggaacgggcctgcctgacactcggcagatgccggaaggtgtcaagtgaacaaataaacagattgggcctcagtcgcagcatggctgcctttgtcatctaggtccgcgctgcccaacactgaggccttctggctgctgctccaagtggaggaaggggtttgtcccccagcggcttccccagcccgtcctgagggcacacagcctggcctggtgctgaaactcgactggcccttggtggccctgagcggccgctgtggttgagtcccaccttgttaggaagctgcccctgtgggctgttcttggttaaacacaagtcgtctcgttctctccctcacgcaggtggatggcattctgaaaacggttctccgggacgagatcattgcttggcacaaaaaaacacaagaggacacgtcctctcctctctcggccgccgggcagccagagaacatggacagccagcaactggtgtccctggttcagaaagccgtcaccgccatcatgacccgcctgcacaacctcgcccagttcgaaggcggggaaagcaaggtgaacaccctggtggccgcggcaaacagcctggacaatctgtgccgcatggaccccgcctggcacccctggctgtgactgtggccgccacggccacccggaatgtgaagggcgctccgggctctgagcccgcagcttttacgacttctccctgcctcgttccttatattcacagaagccccatagtttcactgggttgcggttattttcctggtagtttgcgtgtaagaaagggagaatatagttttagaggaagctgaactatgacgatgctgggcgaagcggttggaaatggcagagctgaaacttattccaagctttcaaaataatcttttaagaagccaggattctccggtctggaatttctgagtgagtcctttttttatggtgtcctccctctgtgaatgtacaggcggaactgtacgaacagctcccttccatccatttttaactctttcggaaataacacctcacagcagcttcgtgcttttgtacagacctttgtaacaagtgtacagaaaactcattttgtttgagaaacaggagttgatgaacccatcatgctggtttttctctgagcacaaagttttaggctgtacacagccagccttgggaatctcgttgagcgttcggcgtggatccacggggccaggccaccctgcgggagcgccacacgcatccacttcggattcagtgggtgaagacagaactctgagagtctgcaggcggctcctgtgctttttatttctggctcttcggatgtcttctagacatttactatcactgcacctgaagaaaaaatcacttttaccttcctaatttaaaaagacaaaacagaaatgtacgttccttcgctagctttagtctttctgttcccatttttataaatctgagcattgataatgttctatctaaatttgtacagtgtgatttttttttttagaataaatattttataaaagggtttattgtcccttgtttatgttaaaatgcttgtttccatgaggggtttcttccctctcaatgtccctagccccttgggaaccagaggccccagagacagtgtgggctcctcagcgtagcctcttggtgacagcgtgcgctgcctgggcaggcacagtgctgctgtgatcacaggggaggccatgacttggcacctgggaagccagctcagagcatattcagtcaagttgatgaggaatggcggcccgacctcagcagcaggtcggcgtgcgggactctcagaatggcggcctgatctcagcagcgggtcggcatgccagactctcggagccctcagctatcttcatgtgtttcaggactgctgccatgtaacgtgtgtgtgtggagagtgtgcggagtgtacacgaagcatgcccggaggctcagcatgaagcactctgtacccagctctacctcctcattgtccttcatccagtgtgtaccttcagccaggcctgccctcgtgtgggaggggcagtccccaaggagcacacgccatgatgtcagaaacatcttcttcgaggaagatggccctttacaggccccaggggacgggggcagcacggagccctctctggacctctgccgcaggccacagaaccttctccagcccttgactctccttgcctttcatttaccctccattgttccaggctaccacggaatgatgattacagctgagtttacccaaatcccaccacagggtcaaatgaaagggccttgacaagatgtcccttggcagcttgagatcgcagttgtgttgctgggttatggcctgggtgcaggctggtttgcagtgggcggtactggcagctaccatcaaggtctctgtgctgggctccagccctcagcccagaggggtggttccccactttatagagagggggtttccagctcacagaaggtgagaagcttgtcccaggcctggagcagctgtggagaaactgggagggaagcccgtccagcctgattccaagcccacatgctgctcacaggtcaaggccgagggactgatttttgccggtctgactggactcaagttacttcccagttccttgcagagagctgtctttgtgagacagtgtcttgggttctggaatgatgggagccgtgctttgcaaatgaggagtgattgcgtgctcatctggcagctggtgggtgtcctgctggcatcaggcctgagcggtgaccgtgctcctctgattgtcctcactgcgtgtgacaaggcctgggccactgtgtgagtcgtcttgcgctccatgaagcctggtgtctgtgcagatgtgtgggtggcgttagggttgggggacatttgtctttcacactggagaatgggagtctggagctggtgctactggtgaggaagaggcccggcctgctgccaggttcgcccacaccttccccctggttgttgggaaaaccaaccttggaatggccaaggcaggagatagcacctccccggtgaagatccaggagctctcatgagctccacgtggaaagatcaaggatctggagtctggagcccttcaggcagcaactcagtgaccatgaacctcagctctgtccacccggcacagcattgctgggagctggacccgggaggctgccggctccagagtgaggagggtccagaccatgcagacaatatgccctttttctccaaacaccatttcaaggtaagtgctatgatcagacttctttttattcttggggtaagatatgtataacatcaaatttaccattttgatgaattttaagtgcacagttgagtggcattatgcaccttcgttgtgcagcaatcaccagcatccatctccagaacttttacatcttcccatctggaaaaatctgtcctcattaaacactcaatccccatcagccctcccctccgcccctgccaactaccattctaatttctgtctctgtgaatttgatgactctagggacctcatgtaagtggaatcatacaatatttgtctttttctgactgttttttgtttgtttttgttttgagacggagtttcactgtcgtgacccaggctggagtgcagtggcacgatctcggctcaccgcaacctccgccttccaggttcaagcgattctcctgcctcagcttcctgagtaactgggatttcaggcccccgccaccacacccggctaatttttgtatttttagtagagacagggtttcaccatgttggccaggctggtcttgaactactgacctcaggcgatccacccacttcagcctcccaaagtgttgggattacaggcatgagccgcagcacccaggcttttgtgactgttttatttcgcttagcataatgacctcaaggttcatccatgctgcagcgtgtcagactctccttacttttttaaggctgaattgcattgcgttgcctgtgtggacattttgtttgttcgttcatctgctgatgggtacttggcttctctctcttttgtccactatgaataatgctcctctgaacataggcatacaaatatttgttcaatttcctacttttagttctttggttatctacccagaagtaggcttgctggatcatataggaattctatctttcattatttgaggaactgccatgctgttttccatagcagctgtatcattttacgttcccaccagcaataggtaaggttttctgtgtcttcacgttcttgccaacacttgcaatgttctgtttttttgtttggtggtggtggttgttgttttgagatggagtctcgctctgtcacccaggctggaatgcagtgacacgatctcagctcactgcaagctctgcctcccgggttcatgccattctcctgcttcagcctcccgagtagctgggactacaggtgcccgccaccacgcctggctaattttttgtatttttagtagagatggggtttcaccttgttagccaggatggtctagatctcctgacctcgtgtgatccgcccacctcggcctcccagagtgctgggattacaggcgtgagccaccgcgcccagctgggttttttttttttttttttttttatgacatccatcctaatgggcatgaagtggtacttcactgtggttttgatttgcatttccctagtgatgagtgaagttgagcagcttttcatatgcttgtgagccagtcatatatcttctttggagatgtgtcaattctagtccgttacccgtttttcaattgagttgtttttgttgttgagttacagttctttatatagtctggatagtaatcccttggagatagatggtttacaaataatgtctaatattgtgtgagttgccttttcactctgtcgatagtgtcatttgatgcacaaaagtttttaattttgatgcagttcaatttatttttcctttgcctttcatgtaatgtcaaaaaatcattgccaaatctaatctcatgaagcttttctcctatgtagtcttctaagagttttatagttttaacacttactttagatctttggtccactttgaagttaatttgtgtatatgctataagctgagggcccaactgaattcttttgcttgtggatatctggtttttccaacataattttgttgagaagacgatcctgttggaaagggtgttggcgtcccaaaatcagttgacgcatatggtgtggagagttgatttctgggctctctgttctgttcagttggtctctctgtctgtctttatgccaccactacaatgttttgcttactgtagctttttagtaagatttgaaaccaggaagtgtaagttctcttagtttgtgcttctctttcaagattgttctggatttggggtcccctgcaatttcatacaaatttgaggatttatttttctgtttctgctaaaatgttgggattttttctttctttctttcttttttttttgagacggagtcttgctgtgtcgcccaggctggagtgcagtggcgccatctcggctcagtgcaacctccacctcttgggttcaagcgattctcctgcctcagcctcccaagtagctgggattacaggcgcatgccaccacgcccagctagtttttgtatttttgtagagatggagtttcaccatgttggccaggctggtcttgaacccctgacctcaggtgatccacccgccttggcctcccaaagtgccgggattgcaggcgtgagccactgcgcccagcccaatgttgggattttgatagtgattgtattgcatctatagatcactttgagtagtaatgacatcttaacaatattttggccaggtgtgttggctcacacctgtaatctcagcactttgggaggctgaggcaggaggattgcttgaggccaggagcttgagaccagcctgggcaacatagtgagacctcatctctaccaaaaatataaaaattagctgggtgtgttggtgtgtgcttgtagtcacagctacatggaaggctgagcaaggaggatcacttgaccccagaagttggaggctgcagtgagctatgattgtagcactgtactccagcctggatgggagaacatctcaaaaaaaaatgaaaaattaaaaatacaatatagtatgtcttttattccataagcttggaatgtctttttttttttttttgagacagagtctcgctctgtcacccaggctgggctgcagtggcaggatctctgctcactctaagctccacctcctgggttcacgctattctgcctcagcctcccgagtagctgggactacaggtgcccgccaccacgcccggctaattttttgtatttttagtagagacggggtttcaccgtgttagccaggatggtcttgatctcctgacctcgtgatccgcccaccttggcctcccaaagtgctgggattacaggcgtgagccaccatgcccggcccgtcttctataatttctttaatgaatgatttacagttttcagtatacaagtatttgactttgttggttaagtgtgttcctgtttattctttttaatgccgctgtaaatggaattgttttcttaagttcctctttggattatttattgttagtgtatagaaacacagctgatttttgtatgttgatttttgtatcctacaattttgctaaatatgtttattctaatagtttgttttcgttagacttttctataatcatgtcatctgtaaacagataattttacctcttccttttcaatttggattttttttccccatttgcctaattattctggctggaatttccacttctgtgttgagtacaagtggcaaaaaacggtcacctttgtctcattccttatcttagaggaagccctgtcagtctttcaccattgagtatgatcttagctctgggttttgcataatggcctttattatgttgaggtgttttccttctattcctagtttgctggaagaagttattatctgaaaaggtgatacatcttgtcaaatgcttttctgtatcagttaaaatgattttgtggtttttcctctttatcctgttcatttgttgaattatccttgcacatcccaggaataaatcccaatttatcatggtatatagtccttttaatatgctgttggatttggtttgctagtattttgttgaaaatctttgcatcagtattcataggggccattagtttgtagttttctcctggtgcctggctttggtatcagggtaatattcaaggtcatgttataaagccttgatcctacatcctagctctgctctcaacaaagtcatcctgcctcttgagagcatagacatggaaaaaaatcggcacacacaaaaaatatgtatacatatatatctgtatatgatcatcaggtaaaaatcagaagacaaggatgctatggcttcctgagggagctgcagtgcttatggtggtggaagggaagatgaaagaacaaacgagagagtttcaaaagagcatgttttaaaaaagtcattggccgggtgcggtggcccatgcctgtaatcccagcacttttggaggccaaggcgggcagatcacctaaggtcaggagttcgagaccggcctggccaaccatggtgaaactccctctttactaaaaatacaaaaattagacaagcgtcgtggcaggcgcctgtagtcccagctactcgggaggctgagacaggagaatcaattgaacccgggaggcggaggttgcagtgagccgagaccatgtcatttgcactccagcctgggcgacaagagcaaaaccctgtctcaaaaaaaaagaaaagtgatcaaggtagtagacacggtagatgtgggcacacagataggcttaccaacttgtttaaagccccaactacctagtgatgacactgagatcaaaacctgaaaatactccgacttttgacagtagaaaatgccccaacaagccagacacacgttccctaacctagagtgctgcatcctctcacagacatcagagcgcaggactgtgtctgctggctaagcttacagacacacactgcattctagtgactgtgccagggtgagaaataaaaaaagatataagagtgacatccagcaaggggacagaagaggaaggaatctctctccgcaccgagacaaaaattggagtggcagaatctgtctgaggtaaccgttttggaactctggagtctaatttggatgcttgcaacttccaaggaaaatcttggctggtaagttgcagttaatttcggtcaatttcagcctttaggatattagcgtctccccatcctgagtcttgtggtaggcagccatgcccgtgttcctggcatgacttcctggagccagggtgaaaagtaaggatctggcctccacgtatcaaggttcagtgttttgattgcagaagtgcaaacatagaggtgggtagccattgttgcattccccactggctgaagtggcttccagaggatttaagggaacagcctgagctattgtttttcttcttacctgtttttccatttggggagccagacttaaggatgaggatattgaaaagcacatgtgcggacaacttacttgggcctcctgccaacagccagtaagatgccaggtccctccatcacaaagtcacatgaaaatgaattctgccaacaacctggaggagcctgcaagaagattctccctggttgagccgagagatgagaatacagtctggctgacaccttgatcgcagccttgtgagtccctgagcagagaaatcaactgtgaaataaatgtgtatacagggcaatttagaaagccactccacatacctagagaaatatgcaggctcagaagagacctgggaagactttaagctttcacctcaagctgatcctgagataccctcaacagttggtgtggggagacgagtaaatgcttgggggggaaaaaaggagaatctgatttccagagttataagattcaaatgtccagttttgaacaagaaacaatcacaagaccctcaaagaaatagaaaagtatggcacgttcaaagaaacaaatcaacagaaaccatcactgaggaagcgctgacagcagacttactagacagtaactttaaaacaactgtttgaaagatgctgaaggagctaaaggaaaacaaagacaggagaacagtatatgaacaaaatgagaatatcaataaatagaaattttataaaggaagcaaattctggaactataaaaagtacaataactgaaatgaaaaattccctaaagggttcaaaatatttaagcaggtagaagaaccactcaatgagcttgaagatagggcaattgaaactgttgaatctggggaatcaaaagaaaaaaaatgaagaaagtaaatgaaaacctaaggaacctacctatggaatgccataaatgagaccagaagtagagaggcaagggcagaaagtatatttaaagaaagttcaacagaaaactgctcatatttgattaaaaaaaaaatgtatctacaaacccaattagcataacaaactctggataggataagctcaaggaaacacacaccaagacacttcattgaagacaaaagaaaaccttgaaagcagcaagagagaagtaatttatcacatacaagagattctcaagattatcagcatatttttcatcagaaactttgggaatcagaagagaatgggctcatatatgaaaactgctgaaagaaagaaaacctgttagaattctacatctaacaactgtcctttagaaatgaggaagaaattaataccttcccagataaaagctgagggagttcattatcattctttgcaagaaatgctagaaggagtctttcaggttgaaacgctgaacactataaacttctttaaaagaacactaagcatcttacaacttgaagttgtaagaagaaatagagatctccagtaaaggtaaatacatggacagttataaaatctagtatattctaatgatggtttgtaactctttttattttctacatgattaaaaagacagatccattaacaactgctaatattgggtgcacaacgtataaagatgtaatttgtgatgtcagtaacagtaagggagacagcagtacaggagcagagttctgtatgttattcaaattaggttgatataaattcgatttaggttgttgtaatgttaggatgtcaagtgtaatccccgtgtcactataaaaaatgaactaaacacgaaaggcagtaatggaggaaatgaggaaccaaaaaaaaaaaaaagtttaaatggcagaagtaagtcccttcttatcagtaagtactttaaatgtaaaatggattgaattctccaatcaagagagattggagatggcagaccaggaagctccaggcccacatttccccaaggaaacattgaggggaaaaaaaaacaactaggcactcactaggagctctgggaaccagccaaaggtctatagcaaccagctgaacacccaatcaagaaaaagccacattgaaaatagtttttatgtcatttttatttgcccttcccccattcctccctggcacaactgggtgtttgggaggaagcagcccaatttccagtgtcttcccttgcaccggagggagcagagcagaactgatttgcagtgttctgccctgtctttgggctacctgaaggactggtttctatgtcatctgactcagaggtgaaacagggaaggtggcatagttcagatctcaggctggcaagagccatggaaggcagtggcaggtacgacatgtaaaatctgccaggggcaccacagtggatacctggggcaagagattatgggcagaaaatataagagaacatcttattcctaagaagcagctgggttaagaccctttgaaaaattaagactttttttttttttttgagacggagtctcgctcttttgcctaggcaggagtgcagtggcgcgatcttggctcactgcaagctccacctcccgggttcgtgccattctcctgcctcagcctccagagtagctgggactacaggcgcccgccaccacacccagttaattttttgtatttttagtagagacggggtttcactgtgttagccaggatggtctcgatctcctgacctcgtgatctgcctgcctcggcctcccaaagtgctgggattacaggcgtgagccaccgcgcctggctaaaaattaagactttgaaaagcagccatgtatatggtataaacgaaagaaaaacagaggcccctaaaagacctgagatgaccttaagctgtcgcctcaggctgatagcaactattacgatataccctctgaattagtgaagcttttccccaccactcttcaaagactggaagagatgactgcttttgcgaatgcccagtttaaaaaaaaaaaaaaaaatcacaaggaatacaaagaaacaggaaaacatgtcccattcaaaggaacaaaatatatctctagaaaccatccctgaagaaacaaaggcatcagacttgttagaaaagactttaaaacagttgtcttgaatatgcccagagatctatgggagaacacgacaaaggcctaaaggagatcaggatagtgatgtatgaacaaaatgagaatatcaaccaaaaatagaaattatctaaaagaaccaaattctggcactgaaaaatacaataaatgaagtattcaatacagtggttcaacaccagactcaaacaggcaaaagaaagaatcagacaccttagaaaactgatcatttgaaatcactgaactggacgagcaaagagaaaaaatgaagagagctcaagggatttatggaacacatcaaggtgtccgatttaggacaggtccaatttaggaaattccagaaagagaagaaaggaagaggacagagcttatttgaaaaaataatggacaaaactttctcaaattggaagaaagaaatggacatacaaatttaagaagcttgacaaatttcagctaggataaacccagagaggctcacagcaaaggcgaagggtgaaatagctccactataatagtagaaagcttcagtaccccactttttttttttttttttttttgagatagagtcttgctctgtcacccaggctggagtgcagtggtgcaatcttggctcactacaacctctgccttccaggttcaactgattctcctgcctcagcctccagggtagctgggattgcaggcatgtgccaccacacttggctaatttttgtatttttattagagacggggtttcgctggtctcaaactcctgacctcaagtgaacgcctgcctcagcctcccaaagtgctgggattacaggcatgagccactgtgcgcagcccaataccccactttcaataaattattaatagaacaactagacagaggatcaataaggaaatacaggacttgaacaacactgtagaccaactggacctaacagacatacacaaacactccacccaacagcagagtacacattcttctcaaatacacatggaacattcattctccagaatagactgtctccagagaggtcataaaacaagtctcaataaatttaagaagactgaagtcacacaaagtattttctctgaccacaacagaatgaagctaaaaatcagtaacagaaggaaactgggaaattcataaatatgtggaaatgaaacaagatgctttcaaacaaccagtgggtcaaagaataaatcacaagggaaattagaaaatatcttgagacaaatgaaaacacaacataccaaaacttatggaatgcagcgaaagcagtgctaagaaggattattcaccatgaccaaggaaacttatggctgtaaatctttatattaaaaagaaggttaaaaatgaacaacttacattatacctgaaggaattaggaaaaaaagaacaaactaaacccaaagctaacagaagaaaataaatactatagcagaggaaataaaagacaaatgacaaaaatcagtgaagctaagagttggttcttcaaaaagatcaacaagattgacaaaactttagatgattaagaaggaagaatcagctaaaaggaaagaggggacattattaccaatgttacagaaatataaaggatcgtagagtatcatgaacaactgtatgccaacaaattgaataacctagatgaaatggattcctagaactctacaacctaccaagaccgaatcataaagaaacaaaatctgaatagactgataactagtaagaagattgaatcaaaaatctaaaacgtcccaacaaagaaaagctcaagaccagatggcttcactggtgaattctagcaaacatttaaagcagaattaatgccagtctttctcaaactcttccaaatagttgaaaaggaaagaatgcttcctaacttattctatgagactagcattacggtgatttttgaaagccagacaaaaacactacaagaaaactatagaccaatatctgttatgaatatagatgtaaaaatcctcaacaaaatattagcaaattgaatccaacagcatttttttttttttggagacggagtcttgatctgtcacccaggctggagtacagtgccgcagtcttggctcactgcaacctccacctcccaggtttaagcgattctcctgccttagcctcctgagtagctgggactacagtcgtgtgccaccataccaggctaatttttgtatttttagtacagataaggtttcactgtgttggccaggctggtctcgaactcctgacctcgtgatccacccacctcggcctcccaaagtgctggggttacaggcatgagccacaacgcccggccccaagaccatattaaaagaattattcaccacaaccaagtggaatttatcccaggaagggaaaggtggcccaacataagaaaaatcaatcaatgtaacacatcacattaatagaacacagggaaaaaaacatgtacatctcaactgatacagaagggcattttacttataaacattccctctgagatcaggaacaagaaaaaaattcccacttttaccacagctattcaacattgtactggaaagtataagccagagctaatagataaaaaataaaaggcatccaagttggaaggaaaaggtaaagctatctcctacagatagaaaattgcaaagaattcacaagaaagccactagagccaggaaacgaatttttgcagttttagggtacaagattgacacacaaatgcagttatgtttctatatactagcaatgaatgtccacaaaagagcttaagaaagcaattatgtttataatagcatctaaaagaataaagctaaccatgcaggtgcaagacttgccagttgtctgccgaaaacaaaatattgtataaagaagttaaagaaaacttaagtaaattgaaaagacatcccatgttcatagattggaagacttaactttgttaagatgtcagtaatgccaggtgcagtggctcatgcctgtaatcccagcactgtggaaggtggaggtgggtggaggagtttgagaccagcctgggcaacatggtaaaacctcatctctactgaaaatacaaaaattagccgggcatgttggcgcattcctgtagtcccagctactcgggaggctgaggcgggagaatcgcttgaacccaggaggcgaaggttgcagtgagccaagattgtgtcactgcactctaacctgggtgacagagtgagactcttttttttaaaaaaaaaaaaaaagtcatcctcctgtatactttaaatcatctctagattgtttataatttctaatacaatataaatgccatgtaagtagtttttattctgtatggtttagggaataatgaaaagaaaaaaaaatctattcatgttctgatgcaaccatccatttaaaaaaaaaattttttttttttttttttttgagacagtcttgctgtgttgcctaggctggagtgcagtagcgtgatctcagctcactgcaaactccacctcccaggttcaagcaattctcatgcctcagcctcccaagaagctgggactggtctccagctcctgaccgcacccagccaaaaaaatatttttgatccccagttggatccatatatgtggaacccactggtatgtagggctgacagtatttttactacaactttttaaaaaagtaagggctgggcacagtagctcatgcctgtaatcccggcactttgggaggccgaggcgggcggatcacctgaggttgggagtttgagaccagcttgaccaacatggagaaaccccatctctactaaaaatacaaaattagccgggcgtggtggcgcaagcctgtaatcccagctactcgggaggctgaggcaggagaattgcttgaacctgggaggtggaggttgcagtgagccgagattgcgccactgcactccagcctgggcaacaagagcaaaactccatctcaaaaaaataaaaaaaaaaggaaaaaacgaaaagataaccggtgcgcaaagaaattctaaattttctcaatcccatgttttttcccgatagagcactttcagcccactaccatattgccattagtttcccttacaattctatccttatctctgtccttcttccttggaaggcccttgccagtattcctgctgcctacacacttcctttcttgtgggtttgcaaagacactagaatctcatttccacaccaaaataacagacgccaaaaatgtaaagtcgtgagtttattgcatatgtaacaaaatgaacctgacctcctgggcccagcctgctgtacaatcactgtttgttttgtgtttccagctggttccataaccacattaaatagaactagtatttcattaaatacttttgattttgacatagaacattagtgtacaactttcacaaaataaatcagtgataaaaacagtgggaaggataacaaggatagcagcaatacttcaaaacaagacattacaaaataaattaaaaaatacgttataaagtggttgagaaacaaaaataaacacatttttaaaatccatactatgtttcgggaaggctgccgtgtggcacacacctggctgcagatggcgggtggggggacattttctctgcagaaggcctttcctgacatctcgggttgggtgaccaccttaatctgaatttggaccatacgtccgaacaagctcaggggtcgaaattcgatctggtggcagattctcttttcagaacttgagagagcccttttccggtcgccccgggcctcccaggcagcctcagctcttcctactgaaagcactggcggagtggtgttagctacatccctgagtgtcggctgacggccgctggtgagggcaagcctgaaaagccgggcccctgaagcatctgggcagaggggcagggggcatggctggatcgcctgggaccaccgagaggggcaacacagatcacacgtgagtgggcttcgcgcggacccaaagtagaacagtcgggaagcttttaccatttgctttgccatgttgagttctttggggtggttcaaaaggaccaaacaaaccatcgtagaaactgaaggttctaggagtgcagtgccaccgacagggaggcctgtttggaaagagtgaaccggagctctggaaaggtctgcgacactcacacaaccgatgacaaggcggcaaacccacacgcaggtagaagtggaaaagcagagacggaggccaggatgggaacgcgtgtgtccaccggggtcacctgtggaggacccgggacccagccctctggctctgggctgaagcaacacccggcacgagaggcagggcagcaccaaccagcatggggatggcggtgcagctgctaaggctcgcccccgactcctcccaacagcaaaaaggtagttttaaaggcgtcaaatgcaacattcctgcttcaaagtcttttaaaccatgagaccctggtttccttcctagttactgaagattttggataccaccaccaggaaaatcaggtggggcctctgacctcatcccggaggccgcttcagttctcgaatggatgtctcttccgcctcccgcgggttaggctcgtgatagagagtgggctgtccgggggaggtctgtagttttcacttcctcaccttcaagaggaagatgatgcaaggaaaggctggatacagccactggggaacgggcttctagaacaccctcaggaagcatcatggtgaatgagacacaggatgtgcccacctgtgggggcaaggcagaacttttcaaagaggctaagcccaccatttggcctggacttttggaatgggggattaaactttcctcctgcagcaaacctcatttggcagcccttctattctagaacctcagcagcccagaaattaacagtgacaaaaagaacagataaaaccattgtccacaaggtccttcccaggccatctcagacccacagcgggatcccagagacttcgacagcagtgaaatgtcttgctcatgaattaccctgtacttgcccccaccccaaacaaaaacaacaacaaagaaaccacataggaacattggcctgctgttttctgcccaagttcagctattggaaatcaagccactttaagataaaatactgacttttgtgcaaactggaaatggtgtcagaaacttcgaatctagccttgcttctggccttgctcatcatatgaagacatctgggcaagtgaaccgagtagcaatcgttagtgtcaccagctgccactgggaaaggggccacatgaggcagtgagtgtgaagtcgtccccctctgctgtcacaggtttgcgtccacaccctactttttgtagaacagtatctttgggtggatttacatcatcgaggttatcctttcaccattgcttttaagcgagttcacaccaagccagcagctatgatgacacaattttgttagtttagctcttagcagttgctgcatcatggtttactaatattttaagtgacacagtcgatgctcttctatggacaacagtggcacagaggtcacagctttgggactgactggttggctctagggctgattttggtctgctctttcctacactccatgacatggtgttttcactgaaaaaaaagtcaaactggacagataatgcagcaaaagggacccttaaaagatcgtttttctctatgtaaaacaaaattttcagccaagatacccagaaaagaaatatcctgggcctccaggaaaagctgctccaattccttctcctttcaaaggggaaacacattttgactcaagcttcctgctgtggcagaattccaataagcatacattatatagttattttccagttggaaattgatctgctacccagaaccggctgctgggatgtgaaatctggaatctgagctctgataagatatctagcagctgctcaaattgaaaaggggcctcaaggctgttttgagatggaatagctggcatagccaccagttccaaaccctcaatcagccacgcccagtcccctaactgtgagttgatgctcccgtaaagagctcagggctgtgagccttatcaccacatgggttgcaacacagcagaatatcctgtgtgaccaaagccaaaggctaaacctggctgcattttattggatgggtgatggaagtgggtgggagtactatggtaaaggagggatatatgggtgggagccaccaacaaaagtcccccatccccctcccccaacagaaaggagagagacaaccctttcccctcaggtgatctggaattccagggcctctgccagctttgcaggaggtgcacagaagctggatgcttttggtctggtggccatgagctagactctgttgcctttggttgcttttcactccacagcaaacccgcaggtctcctccacggctgtcagcagcttctcgtagagcttctcataggactcatatggtggaatgtcgatccggttaaagctgaaaaaggacaaaagagagtcaccgtgtgggcagtccagccctaggaccaacctcaaggccaaggacaggcagtgagaagtatatgtgggaggggagaggaatggggggtggggcagggttggtgatgagttctccatgtcccctgtgtttttctgcttctaatacaaagatttgtaatttgtttttgctttttggtagagacagggtctcgctaggttgcccaggctgctctcaaactcctggcctcaagtgaacctcctgccttgccctctcaacgtgctgggagccactgtgcccaatcaacacacagtaaagtaagtcttgggccttcacaaccaaaacataaccaagttactatttactgcttctatcaggacaaagctctccacttgttttctgtttgtctgtctttgggagaaattctttctctgtactgggaatgcctctttggcagcccctgtaacctagactggctgtcaggcaacgtcaccactaacgatgtactgcgtgtctgtctgttcctctgggacttgatctgagaccaaaacagggcagtctggaaaattccctgcaaaaacaaaatagatctcaaaactaacaagatgacagatccttaaaagatgaaatgaatattcaacttctgactcgatatttccagggggaagctcatttccagtatttgtgcaaagaaaaagacatcctttaagaagctatcgtagcaaaccaaaaaatacaaaattgtgacccagaggatgtacagtgacttctggctttctagggtaagcaattaaggatggtttctgtctctacagagctgggttccagggcgggcactcttttttctggagcttcagagcatactttccacatccatctaactccaagcactaaactactaaaggacaaaagccttgtgagtagggtgtgcagccaacatggtgcgttcccgtaatggacgccacagccatgcttggagcaggaccttggcacccaccatggtccaggaccagctgcattaccccatttcacaggtgtggaaaaccaagttagaatatgaagtcacttgccccaaatcacatgtcagagggtgtcacagctagcatctgaccccgcatccttgggttccaagacaggaaccttccatcatctcacggggcatctcagcagcatctagaactggttcccccaaggaaatgtggctactcgtctcaatggatggttccaggacaaagtgtacgcaagtgattgtatttgtaaaccatacaggaaataatctactatggagactcgtttttaagttaaaatttaggaagaaaacatttgcaatagacaaggtacgtgtgtcataagcaggattccaagaagatggggacccagaaatgtcagataaagtgaagcccaatacatccaaactaaaaactatacaattttccttaccaacaggtgtgtgtacataagacctggcagagaggaagacttgagcctgctggagtggtagccacactccactgaaacaccaatattaattaattacatggctcataacaaaattagtttcataagagactctgacaacctttgtgtgggacgctgcaaagtacttgtcccatctgacacaagcactactgccagtcattgagaattggcataaatgaaacagagtcctacaaatcggaaaacagctttaaaaaataacatgaggccgggcttggtggctcacgcctgtaatctcagcactttgggaggccgaggtgggcagatcacctgaggccaggagttccagactagcctggccaacatggcaaaaccccatctctactaaaaatacaaaaattagccaagtgtggtggcgtgcgcctgtagtcccagctactcaggaggctgaggcatgagaattgcttgaacccaggaggcagaggttgcagtgagccgagatcgtgccactgcactccatcctgagtgacaaagcaagactgtctcaaaaacaaaaaactaaatcaagagaaaatctatatttaaattttaggttatatatactgtaagaaagatgtatgttaagtttagcaataatgttggccctcttacaggtatttttttacatggccagtaaagccgctctatacagtgtcgtaatgtcggggggaaagtctcttgcttgagggcttcagaattgtcattcaactctagaatttctccttctgtctcaggtgctgtggcttttgagttctgatgatgacaaaaatattttggcagagactccatctcaaaaaaaaacaacaaaaaaaaaacgtgaacgtcagcatcctctggggctcccaggacgccgtgacttcctggccgcggtgcttaccaggtatgggccttcggaaggttgtctgtgttcgcgtctatcaggtggatggtgaacagccggggccctgccgcgcctgtagaaccttacaagacaacattctagttaatgtacttcagagttacagccgtggcgcttcccggccacacagcccccaggagcagggccctgaccacattcccacccccacacccaggcaggctgtcctgtgagagggccatgaggttcccaggcctggttttaggacatgcctgcaatggctatcaaagtgacaaaattcagacacttttttgagacagggtctcactctgttgctcaggctggagtgcagtggggcagtctcggctcactgcaacatctgactgccgggttcaagcaattctcctgcctcccgagtagctgggataacaggtacatgccaccacgcctggctaattgttgtatttttagtagagacggggttttgccatgtttcccaggctggtctggaactcctggatcacctcaggtgatccacctgcctcggcctcccagagtgctgggattacaggcgtgagccaccacactcagccaagatgccaacattttagaatatcgcagggggcagagcaaggactgctaaggccccccctaaagtgcaccctgaccatgggcctgctccagacaggctccctgagggtcagagctatttgtacccaccctctggaatagacgacttgcccaccagttctgtagggcagggagaggcaccaggccccttcttgctcaggtgtttccaaactcagccccaagtgagcaccaggctggccagcagccaccactgctgctgcaaagacggctagctgacaggggtgccaggtgctgggaaaggagggcgcagagggcacgggccttggctctgctgccccttgctcctgtgtattcacagatactcctttcaagctgggccaaggtcagtggcaggacaggactccgggagcaatgaggaccagcagagacaccatctttatgttgggcagagggtctcagtgtgcagcccctggtttctggggtcctgggacaggaagctggctcctccccctcacaggccacaccctccaagccccagcctcctggggagtcaggacaggctgggccaggtgagggccttcagagacctcctgcagggccctggccactctgcccgggccaccattcagtgccctcccacagcaccagcactccctgttcgggactgtgaccctggtcacctctgacccaccttctagacacttggaggacactgggctaaagtctatccaattattggaggactaatgagacccttacaatgacagggactatctctaagcaggaaggtttagcatgtggacctgctgtgggcaagacaatggcgccatgagaaaagtgacttggtcaggaagcctggattcctgccctgcctccccactcacacctcctgttttttttcctcggggggataataaatcccatgacctcagtgagtctcggcttcctcatccatggaatggggctaataatccccatcagccaggctctcggggttgttgggagaactgaatgagaaaggctttgtaaatgacaggcaccagcaagctctgggagcagctgtcatggtcaggcagacagaggctcccagatacgagcggggctcagcctcaaacccctttttatccatgctgggcccccagcagcaaatctataggcagaggtcacaatggaaaagatgcaggtgccctgatggccaaagccgactgaaatggaattaacctcattttactcagcgaggcagagggaatattctgtgtttacaatgtgtctgtgtgtctatcagcatttacagtccaatcagctaaatttcagtatggtgacacccttcactcacctcactccttccagcaacgtaccctccaaaccctaagtgtaaaagatgagacattaggccgcctgccctacaggcagatgggcacctttcgcacagaattccaccccacttccggcgacctcagtggcttaaacagagtgagcaggacatcatctttcggtgtggttggtggctaaacgggttcatgtgcagctccaagctttggagccactgagactgggggcggttcccccatagctccctccccgggatcttggctaagctggcctcacagacactctgaaggcccctgctgtccagaccctcttggctttttggaagcagtgaggagggggaatccaggtgccctggagtggctccacagtctttgctcagcggggccccacacctgctcacacacggcccctgccaggtaaccacctctgtagggcagagcattagctactggagaacattccttatgccattttctagcacacatctcagaaaaacatcccagccaccttccagctcttcctgcccacagcgcacatagacgcgtcatcgaatagccctgcctccacgtcagtcaccttgcaaagccttgaagccttggagcgggactcgcgtggacccagtcacaaactgcaggagcctggccctcctttcttcatcgaacgtctccaccgcttgccagaaccaccgcacgatgttgctgtcggccacacagtgcttcagccgcgtgttcgacttccagtcgttcaagtctattttatccaggccgcctatgatcagctgaggaggtgcagaaaggtgaattacttccaaaatgcataaacccacgtcaggatgcgcctcctaggtacccgacacacaacagtgaaaagtcgattcccaagcaaagcagcagctgtgtactaggcagatgttgagacaggaagaaagctacaaacaggaggcctgtggcacatgcttccgtccgcctcctccaaacgggtctccaaccccaaggaccgcggtgcacagctgttgatgggatgttattttataaccaaagcggggtttttgctctgcatcggtgaggagtatcaaagaaccaaccggtgacactgaacagagctaaccatgaataacggcacgtcccagggtctctccaggacactcaaggacatgtggagtttcaagtctgaagagaggagaattcagcaagagttaggtggggctggggccgatagggcatgtttccgcaattggcttaaaaagttcaacccctgctgggtgcagtggctcacgcctgtagtcccagcactttgtgggggccgaagttgggcagatcacttgagcccaggagttcaaggccagcctgggcaacatggcaaaaccccgtctctacaacaaatacaaaaattagccaggcatgatgacgtgcacctgtagcctcagctactcgggaggcggaggtgggaggatggcttcagcctgggaggtcgaggctgcagtgagccatgatcgcaccactgcactccagcctgagcaacagagcgagaccgtgtctcaaaaaaaaaaaaaaaaaaaaccacaaaagttcaccccagaactactgctccatccaagctcttggctcccaagctctcctcactggcagcagaaagacttggagaacaatctacacggcttgagctatttggcaccagagatggataagggctgaatgaatcaccgtgttcaagtgcatgcagtatgactagagaagacagtagccccttgttcctaggctaggaagagccagaataaaaagcagtaagatgctcttgtgggagaacctggttctcccaagacaggagagggctatgcaatctcccctgctagagatcttgcaaacaagggaagccacagccaccttgaacagtttcccgggagttagtcagatttcctaccgccaagcagacatctcgccggttactaactggcatgaacaccctctactccccactcttgctccagccctggctctagtctgggaaccccagcagctcctaggcttactagaaagcggcacacactgccccctgcagcaaggatttaaaacaggcagacgccagccacagggacgccctgggtcgactccgcacagcaggcacatacctccagttccttctggtcaaaaggcttcagcagatgttgagggatgagctcattgaaccccttctgcagagctaagaactgggcttcgattcctctcataaacctccagtttacatacaacctggaagaaaaactcgcaagttggatgcaacaccaagtggattttccgccatgggcaggttttttttggagacagggtctcactctgtcacccaggctggagtgcaatggctcaatctcggctcactgcaacctcagcctcctgggttcaagcaattcttctgcctcaccctccccagtagctaggattacaggcacccaccaccacacctggctaatttttgtatttttagtggagatggggtttcaccatgttggccatggctggtctcgagctcctgacctcaggtgatccgcccgcctcggtctcccaaagtgttgggattacaggcatgagccactgcgcccgacctgtgagcaggttctgatatcacagtctgacaaacatgggaacacactgagccccccactccccggatctctccaagacagacaaacacaccaccagctagtagtaccaaaccttggcatcacgttaaaaatgactcagcacgtgccctgattcattccgatttgctcgcgaaaacaggaggattgaacctgatctgtcacatcaattgctgcaatgtgaaagcatgttctggccaggcatggcggctcacgcctgcaatgccagccccttgggaggcggaagcaagaggattgcttgaggccaggggttcgagaccagcctggcaacatagcaagaccatgtaaaaatttaaaaattgtttaaatgtgtaaaagtacatttgaaagtacagcacaggacagcgtggcacacagacgtgcccacatagttctcagctgcaagtgcctaggccgcaagtgcctaggcctgaacacagatctgcctcaagttaggggtggaaaaaaactgagagggtggcttcctcggactgagcacgagagaccctccaagctgctgctctctcctttgccccccacctttgcacccagaattaggtggtcactgaaaagtccttccccacatgggctctgtccctcaggccaggcctggccccatcagggcccctccaagcagatccctgacgctgctgctgagctgtcggtttctgaaagtcgcctctgttcatgtgatctgatcataagcaccagccatcagggacatgcaggcctcacacagcgaaggagctacagcaactaaatgcaggctcagccgcgccccaggcacctggccgtccccgacaggtggcattaccggacgtattctttcttattctcctctgtgactggcacatttctgccattgggtttcagttcatgctgcaggatccgcccgaaggcgttgtgttccacgcagaaggtgtggtccagtacaggcgtgatgtcgttctctctgttgaaataagacagaaggatgtaggttagaactctgccaccacgcggggccattgggtagacagaaaacatttacgactgccaaacccggggctgcaagacaggacagcctcgggcagacacagaacctgcgtgggggtggcacagcaacaggtgctggaggaccctgagaccacagctctgtttccagatgtcccggctcctggcttccacagtcatagaaggcgggcagcaggttgctgtaccatcctgtgatttcaggggacccacaacccagctgctttgtaagcagtgtgggagtcaaaaggcaggaacgtgaagaggtaccagggtcaaagggaaattgacctggagatgaagccatgccaagaaaatactgtgcctggccaggtacagcggcttacacctgtaatcccagcactttgggataccgaggcgggtggattacgaggtcaggagattgagaccagcctggccaacatggtgaaaccccatctctactaaaaacacaaaaaattagccaggtgtggtggcaggcgcctgtagtcccagctactcaggaagctgaggcaggagaattgcttgaacctgggaggtggaggttgcgttgagccgataattgagccactgcactcgagcctgggtgacagagcaagactctgtctcaaaaaaaaaaaaaaaaaaaaaaaaaaatactgttcctcccttagaggcagccttcccaaaggcatcagttcaaacacaaaagtactcgaaagtgaaaactagctcttgaatctgccatcgttcttgagcctaggcagagtggaagattttctttttctttctttttttttgagacagagactcactctgtcatccaggctggagtgcagtggtgtggtctcagctcactgcaacctctgcctcctgggttgaagcaattttcctgcctcagcctcctgagtagctgggattacaggcatgtgccacacctggctttttaaaatttttttaattttagtagggacgggatttcaccatgttggccaggttggtctcaaactccaacctttgacctcaagtgaaaagagcaagtgatccacccacctcggccccacaaagtgctgggataataggcatgagccaccgcacccagctgagtggaagattttctacctgatccccagagtcccctgttcaagttggaacatgtgacacatgggacacaaccaggagccccgactccgactcacccacattccctccatctgtcagagcctgatgttttgtccccgtgaaatctgcaaggacccgtgatagtcacggttcatcttgtcactgcctgctgctcttaacagagtgtttagaataattctaaagcagaggtaactaaatgttaattttgttttgatacttgcttggcccctgtgtaggttaactggagatgccctgagtgtctcacacacaccccacaacgggcctggggagtggcctgttaacgtctgtgatcgcgccttcttcattcaaggaaacaaaagaaactagtccatgaagagaaacctgcccaacatcatgaggaaaataagtcaactgagtactttttgctagatctggtgggtttttttgtatttttttgcagtaacggggtctcactgtgttgcccaggctggtgtcgaactcctggactgaattgatctgcccgcctccgccttccaaaaaatcccctttttttgtttcaggttataatacaatggcttcacacacatccccaaaatacacacacacgcgcgcgcgcgcgcacgcgcatacatacgatagacgtggtggtgggccctaagccaggtgaccggccgtcagtcaatacttacaggatccacaccaagctcttatgcagctctgggtccacagattccagatctgagagctggatgggcttccccagcagctgcttgtagaagggcactgtgaagcccccgttgatgtagtgtccatggaacacagccagccccatgatccgccccacaaagtggaaataagacaagtggtcctgtagggggcaccagagaacacgaatttgtcagcatggtgccggccaatgtgggaatctcgtgctgtccccaagcttcttgggaaaagtgtcccagaggcaaccagacctactgactcagggactcacaggccccgctcctgaacaagtgaaagaaggctgcttgtgtagcagaaatttgcctagattcgctggacagcgttttgtatgctctcagggccaacacctcctcagaagggccatataactggcagaggagccccgtgttcagcaatgactgagaatttcaccttcgtgacaacagagaatcgaaccaagcccagggccttgacactgcagggcctcggcaccatgctggacgcgcacccaggaagccagccctgtgcttcctcccactgcacaggaaagaaaagggcaagttcccttcctcctccaccaccactccctcgatccagaacgaaaggaagagagggaaagagagggagggagggaagaaatgctaagggggagaaaaagaccacaggaaaatatgtatgagtaagccaaatcaaataacaatcctaggccgggcatggttgctcacgcctgtaatctcaacactttgggaggctgaggcaggcagatcacctgaggtcaggagttcgagaccagcctggccaacatggcaaaaccccatctctactaaaaatacaaaaactagctgggcctggtggcaggggtctgtgatcccagctactcgggaggctgaggcaggagaatcgcttgaacctgggaggcagaggttgcagtgagcagagatcatgccactgcactccagcctgggggacacagcgagactctctctcaaaaaaaagaaaagaaccattctagaaccagagccgttctggtcttaactcaggaaccacacgtctctactttcaggtttgaattatgttcacctcaaaaaatgaatcaaaactctgcttccatgttggtaaaaggttcttccacatttgaatgcacaagcggagcctgtcccgacttcgcctcagtggcctgtgcaggacgctggtgaaggccgtggtgccacaggaggagtcccctgctggccggctgcccacccttgagctgggcgtgcaaacactgcactgacttcttcatctctaaaaccagcacgctaagggtggcagcatttgtggcttaaaaagctagttctggaaagattccagttttgaccgggaggaggctggacttcggaacctactccttagaatgacaccattaacacatacgatcatcacaccagagttccctcaaatgatcacaaagtgtgagtgtatgaacagctcagtttcacccttcatctccttcaacacagcacacccagtgatcacgatctctgaaaatacaggattggaatcatccatcttaattcagttttcactttacctctccatgttttgcttaccactgtctttgattaagtctacaacaaatagaccaaggactgagaatgaaactgaaaatccatctcaaaacttctccaactcaattccctacctctttgttcattcatacttacggggttgattgaagaatccggatttatttgcaacatgtaaatattgtccgtagaatactggaagagcccgtaataaggattcagcatttcatggcacagcaagtaaagccactccctgggagcaaacaacaaaaatgcatttgagacgcgctaaaatttctacattttttttttttccctgagatggagtctcactctgtcgcccaggctggagtgcagtggcatgatcttggctcactgcaacctctgccttcctggtccaagtgattttcctgcctcccgagtagctggcactacaggcatgcgccaccaggcccggctattttctggattttttagtagagacagggtttcaccatgttggccagggtggcctcgaactcctgacctcaaatgatccacccatctcggcctcccaaagtgccaggattacaggcgtgagccaccacgctcagcctaagttgttattttctgaatttctttaatgtttgcatcattttattattttaaaaaccccaaagttaaaaacagtcaagccaaaaaaaaggcactttaaatagaaattgtatggttcagtggctacactcaggttgcattaagcccagcccttagacaaacacctgtggcagatctacgaagagtcttctattcattctgctcaaaactccttttcaacggatcgcattaagatagcagctccaaattttattctggaatttcttactttttcaaacagaaatgagagcgaatagggaaggacagacacaaatgcagataatctgtccaagaaaatcgtgagaatacacaaaaaatatcaaacaaaaacagttcttcattgtactcaaaagaacagaaaggaactgccagaagagatgagactccgaatcctataaagtctctttttactacaaaggcaacattgctgaatttgaattcatcccaagttttggagtttcaatttaggaagaaccttttttgaaaaagacaaagacctccagttgtctagacaggaagtgattaaaatacaagcaaacattccgaccgagccatggacagcgtaaagatacaatcagttctgttctggaagtggtaagggaagcaataactaaacaggccaaaaagagaggctacagaaaggacttcaggactaaatactggggagataagtgtagcctaactcccacagatcggataatgaacacacacctgcacatgtgtaatacacatgcaactgaaatctctccaccgttctctaagtatcatcccattaggaggaagactccagtggtgaaataacactacaagaccaaactggaggtggcagagcagagattcccaactctttccactacagcatcatgtcagtcaagggaaattcacaacgacccatctccacgcagaagactggatgactacggaaaacgcagaaggaatgtaactcctaccagaccaaaccagggagtccgacagctgagtaacaggcatttcagaatgaccaaagaaagaaaatgtgcgaagaaattaacaaaaagtaaaattcattcatttggcacatatttacagagacaagtgttccgctgtgtgttaggtgctgttctaggaaccggggatcagctgtgaacaagacaagttcctgactgcatgtagtttgactctcttggaagatgcagatgagaaagagaaacatcacaccacacaaccatgcggtggtcacagcatgacaagggaggacgccaagaaaggggaagctatgggacgcccaggacaatggacctcacccagggaagcagtgaagtctcaggacaaccacggcacagaggagcaagagaatcgccatcaggctgcacagaggccttgcaggagacacgggggctgtcagaaggtatgatgtgtaaccatcctggaggacttgaagttcaaggggcagtagagacagtgaaagctactggggagggaagccaaggcgggaggatcacctgaggtcagtagttcaacacccacctggccaccatggtgaaaccccatctctactaaaaatataaaaattagctggacatggtgactcgcacctgtaatcccagctactcagggggctgaggcatgagaatcacttgaacctgggaggtggaggtagcagtgagccgagatccagccagtggactccagcctgggccatagagtgagatgctgtctccagaaaaaaaagggaagaagaaattcttggaaaaattagaatttgttccaaaaagttaaattctagaatactatttaaacccttaatggacaatattttcattcataataatgtaaaccgtataaactttcatccctttacaaataattggtagacaagcataggagactgaccaaattttggttacagaagagaatgtaaatcttaaccttgacaacataaaagtaatattacagatgacagaatttaagaggcagaaggaatgctgaagagaaagttgtaagtatgaatatcctgttcttatgcaaatgagaggtccagagatcatgtctctagttgatacatcaaaaaaataaaggtgaaagcacaggacataaagttacaaatgatggaagaactaaaaagatccatattactaaattgaacatgagagtaactagagtcagtctatcttatgtatatgcccataaatcattaaatccggaaataacaagatacctattcaaagaaaagagctaaaagagttaagaagcagttgtcttagccaagcacagcggttcacacctgcaatctcagcactttgggaggccaagatgggagagtggcttgagcccaggagtttgagaccagcctgggcaacatagtaagacctcatctctacaaaaaactttttaaaaattagccaggcctggtggcacacacctgtagttccagctacttgggaggctgaggtaggaggatcgcttgagcccaggaggttgaggctgcagtgagctatgattgtgccactgcactccagcctgggcaacagagcaagaccccgtctcaaaaaagaccaaaaaaaaaaaattgtcttgaagctgaaaagaagcaggacatgaaatagcagtttttcatcattctattctgttttttaatatcattttcttgaattattttgaccaaaattttaacattttacaaaattcctttgacacaaatgcaatttacatgcacaaatgcaatccctgccctgctccctgcagcaaatcctctacagaggagagcaaggctgcctcctgtgttaaatttcaggagcatgctcctcatgtttcaaaagaagggagtgaatttaaaagtttaattctagctttacaagaagtcaattagtggtgacaatcacggatattctggtaggttatggcaagaggctggcacgagcatgctcggaggaattcctattctccgcagggtggctgaagccagtgcatgatggcccgactgctccaaggagacatcagccctgcccaggagtgcttggtgatgagcactggagaagggcaaatgacttctcttgaaaagactgagatccacacagcagagaaggtgaatgaacaagcagctcacctggccacaccaccgtaatccaaaccttcttccccacggaatttcaccatcagccgttttttcaagtctttcggtcgcatcttcattatctggcggtaagactcctgaagagcaacatcacagtttcagagagaagaacattcttattcttaaagttatgaaaggtcattgataatggagcccggttaagaacacgcatccattccaattcaagttttatctggctcctcatcagaatgtttcttcggcatctagtatattccatcatcttttttctcagtttctccctctgagacaacaacaaaacaaacacgatgccaggaaacactaaccttcagggaaacacgtgtctgttttcagtgaatcaccaaggacttaaggacaaaactcactagggttgattcttctctgtataaattaatttcaatgcacactataaacaacttgtgcatcgcaaccaaaatcaagacattagaaagtctgaatgctaagagagttctgagcctctctttatatctaaagtgaaaaatcacatttgatttcccactgagtcaaaaggcaaaaagattttaagtaagacataaggtggcttaagcacagcacagaacacatgtgatcagcctgctattccctcacactcagcacttgaagcagaagccgctacgtgtttatagatgtagattcagtaacgaggcacttaagaaatttttcgtgctttaaatttaacgcaattcaaactccagcaacccagccgggcgcggtggctccgcctgtaatcccagtactttgggaggccaaagtgagcggatcacttgaggtcagaagttcaagaccagcctggccaacatggtgaaacccccccatctctactaaaaatacaaaaaattagctgggcctggtggcgggcgcctgtaatcccagctacacgggaggctgagacaggagaatcgcttgaacctgggagtcagaggttgcagtgagccgagatcatgccgctgcactccagcctgggcaacagtgcaagactccgtctcaaaaaaaaaaaaaaaaaaaaaaacccaaacaaataaactctggcaacccaagagggaaagaggaaacgagctggtagtgaagtcagtacttcagcgcttttctagccctgcaacaagggcatacatgcagcaggcagggctgggcgctgtggccaagctgcccatccaacactcaggcccagccctcgcggtggggaaggcgctcagctccctcggccccccagtgctcccttagtgctgtcacccagggagaatctgtgctcagtctcctttgatcatttctgacagtgtctccacaaaggagggcaggaaatggcccaaatgccatggagattttcctgtatggtcagctttcttgggaaaagggcctggtctgtttagggacctgctcctgcaggaagctgtgtaagggacagagcctgtcccaagagccacctgctcctcgccaatttccacaggagaagcaggatggcccccagcccctgagctgccctgagaaggagagccctcagatgacatctcatacaagaagagaggagggagactacctggctctggggaaagcgcagattgcagattgcaggaatatttaacccacatcatgtagacaaggcggttcccactattttttagtgctagtttctgtatacacctctaggttttcacctagaggtgaaactatttagtttttccatttttaccataagaggaaatgaataccattccctccctctagacaggctgtggtcctgacaaactctgcacttcccttagtaataaaatcaatacctcaaataccaaacagaaagaagggttccctgaaacgcagacatcacccacaaagcagttcatttaaagcagcccttgaaaacaatcgcatttgagattcctttgtctgaattgccttatttgtttctgaacagggtctgggcagtggccctgaactctctacctcaaagatttcttctctggacacttcgatgcggcaatgaccagcttggggctgctgaagcgacagttcgtgtctgaggactttcagcttctggactagatctctttcgtatctctgggcaggaagctcctcgtcctccagagagccctcactgggcagtggcagcggctggctgggctccttgagttggcactggtgacttgagaagaagagatgcagaaagtcactccgaagccccggccaggggagctgcaagcacccacgtacgcgacagggtcagaggagagagctagctgcacacaacttcagggagaatttgtttccctgatgacgtaaccaggtacctagctagctgtgtcaaacttgctgatggccacattagcctaaatgtatgtctacagtaccataaaggaggtaccccaggccgggcgtggtggctcaagcctgtaatcccagcactttgggaggctgaggtgggtggatcacctgaggtcaggagttcgagaccagcctggacaacatggtgaaacccggtctctactaaaaatacaaaaaattagccaggtgtggtggtgggcacttataatcccagctactcaggaggctgagacagggaaatcgcttgaacccgggaggcagaggttgcagtgagctgagattgcgccactgccctccagcctgggtgacagagccagactctctctctcaaaaaaaaggaggtaccacaattccaagcaaacacttatctcacacattaccaccacaaataaaaatggaaatggctgtcatttattatgcatctattacgcacccatgagatgaaccaaagcatcatcagatgcaccttggcagttagaatgaaatggagatgatgggaaaaaattttaaaggaggtaacagtggagaactcaaatgaaatctcatgataggcacaacagcagaccgctcgagtgaaatctaatgaaaaccatccctcatttttaccgccaagagatttctacacctgctcattgagagcaaaatttcagtaaaaggagtaggattagtacggtgacaaagtggcatttgtcctgttcaagttttgccactgagacacagagctgtcggttaaaagagctatgtcgggggcaggcgcagtggctcatgcctataatcccagcacttcgggaggccaaggcaggcggatcacccgcagtcaggaatttgggaccagcctggccaacatggcaaaatcccatctctactaaaaatacaataattagctgggcatggtggcgggcgcctgtaatcccagctactcaggaggctgaggcaggagaatcacttgaacccaggaggtggagggtgcagtgagcagagattgtgccactgcactccagcctgggtgacagagctggactctgtctcaaaaaaaaaaaaaaaaagagctatgtggaatgtttggctctgagaacacgacaggcctggaacactaaatatgggatccaagataattcccagttccaaggtatccagttccccaccgtgcaggcactagggggatagcacgtatctctacttctcaacctaagggccacgtgtctcatgagagcgctgcgtgcggaaacttccttcgtgcagccgcctaatactgccatctcggtaaattttatgtaggctgcaagtaagaaaagggtagcaacaacatagggcttcagtgctcttcacagctaatttaagagtttaaaatatgcaattatccgccagatatttaacatcattttgaccatgcttattatccaaccagcaagacagtcaataaattcacaaaaataccagtccaagaaagcattcgattaccaatgaaagaggtcagcaaaaaatatttttaaagtcttacttcatgatgtggtgtaaccttgggtctgtaaactgggttgttcggttattatgatctacaaaatatatcctcccagaaactgtacttctgacttcccagcctggcggcagtggtccaagttcatcacagttcacactgttaaggtctctaccaaaatggaagatacagagaggtttgtccaactgagtatggaggaatgagaccaaaagtcagcaacagaagccacagaggttccttatcaaggtgtctgtgtcccagctctgctaagatggaccttcgtggtgctacttacgccaaacctctactcagtccaggcctctctgctgcaaacagcagcaacatccgagagatttaaaaccaaactttcaggctgggcgcggtagctcacgcctgtaatcccagcactctgggaggcaagtgaatcacctgaggtcaggaattcgagaccagcctggccaacatgatgaaaccctgtctctactaataatacaaaaattagttgggtgtggtggtgggtgcctgtaatctcagctacttgggaggctgagacaggagaattgcttgaacctgggaggcggaggttgcagtgagccgagatcacgccattgcactccagcctgggcaacaagagtgaaattccatctccaaaaaaaaaaataggcagtttcagagcttataaccatgataaggaacaggggctccccacggcatatcatttcttatatgaaagaaggccctaatagtaggaagtatcttagtgctgtcagaaaactatctgaattcacaagtgtcattaaatgttcccggccagaagggtttcttcattggaaagttcccagacagcaccaagcttttcagggctaagggaggtacaggaacatgcgttcagaaactcgcaattctaaacagttgcagcaggacgaggcattctcattttcaaatgggctttttgctcaacaagtattttccactctaagaatgattaattattctcctgattaataatttcaacacaatctacagtcagaagggagcacagctttactgaccaagatgtgtttctaattaacacaaaagcctgtcatttctaacagggggtacaaaagagacacctcattcatttgcaggtaatatatttccagtctcattataggtactgagtcatacattaaacatagtcttggaaaatcagacaggaagtttattctcagatgaaacaaatcatgaataaaaaggaactaaatattaccaaaaatcatattaggtagtaatgctattctaaaaggaaataaaaagcaaaagaaaaaaagaaacttaactctgttatggggtggggggggggtctctctaacctgggctcagatgtatggccttgtagaaggaattcgtatagaaaagctgcatctcccccaggaatggtccccgagggactgaggcaatggggacagtaaagtagaagagagaaagggtaacagagtctttatatttccttgacttatgatggaaaattttaagcatataaaaaagttagtgatcataaggaattgctgtgtaaccaacttcaacaatgatcatggtcaaccttgtttcaaaggtcaacaatgactcacgtttcaaatgtacccctgtctactccccccaccccagcttatctgaaggaaatcccagacatcaatatcatctcattcatcactatttttagtttaaaacaagagcaacacatctggaaggtattggcttttcaagtcaactgctggaaagacagctggggggtgtccatttcaggaggcttaccttggtatcctggggtcgtgccacgtgctaactccagtctgtgtatgcaaaaagtaaacttggccctggactgttgttctttgttctacacaagaaattagagatccaaatgagacaagttcaattccagggagagtttgtaaccaaccctcgatgccctcacgtctggtattatctaaatctagataacactcccctcttatcccagttcttctctctgaggtggccgaataatcccctcttctccatctcgccccatgctctcctttccagagcactacagacaccctcatctagcctacatgttaccttggtttgctttggtgttcgtttgcctaagattttcacttgatttctaaactgggagatttggagcaattgctgaaaattcatgattagctagatttaggaccattgtcttccagttgtctttacactgccacaattatcaaatggcatagccacgcaaacatccgcacttatggcacaggctactcaaaaagggttaaaggccagatgcagtggctcacacctgtaatcccagcacttgggcggctgaggcaggtggatcacttgagcccaggagtttgagaccagcctgggcaacatggcgagacccattctctacaaaaaatacaaaaattagccaggcatgatggtgtatgcctataagcccagctactcgcgaggatcgcttgagctagggaggtcaaggctgccgtgagccatgatcatgccactgcactccagcatgggtgacagcaagaccttgtctcaaaaaaaaaaaaaaagtcaactcatggaaacagggcagatggcattggccacagcaggatacattctctcaccgtagccttcgggcagttccggggactggtggccgtgtggtcggttctggggcgtctgtagtgaacctcgcacatcagggtttcgaagccgctgtgcctgaagtctttgatcttgacttggggactccacgaacctgcaattccctcctccagcagcagcaccggtgctatctgtgtaaggggctggttcctccatgaagcagctgagcggcctcccaggcccggagtcttcatacaccgttctgaaagggacgagagcaggcaggcatggtgtcaccatggaggagtcacaagaccagcgccttagggctagtgtcctaggggacaccgtcacataaattgatttgctttcctttaacaacgtccagtgttccaagggcctagttttgtaaaattcaccatgtgccactcaaacagaaagacagactcttctaagaggaacaggtggccggagtgtccccaaggccaactgtacaatttcaccatagggtagactgaaatgattagaagaaaccagccttagactatgaggagtttgtgaaatgagatctcatttttcttgatttaaaatcaaatccaggccagatgcggtggctcacgcctgtaatcccaactttgggacgccgaagtgggcagatcacttgaggtcaggagttcaagaccagcctggccaacatgatgaaaccgcatctctactaaaaatacaaaaattagctgggtgtggtggcacacgcctgtggtcccagctactcgggaggctgagaattgcttgaacccaggaggcagaggttgcagtgagccaagattgtgccattgtactccagcctgggtgacagagcgagactccatctttaaaataaaataaaatcatatccaaatactccattttccttgttattttactctataatgaaactcctggttacataaaatgccaaaatgcctttagatactttttaaacatcaatcttcaccccctgagcaattttgaagacaattcaccttaataggctactgtcccttagaagcaaatactcttttaaaatcttagattgaaaaatttcaaatatgtataaaaaatgagagaccagtacaatgaaccccctgtgtccacccctcccagctaaccatcatccaatgtccactcttccaatccctccccaccaaccccaacattttatgacttcatccttaaatatttccattatcatgactaaaaaatgttcattaattttttaaaaaaatcaaataccggtgttcagatttctccaattgtctcataaatcaggatccaaagtccacaccttgcatgtgtagctatgtctcaagtttgtttgaatatgaattgttgacaggttctccttccctcctgtctttgcttttcttgcagtctatttgttgaagaccctgggttgtctgtcctacagaaggccccattctggatgtttgttgattatattcccttggggccgtgagacacattcctggttccctgtatttccaagaggtgtgttaatgttggatcatctctcttttgtgatgttgttagcaattactgcttgttggccaggtccattaattcatgggggactgcaaaattgtgacagtgaccaatgacggttcggcagtttgttgtatttttttagtgtgttgagttcctccccccgtcattatgaacccaaagatttttaatatatctgatatgttccaaattcatggcagttataattcttttcttttctttgagccagggtcttgctgtgtcgcccaaggtggagcgcagtggtgtgatcagggttcactgcaacttcaaactcctggactcaaagcaatcctcccacctcagcttccctagcagctgggattataggtgcgtgccaccatgcccagctaatttgttattttttattttttggtagagacaaagtctcgctatgttgccctggctggtctcaaactcgagaccaaagtctctggccaccttggcctcccaaagtgctgggattacaggcagttataattcttattgatgctcaaactcacccatctttggcccgtgggagcctctttcactggattttgagtcaggcacaaccccagttgtttgtttgtttgtttttgagacagagtcttgctctgtcacccaggctggagtgcagtggcatgatcttggctcactgcaaccccctcctcccgggttcaagcaattctcctgcctcagtctccccagtagctgggactacaggcgcccaccaccacgcctggctaattttttgcatatttagtagagatggggtttcaccgtattagccaggatggtctcaatctcctgacctcgtgatccacctgcctcggcctcccaaactgctgggattataagcgtgagccaccacgcccagccaactccagttgtatttacagcttcctttatagccaagtaaactggttcacagttttatcccaacatcctttatgcatctcaagcattctgcagagtgacttaaggagggaagggcgctttcctataggccgagaggttaaggcagcagagaactcagcccgcctcttgctgtggttatacgtacccttcattttctaacagtcctctgcagtccaccaccgagccgccggttcctattctgtctcgtgtctgtaaactgactaaaagagaaaagaacgacttgtgttaaaacccagcggggtttacataattataatacagtgagtcattgctaatttagaatttatgtacaatatcataaaaaacgaggcatatgtgtatgcatacacacatatattcctatgctttccaatacgaagcattttactccagtagctgcatgctacttggaatattccttgtaaatgtggtgaagaaaagggtgctatgtttctcctggtctccataaaaataacaatgtaatattcagtccctctaagttattttcaagaagatttattttttaagaagactttttttgggccaggcacggtggctcatgcctgtaatcccagcactttgggaggccaagaagggaggatcgcctgagctcaggagtttgagaccagcctgggcaacatggcaaaaccccatctctactaaaaatacaaaaatgagccaggcatggtggcacacacttgtagtcccagctacttgggaggctgaggcaggagaattgcttgaacccaggaggcggaggttacagtgagctaagatcgcgccactgaactgcagcaggggtgacagagtgagactctgtctccaaaaaaaattaaaaattaaaaaaaataataaaaataagaagtttttttgggggggattaagtctcactgtgttgcccaggctggcctcaaactcctgggcttgagcaatcctcccacctcagcctcagagtagctagactacaggcatgtgccactgagcccagtttttatttcttaagaacattctgacttaagtttaataaagacacagagaggccgggcacagtggctcacacctgtaataccagcactctgggaggctaaggcgggcggatcacctgaggctgggagttccagaccagtctggccaacatggcaaaaccccgtctccactacaaatacaaaaaattacccaggcgtggtggcaagcagctgtaactccagctactcaggaggctgaggcaggagaatcgcttaaacgcgggaggcggaggttgcagtgagctaagatcatgccactgcactccagcctgggcgacagagcaagactccgtgtcaaaaaaaaaatgaataaagacacagagagtactttcagtatctgcaaagtctaagtgaatctaaatatttattctctatctttactatgaacaagacttttataaagttgttttcagttactcatttttctccctggcacatcccgccacaaagaaaaaagaaattacacgcaggaaagcattcggtgagaactttttcatgatggtagatttcagggtgtatgtctgcactattcatttatcttgggtcaggtctacacaggacaatacctaaaagatttggagtgagaatcactccagtgtgctgcagagagacctttttttttttattccatgcagcagtgcttccaagtcaatatctgagttaccctaaaacactaatacaagtgggtggataataggatgagttatttaacagctaaatcacttccaacagactgcctctagccaacactttgtaacattagcacactttaatttttcattctaaataatgcagtcccctgactgtacaaatcatattacatggaattcttcacaactctatgctttttacatatatgatggggcttccagaagaaactatttcccaactcctgtatgtgtggccaccattcttattatctacccttggataatacggtcaaaaatgtattgtccataaatgtgatgattaaaattacatttaaaattctaaccctaaatctttctgtacccgagtcatttttactcaactttaaaagccaagagaagggggccgggcatggtggctcacgcctgtaagcccagcactttgggaggccaaggcgggcagatcactcgaggtcaggaaatcgagaccagcctggccaacatggtgaaactccgcctctactaaaaatacaaaaattagccaggcgtggtggcacacacctgtggtcccaagtactcgggaggctgaggcaggagaatcgctggaacctgggaggcggaggttgaggtgagctgagatctcaccactgcactccatctcaaaaaaaaaaaaaccaaaaaaaaaaaaaagccaggagaagggaattagataaaataataaaaactacacaagacaaaacttcctagtactgaagagaaggccccgtacgtggtctgtcctctgaggcccgtcagcatcgtcagtgcctgtatgtgagttctcggcgatgaagggttgaatgtaagttctggaaaagcatctctttacacagacaagaaagttcttacccactatctggccacgaactgcatcagtatctgaggggtttagtttgcatagatccaaacgctggtctgtaaacaaacaattcaaaacttaacccaaggaacgtgaactagggaggaaggcaggaattcagtattcagcgatcaaaacaaaaaacgatgcctcctaagctttctttggttgcattaagaggcaggaaagtgtttggttcttacatccggtatcttttaatctgctgatggcattggagagcagccgcacacagcccaggaagccagctccctgtttcttgtgaattttcttatggttccacacgctaatggttatcgaatccgttttcccaacatatctggaaagaaagtgcaaaactcatttttaattgtgtttggttttttttgttttgtttttttttttttttgagatagaatcctgctctgttgcccccaggctggagtgcagttgtgtgatctcagctcactgcaactcccaagttcaagtgattctcctgcctcagcctcccgagtagctgggactacaggcgtgcatcaccatgcctggctaatttttgtatttttagtagagatggggtttcgccatgtggccaggttggtcttgaactcctaacctcaggtgatccacctgccttggcctcccaaagtgctgggattacaggcatgagctactatgcccagcttttaattgtatttctgaattatgatatctcattgagattttctctttaagaaaccttataaaataatgttgcctctgtattacacatgtaacaggcatttaataaatacgtatccattaatttcaacaagctgggaagaagaactaccttgctccttatggaaggggcaaatgtagataaccacacgatgataataatcttataacagacttactatattttatttatttttatttatttttttatttttttgagacggaattttgctcttgtcgcccaggccggagtgcaatggcgcagtgttagctcactgcaacctgtctcctgggttcaaggaattctcctgcctcagcctccccagcagctgagattacaggcacctgccaccacacctggctaatttttgtatttttagtagagacggggtttcaccatgttggccaggctggtctcaacctcctgacctcaggtgatcttcctgcctcggcctcccaaagtgcttagattacaggtgtgagccactgcacccagcaaatttactatattttaatagtcgcataggacagtaacatgattcataaattctcaccaattaggtttgatacagaatactggtttgcgacaagggactacttacaaacctacggatctattcaaagtacacaagaggacactaagacattaaacctccatttactgtcactgcaagtcaacggagagaggaactcaacccacttacacagcctcagtgtcactgaaactgaatcttagaatataattcttaaaaatcccacccaaatacagtataatttgtattaactaaaagacaataatctttcaggattactttgatgaaaatatcttagtaggaacatgaaaacatgggtgcatataaaatagtggtcttcacagccaggtgcagtggctcacgcctataatcccagcacttcaggaggccaaggtggatcacctgaggtcagaaggtcaagaccagcctggccaacatggtgaaacccatctctactaaaaatataaaaattagccaggcatggtggcgggtacctgtaatcccagctactcgggaggctgaagatcgagaatcgcttgaacccagcaggaggaggttgcggtgagccaagattgcgccactgcgctccagcctgggcaacagagcgagactctgtttgaaaaaaaaatttaatttaatttaaaaataaaataggccgggcgcggtggctcacgcctgtaatcccagcactttgggaggccgaggcgggcggatcacgaggtcaggagatcgagaccatcccggctaaaacggtgaaaccccgtctctactaaaactacaaaaaatagccgggcgtagtggcgggcgcctgtagtcctagctacttgggaggctgaggcaggagaatggcgtgaacccgggaggcggagcttgcagtgagccgagatcccgccactgcactccagcctgggcgacagagcaagactccatctcaaaaaaaaataaaataaaataaaataaaataaaataaaataaaataaaataaaataaaataaaataaaatagtggtcttcaaagtacaatccagtttttgaatgactataagaaattgatggctttgatcatataaaactatattttctcttgcagaaaatatatatgtactaaaaagcaaaaattttcaaagtcaacagaaacatacagtcataataatgaattttttaggcctggtacagtggctcacgcctgtaatcccagaactttgggaggctgaggcgggtggatcatgaggtcaggagttcgagaccagcctggccaagatggtgaaaccccgtctcaactaaaaatacaaaaattagttgggcatgctggcggatgcctgtaattccagctacttgggaggctgaggcaggagaatcacttgaatccaggaggtggaggtcacagtgagccgagatcgcgccactgcacactctagcctgggcgacaaagcaagactccatctcaaaaaaaaaaaaaatgcattttttaggtagaaactacaactaggtttagggttttgctgaaaaacagtagcatgtggagttcacaaactatggcctttttttctgctaaaatggccaggagattgaaaagtttgaggatcacatgtacaaaaccaaaccataaaaatctatgaacatgccaaatgcagtcgggcgcagtggctcacgcctgtaatcccaacactttgggaggctaaggtgggcagatcacttgaggtcaggagttcaagaccagcctggccaacatggtgaaaccccatctctactaaaaaatacaaaaattagctgggcatggtggcatatgtccataatcccagctacttgggaggctgaggtaggagaatcacttgtacccgggaggcggaggttgcagtgagctgagatcacgccaccgcactccagcctgggtgacagagtgagactccgtctcaaaaaaaaaaaaaaaaaagaaaaaagaaagtaacaaaatgcaagaacttccaagtacatgaattctaaaattaggcaatgtagacattcatttggccatccgcttttgttatcaataaaaagtcatccttttttttttttctcttggatgtttctcgtaaaaggtagacacctgctttcctgccgctccgcatggggcttacagaacattcaactcacagatcatagtgctggttccactttgggtccaatgtgtttttcacagtgtcggttgagtggcactgcccagacccatccacgacaatctttgcaaaagggtcagggagccctagaggagagaggagacccacacctagatgagacctcacatccatccatgtgacacagaacacacaattcgtgttctctaatttcaggataatttcaatcagcaaaataagttatgtctattgagctttctaagagagcctagtatgcctccatactcagatttttagagggtagaaaagaaagtgactgaaaaaaaaaaaggcttacattcaaatttctattaaagtggggctaattaagtggagggaaaagtgtctgaaagtaattgtatttagactttctaaaaattaataatgccccgaaatttgtttactgatctttgcctatcttatctatggaagcaagtattcaccaggccttaattcggtaagtccctaaatgctagagaatgaatcagagaggtttattagatcagacaggtggcaaagtggacagttgtcagagatagagatggacacgagccaccatgctggagcttcctggctacctggagaaagcctttgagcctaagtttcttcatcttgaaagcatgaataataccacttaagaactgaaagatgtcttgtgaggatcagaaagtgtgtgaagaatttaatgctgcaggcactgaccagatactgcatgactttcttaaggagtgattccttcctttagaaaaggagtctcttatttttgcaattcctttaattatagggtgttgtaaatgtgatttaatttataaaatctgattaacaattgtatgcaaatccagctgttttatacaaaagtatttcatttgtattagagctgagaatacatcatccagcagaaagcaatattctaataggtagagaggcagaaaaaattgggtgtgaccagaataggaaacgaaagacaggttttgcggtatgatttataagttctgtatatttcagctaaggaactacccatgttgtagtcaaccgggaaataaagcttggagaaccatggatttctattaagtaaagggcaaaactttgaagagaatatacccaatctttttttaaagtttaaaatttcagaaatacatgcataacattataagagggaaaaaaataagtgtttacttactgaagaagtctttctttgcaaggttcttggcacataacactaaaaacaaagaaaaattactcaggttagcattaaagacgagatttccataatagctaatctatatttacacccgaacaaaaagactctaaaaattagctttgccgaagatttgactttcaaatctagtatcatatgaaacaaaaaatggacaaccatctaaaaagtgttttctcctcaaactgaagatcagctataacaaatacaaaatgctttaaactaaaaatcttaaacacattcagatgggttgatcaatatactttttttttttttaagagataaggtcttgctctcttgcccaggctggagtgcaggggcatgatcatagctcattgcagcctcgaactcctgggatcaagcaatcctcttgcctcagccctcccagtagctaggattataggcacacgccaccatgcctggctaaatgttcttatttttgtagagatagggccactgcacccagcctaccgatattctcttatactgcatatgatc

SEQ ID NO: 1509 - DNA, 5329 bp, Homo sapiens
  misc_feature (1986)..(1986): n is a, c, g, or t
gtggtgtcggtgtcggcagcatccccggcgccctgctgcggtcgccggagccctcggcctctgttctcctccccctcccgcccttacctccacgcgggaccgcccgcgccagtcaactcctcgcactttgcccctgcttggcagcggataaaagggggctgaggaaataccggacacgtccacccgttgccagctctagcctttaaattcccggctcgggacctccacgcaccgggctagcgccgacaaccagctagcgtgcaaggcgccgcggctcagcgcgtaccggcgggcttcgaaaccgcagtcctccggcgaccccgaactccgctccggagcctcagccccctggaaagtgatcccggcatcggagagccaagatgccggcccacttgctgcaggacgatatctctagctcctataccaccaccaccaccattacagcgcctccctccagggtcctgcagaatggaggagataagttggagacgatgcccctctacttggaagacgacattcgccctgatataaaagatgatatatatgaccccacctacaaggataaggaaggcccaagccccaaggttgaatatgtctggagaaacatcatccttatgtctctgctacacttgggagccctgtatgggatcactttgattcctacctgcaagttctacacctggctttggggggtattctactattttgtcagtgccctgggcataacagcaggagctcatcgtctgtggagccaccgctcttacaaagctcggctgcccctacggctctttctgatcattgccaacacaatggcattccagaatgatgtctatgaatgggctcgtgaccaccgtgcccaccacaagttttcagaaacacatgctgatcctcataattcccgacgtggctttttcttctctcacgtgggttggctgcttgtgcgcaaacacccagctgtcaaagagaaggggagtacgctagacttgtctgacctagaagctgagaaactggtgatgttccagaggaggtactacaaacctggcttgctgctgatgtgcttcatcctgcccacgcttgtgccctggtatttctggggtgaaacttttcaaaacagtgtgttcgttgccactttcttgcgatatgctgtggtgcttaatgccacctggctggtgaacagtgctgcccacctcttcggatatcgtccttatgacaagaacattagcccccgggagaatatcctggtttcacttggagctgtgggtgagggcttccacaactaccaccactcctttccctatgactactctgccagtgagtaccgctggcacatcaacttcaccacattcttcattgattgcatggccgccctcggtctggcctatgaccggaagaaagtctccaaggccgccatcttggccaggattaaaagaaccggagatggaaactacaagagtggctgagtttggggtccctcaggttcctttttcaaaaaccagccaggcagaggttttaatgtctgtttattaactactgaataatgctaccaggatgctaaagatgatgatgttaacccattccagtacagtattcttttaaaattcaaaagtattgaaagccaacaactctgcctttatgatgctaagctgatattatttcttctcttatcctctctctcttctaggcccattgtcctccttttcactttaatcgccctcctttcccttattgcctcccaggcaagcagctggtcagtctttgctcagtgtccagcttccaaagcctagacaacctttctgtagcctaaaacgaatggtctttgctccagataactctctttccttgagctgttgtgagctttgaagtaggtggcttgagctagagataaaacagaatcttctgggtagtcccctgttgattatcttcagcccaggcttttgctagatggaatggaaaagcaacttcatttgacacaaagcttctaaagcnaggtaaattgtcgggggagagagttagcatgtatgaatgtaaggatgagggaagcgaaggaacctctcgccatgatcagacatacagctgcctacctaatgaggacttcaagccccaccacatagcatgcttcctttctctcctggctcggggtaaaaagtggctgcggtgtttggcaatgctaattcaatgccgcaacatatagttgaggccgaggataaagaaaagacattttaagtttgtagtaaaagtggtctctgctggggaagggttttcttttctttttttctttaataacaaggagatttcttagttcatatatcaagaagtcttgaagttgggtgtttccagaattggtaaaaacagcagctcatagaattttgagtattccatgagctgctcattacagttctttcctctttctgctctgccatcttcaggatattggttcttcccctcatagtaataagatggctgtggcatttccaaacatccaaaaaaagggaaggatttaaggaggtgaagtcgggtcaaaaataaaatatatatacatatatacattgcttagaacgttaaactattagagtatttcccttccaaagagggatgtttggaaaaaactctgaaggagaggaggaattagttgggatgccaatttcctctccactgctggacatgagatggagaggctgagggacaggatctataggcagcttctaagagcgaacttcacataggaagggatctgagaacacgttcaggggttgagaaggttactgagtgagttattgggagtcttaataaactagatattaggtccattcattaattagttccagtttctccttgaaatgagtaaaaactagaaggcttctctccacagtgttgtgccccttcactcatttttttttgaggagaagggggtctctgttaacatctagcctaaagtatacaaactgcctggggggcagggttaggaatctcttcactaccctgattcttgattcctggctctaccctgtctgtcccttttctttgaccagatctttctcttccctgaacgttttcttctttccctggacaggcagcctcctttgtgtgtattcagaggcagtgatgacttgctgtccaggcagctccctcctgcacacagaatgctcagggtcactgaaccactgcttctcttttgaaagtagagctagctgccactttcacgtggcctccgcagtgtctccacctacacccctgtgctcccctgccacactgatggctcaagacaaggctggcaaaccctcccagaaacatctctggcccagaaagcctctctctccctccctctctcatgagaagccaagcgctcatgttgagccagtgggccagccacagagcaaaagagggtttattttcagtcccctctctctgggtcagaaccagagggcatgctgaatgccccctgcttacttggtgagggtgccccgcctgagtcagtgctctcagctggcagtgcaatgcttgtagaagtaggaggaaacagttctcactgggaagaagcaagggcaagaacccaagtgcctcacctcgaaaggaggccctgttccctggagtcagggtgaactgcaaagctttggctgagacctgggatttgagataccacaaaccctgctgaacacagtgtctgttcagcaaactaaccagcattccctacagcctagggcagacaatagtatagaagtctggaaaaaaacaaaaacagaatttgagaaccttggaccactcctgtccctgtagctcagtcatcaaagcagaagtctggctttgctctattaagattggaaatgtacactaccaaacactcagtccactgttgagccccagtgctggaagggaggaaggcctttcttctgtgttaattgcgtagaggctacaggggttagcctggactaaaggcatccttgtctttgagctattcacctcagtagaaaaggatctaagggaagatcactgtagtttagttctgttgacctgtgcacctaccccttggaaatgtctgctggtatttctaattccacaggtcatcagatgcctgcttgataatatataaacaataaaaacaactttcacttcttcctattgtaatcgtgtgccatggatctgatctgtaccatgaccctacataaggctggatggcacctcaggctgagggccccaatgtatgtgtggctgtgggtgtgggtgggagtgtgtctgctgagtaaggaacacgattttcaagattctaaagctcaattcaagtgacacattaatgataaactcagatctgatcaagagtccggatttctaacagtccttgctttggggggtgtgctggcaacttagctcaggtgccttacatcttttctaatcacagtgttgcatatgagcctgccctcactccctctgcagaatccctttgcacctgagaccctactgaagtggctggtagaaaaaggggcctgagtggaggattatcagtatcacgatttgcaggattcccttctgggcttcattctggaaacttttgttagggctgcttttcttaagtgcccacatttgatggagggtggaaataatttgaatgtatttgatttataagtttttttttttttttgggttaaaagatggttgtagcatttaaaatggaaaattttctccttggtttgctagtatcttgggtgtattctctgtaagtgtagctcaaataggtcatcatgaaaggttaaaaaagcgaggtggccatgttatgctggtggttgccagggcctccaaccactgtgccactgacttgctgtgtgaccctgggcaagtcacttaactataaggtgcctcagttttccttctgttaaaatggggataataatactgacctacctcaaagggcagttttgaggcatgactaatgctttttagaaagcattttgggatccttcagcacaggaattctcaagacctgagtattttttataataggaatgtccaccatgaacttgatacgtccgtgtgtcccagatgctgtcattagtctatatggttctccaagaaactgaatgaatccattggagaagcggtggataactagccagacaaaatttgagaatacataaacaacgcattgccacggaaacatacagaggatgccttttctgtgattgggtgggattttttccctttttatgtgggatatagtagttacttgtgacaagaataattttggaataatttctattaatatcaactctgaagctaattgtactaatctgagattgtgtttgttcataataaaagtgaagtgaatctgattgcactg

SEQ ID NO: 1510 - protein, 359 aa, Homo sapiens
MPAHLLQDDISSSYTTTTTITAPPSRVLQNGGDKLETMPLYLEDDIRPDIKDDIYDPTYKDKEGPSPKVEYVWRNIILMSLLHLGALYGITLIPTCKFYTWLWGVFYYFVSALGITAGAHRLWSHRSYKARLPLRLFLIIANTMAFQNDVYEWARDHRAHHKFSETHADPHNSRRGFFFSHVGWLLVRKHPAVKEKGSTLDLSDLEAEKLVMFQRRYYKPGLLLMCFILPTLVPWYFWGETFQNSVFVATFLRYAVVLNATWLVNSAAHLFGYRPYDKNISPRENILVSLGAVGEGFHNYHHSFPYDYSASEYRWHINFTTFFIDCMAALGLAYDRKKVSKAAILARIKRTGDGNYKSG

SEQ ID NO: 1511 - DNA, 3463 bp, Homo sapiens
atggctgagccgactagtgatttcgagactcctatcgggtggcatgcgtctcccgagctgactcccacgttagggcccctgagcgacactgccccgccgcgggacaggtggatgttctgggcaatgctgccgccaccgccaccaccacttacgtcctcgcttcccgcagccgggtcaaagccttcctctgagtcgcagccccccatggaggcccagtctctccccggggctccgccccccttcgacgcccagattcttcccggggcgcaaccccccttcgacgcccagtctccccttgattctcagcctcaacccagcggccagccttggaatttccatgcttccacatcgtggtattggagacagtcttctgataggtttcctcggcatcagaagtccttcaaccctgcagttaaaaattcttattatccacgaaagtatgatgcaaaattcacagacttcagcttacctcccagtagaaaacagaaaaaaaagaaaagaaaggaaccagtttttcactttttttgtgatacctgtgatcgtggttttaaaaatcaagaaaagtatgacaaacacatgtctgaacatacaaaatgccctgaattagattgctcttttactgcacacgagaagattgtccagttccattggagaaatatgcatgctcctggcatgaagaagatcaagttagacactccagaggaaattgcacggtggagggaagaaagaaggaaaaactatccaactctggccaatattgaaaggaagaagaagttaaaacttgaaaaggagaagagaggagcagtattgacaacaacacaatatggcaagatgaaggggatgtccagacattcacaaatggcaaagatcagaagtcctggcaagaatcacaaatggaaaaacgacaattctagacagagagcagtcactggatcaggcagtcacttgtgtgatttgaagctagaaggtccaccggaggcaaatgcagatcctcttggtgttttgataaacagtgattctgagtctgataaggaggagaaaccacaacattctgtgatacccaaggaagtgacaccagccctatgctcactaatgagtagctatggcagtctttcagggtcagagagtgagccagaagaaactcccatcaagactgaagcagacgttttggcagaaaaccaggttcttgatagcagtgctcctaagagtccaagtcaagatgttaaagcaactgttagaaatttttcagaagccaagagtgagaaccgaaagaaaagctttgaaaaaacaaaccctaagaggaaaaaagattatcacaactatcaaacgttattcgaaccaagaacacaccatccatatctcttggaaatgcttctagctccggacattcgacatgaaagaaatgtgattttgcagtgtgttcggtacatcattaaaaaagacttttttggactggatactaattctgcgaaaagtaaagatgtataggcatctggtgtttcagcatacataactgaagcatgtgaaacagtatcatcctcgttagtagaggaaaaccaaaacccttttttccgtcaaaattggatttgtaattaaattgtaagcctcgtaggatgtatgttggaattttaagtctttcctttggttctatgcaaataaaaaaataactgattttttaagactgtgtctgtattgttgggattgaatctagtatttgctgggagaattttttctttgtatttattttaatgtattgttctcatgtaagaatgactgatgttgtgttagttaagaattgaagataggtttagcagtaaagaagaaagcttttaaaaggattgattcagctaagcaaagttgggcagagaaatacagccattttgtttttaatgcagaaaaggaagatgttctgtagcaagggggaatattttaaaaataaaccagatcaaattaatacaatcagaaggtttcgaaatgtaaatattccttatttaagacatgtttaaattcacctactagcacgacttacatagctcaaatattgaatgtttaaaatattaatacagatggggcctctttatgtttagataaaattgaagtacttaattgaagctttttaaaaattgtaaagtaaatgaaagctattgagatctttttgtctcctataataccagggaatttgagcttgtgttctagtcattgtactagctgtagctattggtctgtccttttgacatacagctaaaagggactaaatttgtaaaaaattagtttgttatagttgaagattaacttttcctaacattgtgattattgaagttcatgaatcttgctgtcaaggaagaaaggtaagaaagctgatagctcctccatgttggtaaaatcctctccagaatcttggaacacctggcatgtgaccctagtgacgtcacagacctgagatgaagattcatgtttagccagtgttttccagccttgtacccaccatacagatctgtttattctgtttcaccctactcctccagtgagccccatattttgggaaattatctgccttatacattaactaattcaattcatgtaacactgttgagtgcttactctttgtacctctattgtgcctatattaaaggtatacaaataaataaggccatgtctgacttcaaggaactcagtttaattttgatatattcaaagatgtgattcccaaccaactcaggatgaagtaactagtgttacaactgagttgatattctaaaatataacccagtttgtacttttattactagttagcatacacattttatggcttatgggttaataaatgaattcatggactcctggactactttcattgatgaccatatctccagggatgttgttgatccccacactgccttaaggtatattatagaaacagttttattttccatttttcttgtttcctgataataaatgtatttaggactgaaaatactcctgagtactcccctggctgtatgtctgacagtctttagctatggtgactattgtttatttttaatgggtatttcagattccaagtgtatttaaaatttctaaggagatataatatagcctgtatggtttctactttatggaattatatggtcaatatttgtaaatattctatgagttttgggtgggtagaggggtgctttgcctgttttgggtacaggtttttttggatttagcttgttaattgttcaaactttctgccttctacattcctatcttattgttcgtttaatcagtttctgaaatgtaagcattacatgactattggtgagttgtgccttttataactgaaatactttactttttctcatatcctctataattgacttctattttccttaatcaaaccagctctgggaaatttaatacatttatattaattgagattattaaaacatttggactattaaaaaaaaaaaaaaaaaaa

SEQ ID NO: 1512 - protein, 495 aa, Homo sapiens
MAEPTSDFETPIGWHASPELTPTLGPLSDTAPPRDRWMFWAMLPPPPPPLTSSLPAAGSKPSSESQPPMEAQSLPGAPPPFDAQILPGAQPPFDAQSPLDSQPQPSGQPWNFHASTSWYWRQSSDRFPRHQKSFNPAVKNSYYPRKYDAKFTDFSLPPSRKQKKKKRKEPVFHFFCDTCDRGFKNQEKYDKHMSEHTKCPELDCSFTAHEKIVQFHWRNMHAPGMKKIKLDTPEEIARWREERRKNYPTLANIERKKKLKLEKEKRGAVLTTTQYGKMKGMSRHSQMAKIRSPGKNHKWKNDNSRQRAVTGSGSHLCDLKLEGPPEANADPLGVLINSDSESDKEEKPQHSVIPKEVTPALCSLMSSYGSLSGSESEPEETPIKTEADVLAENQVLDSSAPKSPSQDVKATVRNFSEAKSENRKKSFEKTNPKRKKDYHNYQTLFEPRTHHPYLLEMLLAPDIRHERNVILQCVRYIIKKDFFGLDTNSAKSKDV

SEQ ID NO: 1513 - DNA, 2964 bp, Homo sapiens
agtcggcggcggctgctgctgcctgtggcccgggcggctgggagaagcggagtgttggtgagtgacgcggcggaggtgtagtttgacgcggtgtgttacgtgggggagagaataaaactccagcgagatccgggccgtgaacgaaagcagtgacggaggagcttgtaccaccggtaactaaatgaccatggaatctggagccgagaaccagcagagtggagatgcagctgtaacagaagctgaaaaccaacaaatgacagttcaagcccagccacagattgccacattagcccaggtatctatgccagcagctcatgcaacatcatctgctcccaccgtaactctagtacagctgcccaatgggcagacagttcaagtccatggagtcattcaggcggcccagccatcagttattcagtctccacaagtccaaacagttcagatttcaactattgcagaaagtgaagattcacaggagtcagtggatagtgtaactgattcccaaaagcgaagggaaattctttcaaggaggccttcctacaggaaaattttgaatgacttatcttctgatgcaccaggagtgccaaggattgaagaagagaagtctgaagaggagacttcagcacctgccatcaccactgtaacggtgccaactccaatttaccaaactagcagtggacagtatattgccattacccagggaggagcaatacagctggctaacaatggtaccgatggggtacagggcctgcaaacattaaccatgaccaatgcagcagccactcagccgggtactaccattctacagtatgcacagaccactgatggacagcagatcttagtgcccagcaaccaagttgttgttcaagctgcctctggagacgtacaaacataccagattcgcacagcacccactagcactattgcccctggagttgttatggcatcctccccagcacttcctacacagcctgctgaagaagcagcacgaaagagagaggtccgtctaatgaagaacagggaagcagctcgagagtgtcgtagaaagaagaaagaatatgtgaaatgtttagaaaacagagtggcagtgcttgaaaatcaaaacaagacattgattgaggagctaaaagcacttaaggacctttactgccacaaatcagattaatttgggatttaaattttcacctgttaaggtggaaaatggactggcttggccacaacctgaaagacaaaataaacattttattttctaaacatttctttttttctatgcgcaaaactgcctgaaagcaactacagaatttcattcatttgtgcttttgcattaaactgtgaatgttccaacacctgcctccacttctcccctcaagaaattttcaacgccaggaatcatgaagagacttctgcttttcaacccccaccctcctcaagaagtaataatttgtttacttgtaaattgatgggagaaatgaggaaaagaaaatctttttaaaaatgatttcaaggtttgtgctgagctccttgattgccttagggacagaattaccccagcctcttgagctgaagtaatgtgtgggccgcatgcataaagtaagtaaggtgcaatgaagaagtgttgattgccaaattgacatgttgtcacattctcattgtgaattatgtaaagttgttaagagacataccctctaaaaaagaactttagcatggtattgaaggaattagaaatgaatttggagtgctttttatgtatgttgtcttcttcaatactgaaaatttgtccttggttcttaaaagcattctgtactaatacagctcttccatagggcagttgttgcttcttaattcagttctgtatgtgttcaacatttttgaatacattaaaagaagtaaccaactgaacgacaaagcatggtatttgaattttaaattaaagcaaagtaaataaaagtacaaagcatattttagttagtactaaattcttagtaaaatgctgatcagtaaaccaatcccttgagttatataacaagatttttaaataaatgttattgtcctcaccttcaaaaatatttatattgtcactcatttacgtaaaaagatatttctaatttactgttgcccattgcacttacataccaccaccaagaaagccttcaagatgtcaaataaagcaaagtgatatatatttgtttatgaaatgttacatgtagaaaaatactgattttaaatattttccatattaacaatttaacagagaatctctagtgaattttttaaatgaaagaagttgtaaggatataaaaagtacagtgttagatgtgcacaaggaaagttattttcagacatatttgaatgactgctgtactgcaatatttggattgtcattcttacaaaacatttttttgttctcttgtaaaaagagtagttattagttctgctttagctttccaatatgctgtatagcctttgtcattttataattttaattcctgattaaaacagtctgtatttgtgtatatcatacattgttttcaataccacttttaattgttactcattttattcactaagctcgataaatctaacagttactcttaaaaaaaaaaaaaagactaaggtggattttaaaaattggaaactgacataatgttaggttataatttctcatttggagccgggcgcagtggctcacgcctgtaatcccagcactttgggaggccaaggtgggtggatcacctgtggtcaagagttcaagaccagcctggccatcatggtgaaaccccatctctactaaaaatacaaaaattagccaggcgtggtggctggcgcctgtaatcccagctactcaggaggttgaggcagcagaattgcttgaacccaggaggcagagggttgcagtgagccgagatagcaccattgcactccagcctgggcgactccatctcaaaaaataaaaaaaaaaaaaaa

SEQ ID NO: 1514 - protein, 327 aa, Homo sapiens
MTMESGAENQQSGDAAVTEAENQQMTVQAQPQIATLAQVSMPAAHATSSAPTVTLVQLPNGQTVQVHGVIQAAQPSVIQSPQVQTVQISTIAESEDSQESVDSVTDSQKRREILSRRPSYRKILNDLSSDAPGVPRIEEEKSEEETSAPAITTVTVPTPIYQTSSGQYIAITQGGAIQLANNGTDGVQGLQTLTMTNAAATQPGTTILQYAQTTDGQQILVPSNQVVVQAASGDVQTYQIRTAPTSTIAPGVVMASSPALPTQPAEEAARKREVRLMKNREAARECRRKKKEYVKCLENRVAVLENQNKTLIEELKALKDLYCHKSD

SEQ ID NO: 1515 - DNA, 3006 bp, Homo sapiens
agtcggcggcggctgctgctgcctgtggcccgggcggctgggagaagcggagtgttggtgagtgacgcggcggaggtgtagtttgacgcggtgtgttacgtgggggagagaataaaactccagcgagatccgggccgtgaacgaaagcagtgacggaggagcttgtaccaccggtaactaaatgaccatggaatctggagccgagaaccagcagagtggagatgcagctgtaacagaagctgaaaaccaacaaatgacagttcaagcccagccacagattgccacattagcccaggtatctatgccagcagctcatgcaacatcatctgctcccaccgtaactctagtacagctgcccaatgggcagacagttcaagtccatggagtcattcaggcggcccagccatcagttattcagtctccacaagtccaaacagttcagtcttcctgtaaggacttaaaaagacttttctccggaacacagatttcaactattgcagaaagtgaagattcacaggagtcagtggatagtgtaactgattcccaaaagcgaagggaaattctttcaaggaggccttcctacaggaaaattttgaatgacttatcttctgatgcaccaggagtgccaaggattgaagaagagaagtctgaagaggagacttcagcacctgccatcaccactgtaacggtgccaactccaatttaccaaactagcagtggacagtatattgccattacccagggaggagcaatacagctggctaacaatggtaccgatggggtacagggcctgcaaacattaaccatgaccaatgcagcagccactcagccgggtactaccattctacagtatgcacagaccactgatggacagcagatcttagtgcccagcaaccaagttgttgttcaagctgcctctggagacgtacaaacataccagattcgcacagcacccactagcactattgcccctggagttgttatggcatcctccccagcacttcctacacagcctgctgaagaagcagcacgaaagagagaggtccgtctaatgaagaacagggaagcagctcgagagtgtcgtagaaagaagaaagaatatgtgaaatgtttagaaaacagagtggcagtgcttgaaaatcaaaacaagacattgattgaggagctaaaagcacttaaggacctttactgccacaaatcagattaatttgggatttaaattttcacctgttaaggtggaaaatggactggcttggccacaacctgaaagacaaaataaacattttattttctaaacatttctttttttctatgcgcaaaactgcctgaaagcaactacagaatttcattcatttgtgcttttgcattaaactgtgaatgttccaacacctgcctccacttctcccctcaagaaattttcaacgccaggaatcatgaagagacttctgcttttcaacccccaccctcctcaagaagtaataatttgtttacttgtaaattgatgggagaaatgaggaaaagaaaatctttttaaaaatgatttcaaggtttgtgctgagctccttgattgccttagggacagaattaccccagcctcttgagctgaagtaatgtgtgggccgcatgcataaagtaagtaaggtgcaatgaagaagtgttgattgccaaattgacatgttgtcacattctcattgtgaattatgtaaagttgttaagagacataccctctaaaaaagaactttagcatggtattgaaggaattagaaatgaatttggagtgctttttatgtatgttgtcttcttcaatactgaaaatttgtccttggttcttaaaagcattctgtactaatacagctcttccatagggcagttgttgcttcttaattcagttctgtatgtgttcaacatttttgaatacattaaaagaagtaaccaactgaacgacaaagcatggtatttgaattttaaattaaagcaaagtaaataaaagtacaaagcatattttagttagtactaaattcttagtaaaatgctgatcagtaaaccaatcccttgagttatataacaagatttttaaataaatgttattgtcctcaccttcaaaaatatttatattgtcactcatttacgtaaaaagatatttctaatttactgttgcccattgcacttacataccaccaccaagaaagccttcaagatgtcaaataaagcaaagtgatatatatttgtttatgaaatgttacatgtagaaaaatactgattttaaatattttccatattaacaatttaacagagaatctctagtgaattttttaaatgaaagaagttgtaaggatataaaaagtacagtgttagatgtgcacaaggaaagttattttcagacatatttgaatgactgctgtactgcaatatttggattgtcattcttacaaaacatttttttgttctcttgtaaaaagagtagttattagttctgctttagctttccaatatgctgtatagcctttgtcattttataattttaattcctgattaaaacagtctgtatttgtgtatatcatacattgttttcaataccacttttaattgttactcattttattcactaagctcgataaatctaacagttactcttaaaaaaaaaaaaaagactaaggtggattttaaaaattggaaactgacataatgttaggttataatttctcatttggagccgggcgcagtggctcacgcctgtaatcccagcactttgggaggccaaggtgggtggatcacctgtggtcaagagttcaagaccagcctggccatcatggtgaaaccccatctctactaaaaatacaaaaattagccaggcgtggtggctggcgcctgtaatcccagctactcaggaggttgaggcagcagaattgcttgaacccaggaggcagagggttgcagtgagccgagatagcaccattgcactccagcctgggcgactccatctcaaaaaataaaaaaaaaaaaaaa

SEQ ID NO: 1516 - protein, 341 aa, Homo sapiens
MTMESGAENQQSGDAAVTEAENQQMTVQAQPQIATLAQVSMPAAHATSSAPTVTLVQLPNGQTVQVHGVIQAAQPSVIQSPQVQTVQSSCKDLKRLFSGTQISTIAESEDSQESVDSVTDSQKRREILSRRPSYRKILNDLSSDAPGVPRIEEEKSEEETSAPAITTVTVPTPIYQTSSGQYIAITQGGAIQLANNGTDGVQGLQTLTMTNAAATQPGTTILQYAQTTDGQQILVPSNQVVVQAASGDVQTYQIRTAPTSTIAPGVVMASSPALPTQPAEEAARKREVRLMKNREAARECRRKKKEYVKCLENRVAVLENQNKTLIEELKALKDLYCHKSD

SEQ ID NO: 1517 - DNA, 4249 bp, Homo sapiens
gggaaagcgaggagccgcggcggcgtggagccggcgggcccgggcgggggctccccggagccctaccaccccaccctgggcatctacgcccgctgcatccggaacccaggggtgcagcacttccagcgggacacgctgtgcgggccctacgccgagagcttcggcgagatcgccagcggcttctggcaggccacagctattttcctggctgtgggaatctttattctctgcatggtggccttggtgtccgtcttcaccatgtgtgtacagagcatcatgaagaaaagcatcttcaatgtctgtgggctgttgcaaggaattgcaggtctattccttatcctcggtttgatactctaccctgctggctggggttgccagaaggccatagactactgtggacattatgcatctgcctacaaacctggagactgctccttgggctgggccttttataccgccattgggggcacagtcctcactttcatctgtgctgtcttctctgcacaagcagaaattgcaacctctagtgacaaagtacaggaagaaattgaagaggggaaaaacctgatctgcctcctttagtttggaagagacaatgccattttctcccttgagtaatcttgtgaaacagtccacagtttcatcatttgagtcaagtggagaactaacctttacctaccaaagccacgttccacggcccgaggcttaaacaggaccaatgagaggccacatccagctacgcaaagttactggacatgcggtctgcagtgcacattataaggaatggaacatgaaaatagtatataatcctagacctggagttgccaagttctgtcagactccatctcccccaggttcaatgatggatgataatctaaatcattagggcagcagtttctctggtaacggaagagaccgtccgccagatctgcaggctgtttctgctccaacactgcttgcttgtgagcatctctgcctcagaatggggttttgggttggagttcttgttttcctctgttctttcaagttgtctccaacgaacagaaaactataaacttactggggacaggatgtgtgctaaagggcacagcaagacactgtcttttgcttagctgaccaaaggggtcagcagggatggcgtggagtcatgctgtggaacttattctaggctgaatcctagggtaaggtggatcaactgaactgtcactccagagattttagaaatttgagtaaagaaacaataaggacctatacaatcatatgagaacaaaaatatgaaatcttgctagtgaagacgtattttttcttcttcccagcagccaggctagcaccagttctggcccagtctcctcttcttctggagatcacatgtttttcttctaaggttaggattgtgctttgactgcgaaaggaaacctcactgtttcctccttccagggactgaggtctccaagctagctgtggcttatgcagatgttcactgggaggacctgccagaatctcggcacttggggggagacctttactcccagtttggtgaccatgctgtagtcagctctatttccaatcccgacagtagcagaatggcattctacaacaaaaagaagctagttatgggagttaagtttttgtagttactggtgttgatcctgaaagcagactgagataacattaaattgctgcaactgaagaactgcagccaagaccttaattccaggaaagcacagaggacaaagttaattcaaaaagaggcgctagatcaaggtcacagcactgcctacacctgtttacaaaaagaatcaaataccactatgaataaggattcaggggtttttaatctactttccataaattaccaatatcactgattcaggaagatagtatctcagaatgaccagagcagcacagaaacaagctactctgacattatgggagcttcaaaattgtatcatgatacagaaacactccttagcactttaagaaagtgagatggaactgccagatttctggaaggagaaaaagtgtaggtatttgggttcattaatctgctcacttgaggactttgttttgaaaaagtaccttctgtggacaaggtattgtgctaccagctatacaaccctgacttcagagtttgcaaccttgccctgagtgaatcatgttaaagctgtctgagtctaaagcaccgtatcttggtgcagaacagataattatacagagatggaatgggacaaccgcagttttactacattctggtgtttggcctatatgagaaaccatcttctcacagattaagggctaagggcaaaaggggtgggaggtgtggaactagccttaatgagtttcccattcctgaaccaaaattcaaagtgagtgagatgtaaatcctgtgattttggtgaagaaaaaaacgggtatcttcatagcagcctaggaaaccttaaccatatctctaacaccacacagaaagaggctggaggagccactggacaaagcttctgtctctgtgtgtacatttataatgttctaaccaagtctcaaaccttgatgaaaaacacaaaatttttccataaacttatcagaagactcacttttctttctttcttggatagagaaaccattttctgacactaggtttacaatctcagtgtccttacaagttaagtcctaagctcacaggatcctccgagcatgtccatcacctgctctttggctaaggtggcagtgtacctctagatcaacctgggaacagtcacaagggagtgtgacttcttggccataataaactcactcgatagtgtttatgttattaatctgaatgcaacagaagacaaaagcacaggcatgcacacacacagaaccccaaaccactaaaaactacctaaacactgacttagtaaatagtaaaaaggtaatgttgggacttttaaaccttgaatccattagccaggcttgggatgaaaggaccatctaaaatcatgctagtctaaaccatgctcttccacacagctgtttaaaaaccactgggtatgaggaatatgctagaaagaaatgttaaaaatagattgttggctcacacttatttttctaataaataggaccattattactaccaggaaagtcttatttattttgcctgaaattggcttaaagaaagtctcatgacgggatgggatgggctgcgcttctcaatgaactctgaggcagaaatatttgccttggattctgtggattctttaaacctgtgtgctaataattcaaacaatgttgcattaattgtataagggtttttgtatagttttcaaacatctgtggtgtaatgatctttgttaaacatatattctgtaaagtgccatagtctttttttatgtgtagcatatttaaaaatatatatgtatattatacatacacaagtttgtgtgaaagatgtgcaataacaaaggtgtatgtatgttttgttgttttgttttggaaactggacaggagtcaaaacagggatgtttgtttctgttttggcaaaggagagttccacatttttgccttcatggcttattcagtaacccataattttaatgctacacaaatcttatgtgaagaaaagactggtatgaaatcattttttcctgggtctaaaataatcgctagtgttatgtcaaagttaagcccgcacgccaggcccagttaatgctagtctttcatgtgaaatgtgaagctgccatgttgccttttctcttagtaggataactagtagctggtacataatcactgaggagctatttcttaacatgcttttatagaccatgctaatgctagaccagtatttaagggctaatctcacacctccttagctgtaagagtctggcttagaacagacctctctgtgcaataacttgtggccactggaaatccctgggccggcatttgtattggggttgcaatgactcccaagggccaaaagagttaaaggcacgactgggatttcttctgagactgtggtgaaactccttccaaggctgagggggtcagtaggtgctctggagggactcggcaccacttgatattcaacagccacttgagccaaatataaaattgtatttacagctgatggactcaatttgagccttcaaacttgtagttatcctattatattgtaaactaatacattgtctagcattgatttggttcctgtgcatatgtattttcactatgtgctcccctccccagatcttaattaaaccagattttgcaattc

SEQ ID NO: 1518 - protein, 193 aa, Homo sapiens
GKARSRGGVEPAGPGGGSPEPYHPTLGIYARCIRNPGVQHFQRDTLCGPYAESFGEIASGFWQATAIFLAVGIFILCMVALVSVFTMCVQSIMKKSIFNVCGLLQGIAGLFLILGLILYPAGWGCQKAIDYCGHYASAYKPGDCSLGWAFYTAIGGTVLTFICAVFSAQAEIATSSDKVQEEIEEGKNLICLL

SEQ ID NO: 1519 - DNA, 154394 bp, Homo sapiens
gatcaaagggtcctccctggccacttccacctacaggaggtcaaaaatggagagagggaaaacaggttgatatcctgaaccttatggggctgggcttcatccattcctttcatgaatatgcacagacacatgtgcaaacacacacatacactgagctgtaccatgagcaaggcactgtgccgagtgtcaacaattttaaaagatttcacccagctcctgcctttgaggagtgcatggtccagaggaggaagcacgtgatagcagtgtagtgtgaatggtgctggaataggctgatggaacctcatgaatgcacggagaacagaggcctggtgccacccagtgtggacgagaggatggcatagcaggactaagaggtagccaggagccagctcatgaaaggccttatatgctgagccaatgctattgagattggactttgtcttaagagcaatggggagcaactgagcagttttgagcaggacagtggaattatagaatttattctttgaaaatattcctctggcttccgtgtggaggaaggattagaggtgggtggccagtgagggctttgcagttatccagcttagcaggatggagcactgccaacccaaccagagcaaatggggaggccaccagcctcaccctgaccctggacatgcccaccatgatgggaagacacagactgttccacaacaaccccttggaccccagcccagccctggaagaaccatgtaccttgactggcagggaagcctccactccgggcctgggcacacatgggagggtagggccccatgcttggtatgggctcaggctagcgctgctgccctggagtcagagctgtgtagagaggggcaagccccactcccagagagaaggagccacatgccgtgatggcaggtggtcggtgcagaccctcagctgttgggggagtggtcgggatgcctgaaatgtctgggaccgaggttctgggtgcagcctggagagttggggctgtgcgttcttgttgccattgttacattggctcatattgctgagtccttattcattaggctgttgggtacttttagacacacacacacaccagtctggagcacagagaaaactgtcataggcactcaaaattagagcaagttagataaaggggccagtaagtacagacctcacatgcccccagtggtggattcaggggtcactgattctatccattcctacagatgaacaggataaatatacctccgaccccgtccagtttttctatcccatttaatcactcctcagctgagaaagccagaaactcattcctgacgtggctgacaaatgctggggaaatctttggttttcttagagtgagcctctctttgtaaccagagagcaagagaaggaacagggccttaaaatcacttcaagtggcctgtgcctgatcctgaggtccagagaaggagaatgacttattcaagatcacagtttaatcatacatgcctttatccattcactcagcaaacacagttcaaacacctaccacttgccaaaccttctagatagttattaccaacataaccaagcaaagtatatggaatgccagatggcaatgggtacaggagagaaaaataaattggacaaggggatagacagtgctttggaggtagaggcagctttaagtagggtcacactagagtgaagatcgcaaggaggtgaagcttattctgggggaagaatattctaggaaaaggggacagtgagtgcagagtccctaagacaaggcatgctggggcgccggaagaaaagcagaggatggtgtagctggagaggaggtagccaggaggtgagttgtaggagattaagtcagagatgtgcgaggtatgagggagaagttcttttgtagagacttcaccttgactctagtcggatgggagcccatgtgggctctgagcagaaaaggaacagctctgacttaggatttagttggctgctgtgctgtggatagacagacagttggcaagcctgaagtcaaagagtccatgtaggagatccaggcaagaaataatggttgcttgaaccaaggaggcagtagtggaggtgggaagaggaaatcacacagagtctggccagattatggaggtaaaggcaacagtattgactaaaggaccaaatgcaagatgtgagaagaacagagtcagaatgaccccaaggtttttgtcccatgctgctagaaggaagacgtttcccattagccatgttggaggataccacaggagaatgggtctctgtttgagcatcttattcaagatgccattcaacatctagtgaaggtggacaggagacagtggacacaagtcaggacctcagggaccaggtcacaggcagagctagaccttgaacttcaagattcacagatcacactgcttctgactgaggagtgacagaagtgccagagcaatctcaccagctctggaatgttcatcacttgacggctgggctggcaatgaagaagctccatgcagtctttgggacaacactgcaccaagagaccacagcaacaggggagctcgcagagtagaacactggcattcaacccaaagcctcactgtttccagatacaagtgaaggtaaattccctgcccctccccctgccccaccacattcatccatccttgaagaactcctgggagctcactgggaaactcactgagcagtgagtaatatggttttgcttaagccttgctcaagtagcagaataagcaagtttgactaaaattctctagattcacaaatcccaaagccctaaactacagaaaacagactagtcaagagagaggaagctgtctgctggctatttgtggagcatcacccaatcaatgaacaagtatgcatagactgctgggtgcagagggaggggtgtttaagggatgtcttaatcgggttttccagaagcagatcctgagacaaggatttggttgcaagtagttatttagaaagtgaacccaggaagcaccagtaggagaatgaggaagcaagacaggtaatgaatgtattagtgaactgatcaccactgtgagcaattaggctcaattctactctaggaggctgtacagaatgtatctcagggttgtcccaccaaggggcaaggaaactgaggtacttatccactaactctcttttgttgttgagtgttcttcccacaaaccttaacttccaggcacttccagtttgtccctttattaagctgaccaatctcctgaggccagagaaagccttccagcagagaccagcaggtgtttccagtaggacactgtctgtgtgtactgaaaccagagtgtcatagggaattagaaggacgcagcaccaaccataatgggtttcacaggaactgcctggtctccacaaatagggactctaattttggtctggattctaagaaccaccttcaccccagtaaataggactgagatgacttttatcattcctgtaagcagagatagaaatgccagagcaaagtctcattggtccacacagaaagaaggaagcctcggtgctctttaattggagaccagagctgtggcaattcccaaccagtgtcagaattttgcaatgtgttggagacaggcagccctccctaggaatctactgagagacccagatctttgggcccttagtgagtgtttgagtaaataggtaagcagtggctgcggctcaggcaggagggtcctggaagttaatgtcccagcacagagcttcagcccagaccacagtgccaacatcctagcccttctggttaataattatccctaattccttagcgtgggaggcctggagatgaaaatcacaactctccatgtcctcatcagtctgttgtatgtgcatgtgtaccagatacctacatgcaacctcatgaaattccagacattctcatcaacaaatccctttgtcatcttcataaaatccaaagttaaagggcccaccctaagaattgtgactcatagattcctggatggatcaactctatgtgactattagagctagttttctcatgcccatattgggcaaaacctggtaaacagcacccctgtctctccctccccaaaattctgtctggatgagcagtcccttatgtaacaagctaaaacctttacaactgaccatatgtcaggaaacagtaaggtgtttacaagatacatgagaggggagtccctgtctttcaagagctcctgagtcctgccaatgaacaccttaagtacctgccctttaggggatacttgctgaaatcattccttgaatagaatgttagaatggcagaatgacagtggctgccaccgataggtcagagcattaaggactgggtcttttgaccgaccctaggatctctcttcagtggaactctgcccccaccaaccctattcagcctcctcctctatgctcaggcagctactgcttctcagccatcagtacaggctacctcattcaagttgaatttgcaatggctgttgtggttttttgtttttctgaccatgtggggaactctcatataggctttggaattatatagtcctggtttgtccaaagcactctccacaaacaggctgtgtgaccttcaaatagctgcttaacccctctaagcctgtcatctgaaagtagaaatgataatgataacattagagtaaaccacatgaaagtgtctttgtaggttaaaaattgttgaatattggcagtctcataggttccacctaaaacctttgtggggttctggggaagattcggtaagagaatatatgtattactgctagggcctcagatctaactagtttaggaccacagaagaaggtcacgttccccttagtgtctgaaccacatctcctgtcaaatatctacaggataggagttcgaagtctattcttacaggattcccagtgatttcaggaatccttgtggcctcttattccctcccttgtgttcccctcataaagatgttgatgtttattgtgcgtttactctctgccaagtattgtgccaggctctttgtacataaacatcgatgtacctctctacccatgtgaggtgggtgcttctactatcatccccctttcacagataatgaaactttagatatgagctaagaggaatgaaaaaattaaaaataaaaaaaaagcagataaggaaactaaagtgcaaagaagcaaaatgttttgccaaggtcacaaggacctcagggtccgtatggttgtaagaagcagactaggccctaaggtttcttccatgtctggcatcctagggggttaggactgccactgagatgctgaacaaatgataaggcaggcacttccccgacaaagaatttgtgttggtggcaggaggagagaagaaagctgcgaccaggagagctgagccaggagcttttgcccacctcatcatctaaatgagcatcagactctcaggtgttgcagataaaatcccctggcatgtgatcataggtgacatctacccagcgctcatgatggtaatgccaggcactactccaagctccttacatgatcaatcatttaaccctcacaaccttggggtctaaacagtactgttagtcccattttacagatgggtaaattgaggtatggagctgttaagtcactggcccaggatcacacaaccaataagtgacccagctggagatggaacacaagcaggctggctcccaagtccatgacgtgaaccataccagatactgcctgtcagaagtgtaaacagccctgtctcataatcacctcctttgatttggaagcctagaccaggggtcagcaaactatggcctgagagattcagagctaaatctagctgaccaactgtttttataaataacattgcattgaaatacacccacattcatttatttattgactgatttgcaaaaaacaagggcagcagtgagtagatgcaagagatcataggcctgcaaagcataaaacatcaactttctgaccctttatagataaaacttgttgacccctgacctacagtatgcacctaaggtgtgtcctatgtgtcctaagatggctccgacacttgctatgtgaccccagacaagttgctttcctgaatctccatttcctcatctgtaaaatgtgcttgtgggaatttggtgaggaagtgtgtgtatgtgtaagtgcctgacccaaggcaggtgtttgataagggtttgcagctatcattgccaatagtatgatgaaaattatgactgattcctatgatatcactgaagacagggcagagacctttatggccactttatgggcaatgaaaccctggtgcagagagaggatatggtgagaggcagagcccaggtcttcccagtccaagtcctgcactctgctgcctcctttcccccgccttccaatccatagctgccctagtcctcatttatgtttgccagcgtgcggagcagcccttctgtgtttgtgagttttcggcatctgtaagtacccacagccgcacagagctcgccagcacagacatttgtcaaagatgacatgccagtcatccatgccaccggagacagtgacagatgcgctctccagccccaccatccaggcagtggaggatagatggggccttggcaccggcgcccgctcttggcctggcatgtgcagggagctgcagaccaggcaagagacaaattgcagcctggtcagtgggcaggaggctcagtgtgcatgcaggcagatgtggctgcagcctgcccctgaaccagacacctgcctgccctccccagtgtcctagacctgcccaaatctggtgtttgcttaagatttgtatgtggtcactgatgaggaggtgagtgctcacgggctttgggttgtttccaataataatagtgacaatggctgatgctaacatatgctgctctgctgttctaagtccttagcatacatcgagctctttaatccttagccatccggtggtggaggtacaggaaactgagcctagagaggttggaggcctcttccaagttcacacattaagtggcagaggcaggaatcaaatccagacactctggctccagagttcaatgcccctcaggactactgtctaatatttgagagcctggagtggaggaaaaatcgtgactaggcaaaggattcaggtaggcagggctcaccactaacctgagtggacaggaacaggttgccctgcctcaatttttccaccagaaaaaatgagcagtggctgctattgcaaggccctgcaaggtcccagaccagctccagggcaggcctctctgttcttctgggacccttgggcactaggtcctctgccgacacacattcactccctccgcctaataatcccaacccagatcccctggagtatcatctcgtagttcattaaaccatcacctctgtgtccctgaggcaagcttgcagtctgttgagattttgtagggatgtttatggctagtggcagcaaagggaacagaccacataaaacaaaaagagacagtatgagctcttaaaaagtttccaaagtctggcataaaagctcccacaggtgtttcattcatacaaatgaccagcttccctccgctctggatgaagggtttggaaagaccaaagtctggttcagtccagccagtctcctattgtgggaccttccttgcgaaagtacccttctttctctgagccttggtttccttgtctgtaaaatgggtataatgatagtacctatctcataaaattattgtgaggattaaaacacaaaaaacacttagaacagggcccgacacaaagcgaatgctcaacaaatgccaactgttctcattctctggtttttagtttcctcagtgggaaaatgaggaggtgagttttgtgccaggtatgggcttctggctcgaacattctgtgacttcatgatgttcctagggtgcttccttgtctcctcccacttgcctgagtctttcttctttgtttctgtgagccccagccaattagtttactcacaagtgtagggtagagagaactacacaaacaggaagtgttaccactcatactcacagtggtgaatcattccaaccttccatcaagtggatccacctccattggtcgacacagctggggaatctgagctactgtggccagaactctgttgaccacatcctgcaatgacagacctcagaatccttcctgaaccttccatgggaaggagtctgtgacagcccacctgtgtagactgggcctcatcagcctgaatttgctgaaataagtaattccagtttccctgaattcatgcagagggcacccacgctgggaaggagtttctctggcttttcaagctccataaacacttgaaaagtcattttatttttcaatctgtgggcaggatgccaccaaacgaggaagcctcattaaacagaccttgaaggctatttctttgttgttttttttgtgggagtgggatgaggtttggtgttggcttttttttcccccactgatgctttttggataaacacataaatcagcatcatctatattcattagatatcgtgccttgttcagtacaaaattacccctgttttgcatgactttccccccttgtgattaatataaatgacttaagttaattatgtttctcttcatggaaaaatgtatttgtcaaagtgctgaaacatcaataaaaaataaacactgtcatttgaagaagggctcatttgcaaatgagtagctggggtgtggggaaaggaatggactcacccgtctggaggtgtcattctgattgagtaggcacacttcatatttactaacaatgacaaaagcatttttcttagttaagcactcacaggtcctgatgaggtagactgatgtcatcattattaacaataatgacacctcaggcgtagagaaaacaattttccttactagagaaaactaacgctgggtattttaccatccagacctccaaaactaggcccagcatggggactttgcaggaatagaccaagaggcaaatacagatgattggagtgggagggaagagaagtgaagaaaagcaaaccatggagctggtgtggcatctcagagcaacatggaagcttagggatgagacagcacaaacacctccctgggccaatgacaagactaagaaccagagaggggacttgccccttgggtaaacagcatattagtggcagagcccagagagaacccaggactcttgactcctagacccccaccctttccctgcactctgctgcctcccttgccaccagggatcaaaggctccccctcacttgagtaagtggtcaatggcaccagcaaggtgcaggggctcagactgctggacagtcagggccccagggaaatctacaggttactgacttttttcatggtatctggaatagcctttccccacactgactgtcttagtttgggtttcctgaaggcagaccctgagacaagatcgtaggtgctggtggtttatgtaagaggtgagcctaagacaccaagtgaggtggagaagtgagacagggaagggagaaaagccaatacagggcacatgtatgagggggttactgctttggacacttggactcactccccccaggagtgactgcagagaatatgcctctgagttgtcccggtgctggacagggaagcagaaatatttatttactgacctctggggactttaatttccaacccctctgggtcaccctgtacctaagctgagcaaactcccatagtaccagaaaaacccagagatccaaaaccctgagcaggtgagtgggaagcgctagtgggcacagtcactgtctatggcagatgcacgtgaacctggaggtggtatggggggatgtgggtggggcaggcatgttatctactacatcacccttatctaagtgctcccagccttccaagaaatcccccctccaagtaaacatgatcatcttgtcttctgatggtcagaaaccattcatctggccaccttattttacttatcttcttaaatattatttctgtcaccctaaatatactgtaaagcattcaagggcaaaattaaggccattatcattctgtcattcaacaaatacttactgagcacttactctgtgctggactatctttaaggtgctaggaatatagcatcaaagataaagaaaatccttgtcttcaaggaacttgcatcttaaaagtagagctagacaataaacacataaataaatgctataatttcaagtggtgataagtggctcaaagaaaaagaaagcagggtaaaggggatagcataatggaagtgcagtactcctggggacatttgagcaaaagcctgaatgaaataccggagtaagccatgtaagaatctggtggaatggaattcaatcaaagagaatgtcaatgcaaagaccctagggaataacaggaaggctggtgtgacactcagcggagtgaaaaagaaggtggtaggaactgaagaaggggacaaccagatcgtctaggaccttacctttaaacagtgcctggcacaaaagaaaggtactccaagctgactggatggatagatgggtggatataacagatggaaggatggaaataatgacagactagtggatgaagaaagaagaaaacaaagcaggttctataggtagagtgtggtgccaatggtgcattcaaagccagactttgcagaaatagcaaatattgaacccaaagtacccaatgagtagttattagaccaaggaagcagttgaaggagaaatgttcctctctgggcttcagccaatgagaatcctagaaacctgagtgtccttatctttctttacattccctgcagaggcccagcttctcccctgtggtgagtatccaataacattaaatggtattacagtggattaattaaactttggtggctggaagctagtgaatcattccctccaccacatattaccatgtttactcatcagggctccatttttaatagcggtcttttaattaaagcatgtcaccacggtccattagggaagaatttggaggatgagatgtgcatgtgggtgcaagcatcatttaattcagcagttctttactgagtgcctactatgtgcctggcaagtcttgaggtactatgagaaaataaggtgcaagtgaagggcttcaaggaacttacgcgatcaaacaaagtgaattcacactcacgatcaactgaggaacattggcatattaatcattgcttgccaactaaccagaattctttattagtaacttctcccacctagtttaatttggaagaaccaggccaatcataagaaaaattctggggcttttcgttttcagcaaaatatccagggtatactgtggcctagaccctgatgcagtcatatatctttgggaaagcctcctaaaacttctgagcctcaatcagtctcttcaagaataaaagcagaggttgttcttatccagaaattctctagattccagctgtaacattttctcatctgcgaccctccaaatctccaggcccagaccatgaggatgggttttccagaatggtggaaatttcatctaaagtcactctaagatttttacccaccagagaaagatccttttcattacattcatgacattttgttttctgaattttcaaagaggaccaagaagacctgtttggaagtaggagtagttacaatgcatgcactatgtgtgcacttagatgaggaggaacaaaccacatactgccagaaaagcaggctctattcatggggtgactgggtaaaaggcattggaactggaccctaaagactaggtaatagtttgagagtaggagaaatggggggaaagagccaattttcagcctgattctagccatgttccaagtatgggtccccactttgcaactgcatgacaagctcccccaggaggagggaccaggtctctttttcttttgtctgagattcttccttccagctcttcactccttaggcgagctcagccagtctcataggttagggcccacctgtgtgatgatgactcccacatttccatctccagctcagcacctctctgcggagctctctattcagtcagctacctgcttggcacagcacttagaggcttcaagacatcacaaacaacgtggacaaaatgaggctcctatttctgtgtccagtctgttgatcctcattcttcaggtctcaatgtaggagtcacttccccagaatgtaaatatatatcttaccccagaatgtgtgtgtgtgtgtgtgtgtgtgtgtgtgtgtatatatatatatatatacacacacatatatgaatatatttgtttatatatatttatatatacatatatatgaatatttatttatttatatatgaatatttatttatttatttatttatgaatatatatttatttatttatatatatattatatatatgaaggaggggtcaggacctctccgatccctcttctataaacaccctaggttttccttcacaaatgttgtcacattgtcaggaaatctttgtgttgtgatatcttttctgtgaggtatttgatgaatggttgcctgtcttactggatttttaagtcccattgggcatagatcagcccccatttactcaccactgtctcctgagtacctgggactgtgcctagaacataataggcccccagtaaatatttgttaagggaaggcatgggttccccaaccccagccagtgtgcaagatccatttccgcataccactggcacacaacattcaggcactgggagccgcacagtgacggaagcttgaacattttcttcgtgtcaagttctcagtaaagctattttctcacattgtctcatgtaattcttaaaccaccctggaaggaataggttttattgctgtttccattatataggtggggaaacatggctcagaggaaagtggcatgtccaagatcacacatcctgcaggggacagacagaccaaacccatgttttcaccagcctctcatctcacaaacaacactaggtttgttaatacctgggaactctgtgtaagcgaggtccctggcttggtgtcagaagacctgggtttgagtcttgacaatgtcctttgtaagtagcttaaggtagctcctcagttccctgtgagacactgcacacaacatcctttaaactgccttaagaaaaacagccctacaaatgaagactccattgccactccctttgaagcagctgctctcagagtcctctgcactgcctcatctgaattgaactatctccccaccttctcgcagaatcaaaaactagaggctgcaggctgaagagggcaccattattttgtttaactcacagagtatttaaaacttttttttaagttgttgggtaaattctaacaggttttcttcagggtccagatttttaccttctcttgaaaaattagaagctcctgcaacatcagtcccacagctctgcacatcattgactggcatcaattggttgagccaagaggtagccatgctctctccccagtgtgccactatccctacctgaggctgggaatcaggtgtcacttaccttgacatctgttcccttatttttccaacaatgggaatacatttttctgcattcatgtcgctaacagaactaggaaaagcaagcctggaccacaaggatagtgcagtgagagataatgtgagtataattcttgatgcaagtgaagaataatcatgagttcaatatggttaagtgcatgtgtttcaaaacaacacaacccaaacaagattcagcaaaaatactatcccccagctctattttgttatgttgcctctatgacccctgtaagattttgaatttcagatgcttgcttcagttaaataaagagttttctagatgaaggcatgcagtaggtctctaacactgagccactgccttgtccctctcaattaacctttgtctttaagtccctgtctaatgcctactagtagctaggtccctgagattgtaaagaccccaaggccccaggaccctgaagagcccaggaagtatcagaccaatgaaccagacctgaggtctcctgtactcttcagcttctgaactataggagaatcccaaggaaaacagggcaacaacaacttataataaatagtaatactgccagaatcctatttgtatttaccagtttgcaaagcactctcattcattcaacagtcatatggcaaatataagttgaggctctattacagatctaggccctgtgggcgtgatgttatacttggtagtcaagatccctgaccttaggaagcttccagtctggccaggaaacatcagagaactaacatttctatagcactttaccatgaaccagtcactcttctaggtgctttacactgagtaactcatttacccttcatagcaattctaggagataagtactgctgttttccccatttcacagatgaagaaactgaggctacagaagttaagtaacttcctcaagctcagtggtggagccagccatctgacccacagaagcaagttgctggaggcaggcttttgggaccacagactgggaagatgatatcttcaccagtgaagatttccaaggccaacatcacatggccaaattgcatcaccccatggccctgggctcttctccctgttcacactaaaactcagaaacatttattcatggggggagtagtcagcacactggttgctcaggtctgagaatgccagggctgagctagcagggtttgcaggtcccaaggcaatttgcatctcctgttggaagtcttcctcatcaaagcaacggaaatcaatgcagtaaatagttataatgaactgacctgctcacactccctgtctcttcctgaggaagaggaatcatgagagacacattgtttccaaatccttcacctctttccccctcgcctgatcctcccacagggaatcctctttgctcctgtcaacagtgtttgagatgtttcagagtttttattggatcttcattgtagctctgtctgtgaggattcagtgaagctaagatttaagggccagagagagttgaaacttctaccaagcatcagccatggctgccctgctttccagagtactgtccacggacctctgggcctcagggactagagaatgtcaggggaccatctcatttcatacatgtaaaaactgaggcacggagagggcaggaccacccagcacaggatcagcacacctctccaacatcagtacaccccaccttttcaggcagatacaggaatctcctccgcagcaaagtgttgataggtgggaagcagtgctgtgatgcccttagctttggcatccaaatgcttgagttttaatgcctgacccaccatttccttgctgtacaagaccttgagaaagctaattaacctctcagtaactgttttctcatatataaaacagggatgaaaataaaagtatgtgctccattgagttgttggaagctttaataaacacaggaaaaaaattagaattgtgtctaccatgtagtaagtattcaataaatgtcagtgactatgcccatgatgaatatggtgaatatgattatgatgatcatgggcattatccctggtgctaagagtcacttctacaggagtttagcttgccctgacctagaacattgaggcagggcatgaactcaatgttgcactgagaaccagtctaacacaggaatgttttctctgtttcacaggtgtcagtcatgttctctggataaatgataagattgaaagtccttgaaggcaggagacagccccagatatcgttttgttgtctgacacaataccaagcacaaatgatgtgcctaaatcctgggtctttaacccaaggccatctacatatgccctgggcctgccagctcatgaaaaccagcctctgtggcagttggggtgctaaggaattgctccagttgagcttcactggtttttactcttggctgtcatgcttggatctcttgattatgttccatcagttcaccccctgcctctgggctgaaagatttggtgttctttctaagttttcttgcatgatttgtggcttagaacgtctttcccgtacatctctagccctttccatctcaaatgttgactcagattattggctcagggcaaagccactggctccagctcttaaccctgtagaatctcacctatccctggcacccaacatagacatccaccccttcaactccaccaagctagggagtagagagtagttgtcttttccatccattctctcccttcccctccttgtctaatttctaagagttaagagtgggcacttttccaacatttccgtggttacgggtaactatgtcactcaatcctggccacatgaggtgggacactagcccactggaagagttttcttcttaatagaagagagaaatctgtaagaataatcccccactgttcctaccttgggtgctattatgtgaggccttgatgcttgaacctgtggcaatgatcttgcaacatgaggaaagggtcacaagaattgcagagatactgactggagccctgagctgttaaataaaccaactccaaaccaatgggaatggggtatggaaccaccagtctctagattttctgtgacaaggaacaattaagcttccatatttcttaagcctattttagtcaagagctcagttagttgcaggcagaagcattccaaagttttatcaagtaagcatcaatttgcctatcacaaactttatcaaggtgttggtagattctaccttgtagacataatgtgatctactaggaatctatgtagaaaattcaagaatccaagaatttgggagaaaacttaaaagtcgtccatatctgacatatagatcaatggaataaaatggagggtccagaaacaaactctcatatttatggtcaactgattctcaacaagggtgctaagaaaattcaatgggggaaataataggctttttgccaaatagtgctagataacagaatatatccacatgcaaaatatgaattcagaaccctatcacacaccatataaaaaaatagctcaaatggatcaaatatctaaatgtaagcactaagactactaaactttaaaagagaatgcatgtataaatccatgaccttggattaggcaatggtttcttagatatgacaccaaaagcaatcaaagaaaaagacatataaattggacattaacaaaatttaaaaatgttgtgcttcaaagaacatcatcaagaaaatttaaaaaaccttgaatactgtatatattttctccaaaaaagttacacaaatagccaataagctcacaatgtgcttctctgctgagcccagagagagcaagatactactactcaactagccctttagacagccaccacaaacacatacgaacgggcacatgggatgaaatgtgtttaccattcccaatctaggacaacggtacccaaaggaaatgttggtgactatgcccatgatgaatgcttataaaccaacatttcctttgttttgtaaaacatttgaagccatgtccatggacacagaggaaaccatgacggcaccagaatgtctatttctgtccttgagatgatgctaagactaggatatccctgtgtctaggaactcactactattgtactggtgtagctcagtccatctttgaggaacaaaaagaagttctatttttttatttcaacttttatttcagattcagagggtacatgtgcaggtttgttgcaagggtatattgcatgatgctgaggtttggggtacaattgaactcatcatccaggtagtgagtatagtacccaataggtagtttttcaacccttgcccctctccttccatccctctcttgtagtccccagcatctagtgttcccatctttatgccatgtatactcaatgtttagctcccgcttataagtgagaacacgcagtatttggttttctgattctgtattaattctcttaggattatggcatccagctgcatccatgttgctgcaaaggacataatctcattattttttatggctgtatagtattccatggtacatatgtaccacatattatttatccaatccactgctgatgagcacctaagttgattccatgcctttcctattgtgaatagtgctgtgatgaacatacgagtacaagtgtccttttggtagaatatttattttcctttgggtatatccccagtaatgatattgctaagttgaatgatagctctatttttagttatttgagaaatctcctaacagctttccacagtgcctgaactaatttacactcccaccaacagtgcaaaagcattgcctattctccgcaacctcgccaacatctgttgtttttttactttttagtaatagccattctgactgatgtgagatggtatttcatagtggttcttatttatatttctctgacgattagtgatgtggaccattttttatatgtttcttggccactcgtatgtcttcttttgaaaagtgtctgttcatgtcctttacccactgtataatgaagttgtttttcacttgttgatttgtttaagttccttatagacctttgtcaggtgcataccttgcgaatattttttccctttctgcaggttgtctgtttactctgttgatagtttcttttgttgtgcagaagctctttagtttaattaagtcctacttgtcaatatttgtttttgttgcaattgtttttgaggacttagtcataaattctttgccaaggccaatgtccaaaagggtatttcctagatttttttctagggtttttataggtcgaggtctcagatttaagtctttcatccatcttgagttaagtgataagtgcacacaaattaaggtttttttaagtatttttaacttttttaaagtattttttaggtatttttaacccttattttagattcaagggtacatgggcaggtttgttacataggtaaattcatatcacaggagtttgttgtatggattattttgtcacgcaggtattatgcctcgtacaaaacagtttttttttctgctcttctccctcttctcttcttccactctcaggtatgccctgatgtctgttgttgccctctttgtgtccatgtgctctcatcatttagctcccacttatacgtgagaacacgtggtatttggttttctgttcctgagttagtttgctaaggatactggcctccagttccaaccatgttcctgcaaagggcatagtctcattattttttatggctttgtagtattccatggagtattgtaccacattttctttatccaatctactgtttaggttaattccatgtccttgctactgtgaataatgctgtgacaaacatacacatgcaggtgtctttatggtagaataatttacattcttttgcgtatatacccagtagtgggattgctgggttgaatggcagttctgtttttagctctttgagaaattgccacactgctttccacaatggttgaactaatttacactcctaccaacagtgtgtaagcgtccccttttctctgcaaccttgccagcatcagttattttttgacgttgtagtaatagctattgtgactggtgtgaaatggtatctcactgtggttttgatttgcaatcctgtaatgatcagtgatgttgagctttttttatatgcttgttgggcacacgtatgtcttcttttggaaagtatctgttcatgtcctttgcccactttttaatggggttgtttgttttgttcttgtaaatttgtttaagttccttacaaatgctggatatttttaggtctttgtcagatgcatagtttgcaaatattgtcttctattctgtaagttttctgtttactctgttagtttattttgctgtgcagaagctatttaattagatcccatttgtcaatttctgcttttgttgcaattgcttttggtatcttcatcatgaaatcattgcctgtgcctatgtccagcatggtatttcctaggttgtcttctaggggttttatagttcgggattttacatttaagtctttgatccatcttgagttgatttttgtatatggtgtaaggaaggggtccagtctcaatcttccacatatggctagccagttatcccagcaccatttattgagtaggttttccctcttgcttgtttttgtcagctttgtcaaaggtgtgcagccttacttctgggctctctactctgttctattggtctatgtgtctgttttttaccagtaccatactgttctggttactgtaatccagtagtatagtttgaagtcaggtaatgtgatgcctccagttttattctttttgctcaggattgctttggctattcaggctcattttggttccatatgaatttttaaacagttttttctagttctgtgaagagtgtaattggtagtttgatagaaatagcattgaatctataaaaatttcttcaggcagtatggccatttttacaatattgattctttccacccgcaagcatggaatgtttttccacttgtttgtgtcatctctgatttctttgagcagtgttttgtaattctcattgtaaagatcttttactttcctagttagctgtatccattctttaggtcttttattctttttgtggaaattgtgaataggatagcattcttgatttggctcagggcctggttgttgttggtgtataggaatactaattatttttatatgaatacattgattttgcatcctaaaactttgctggagttgtttatcagcttaaggagctttggactgagactatgggattttgtagatacagcatcatgtcatctgcaaacagagatagttttacttcctctcttcctatctgggtgctttttattgctttatctttcctgattgctctggccaggacttccaatagtacgttgaataggagtagtgaaagagggcatacttttctttttctgcttctcatgggaaatgcttccagcttttgcccattcagtaaatgttggccgtgggtttgtcatagattgttcttattattttgaggtacattccttcaatacctagtttgttgagagtttttaacatgaagggattttgagttttattgaaagccttttctgcatctactgaggtgatcatgcggtttttgtctttagttctgtctatttgatgaatcatgtttattgatttgtgtatgttgcaccaaccttgcatcccagggatgaagcctacttgatcatggtggattagctttttgatgtgctgctggatttggtttgatagtattttgttaaggatttttgcatcaatgttcatcagggatattagcctcaacttttctattttgttattgttgtgtctctgccaggttttggtatcaggatgatgctgaccttatagaatgaattggggaggagtccctcctcttcaattgttttggaagagtttcagtaagaatggtaccaattctggtagaatttggctgtgaatccctctggtcctggactttttttattggtatgctatttataactgattccatttgagagcttgttattggtctgttcagggattcaatttattcctggttcagtcttgggagggtgtatgtgtccaggaatgtatccatctcttctagattttccagtttgtttgcatagaggtgttcatagtagtctctgatggttctttctatttctgtggggtcagtgataatatcccctttgtcatttctaattgtgtttatttggatcttctctcttttctttatcagtctagctagcagtctatctattttattatttttttcaaaaaaaactaactcctggattaattgatcttttggatggatttttgtgtctcaatcactttcagtgcaatatgattttggttatttcttgtcttctgctaattttggggttgctttgctcttgcttctctagttcttttcattgtgatgttaggttgttaatttgagaactttctaactttttgatgtgggcatttaacgctataaatttctctcttaactctaccttagctgtgtcaaagagattctggtgtgttgtatctttgttcttgttagcttcaaagaactttttatttctgccttaatttcattatttaaccaaaagtcactcaggatcaggttgcttaatttccatgtaattgtatggttttgagtgattttcttagtcaaattctatttttattgctctgtgatctgagagagtggttggtatgattttggttcttttgcatttgctgaggattgttctatgtccaactgtgtggtcaattttagagtacatgatatgtggttatgcgaagaatgtatattatgttatttgagggtagagagttctgtagatgtgtgtcaggtccatttggtccactgttgaattcaggtcctaaatatctgtgttaattttctgcctcaatgatctgtcttatactgtcagtagggtattgaaatttcccactattattgtatgtgagtctaagtttcttcgtacttgctttatgaatctgtgtgctcttgtgttaggtgctgcatatatatttagaatagttaggtcttcttgttgaattgaacccttcaccattatataatgcccttctttgtctttttctttatttttgttgttttaatgtctgttttgtctgaaattaggatcacaactcctgcttttttcagttttacattttcttggtagatttttctctatccctttattttgagcctatgggtgtcattgcatatgaaatggatctcttgaagacaagatattattgggtcttgcttctttatccagcttgccactctgtgtcttttaattggaacatttagcccatttgccttcaaggttagtattgatatgtgtggatttgatcccgtcatcatgttgttaggtggtaattatgtcaacttgtttgtgtggtagctttatgatgtcactggtctgtgtacttgtgtttttgtagcggctggtaatagtctttcctttccatatttagtgcttctttcgggactccttgtaaggcaggtctggtggcaatgaattgcctcaactttgcttgtctaaaaaggattttacttctctttcgcttgtgaagcttagtttggccagatctaaaatccttggttggaatttcttttatttaagaatgttgaatataggcccccaatctcttctggcttgtagggtttctgcttagaggtccacgttagtctgatgggcttccctttgtaagtgacctgtcctttctccatagttgcctttaacatttttttctttcatttcaaccctggagaatctgacggttgtgtcttggggaattatctttttgtgaagtttttgcaggggctctctgcatttcctaaagtttaatgttggcctctctagctatgttggggaagttctcacggatgatatcctgaaatatgttttccaagttgcttccattctccccatccttttcagggatgctaatgagtcacagattcagtctctctacatagtatcatatttctcagaggttttattcattccttttcattctctcttctttattcttgtctgactgtctcatttcagaaagccagtcttcaagctctgagatttttttcttagcctggtctattctactgttaatacttggaatagcattatgaaattcttgtaatacatttacaattaccagccctgtcaagtcagttatgttattttctatactggctattttttctgtcagttcctgtatcattttattgtaattcttagcttccttaggttgtgtttcaacattctcctgactgttgatgatcttcatttctacccatattctgaattctagttctgtcatttcagccatctcagcccagttaagaacacttgctggagaactaatgtggttgtttggaggaaagaagacactctgcgtttttgagttgtcagagttcttgtgctagttctttctcatctgtgtgggctgatgttccttcagtctttgaagttgctgacctttggattttttttttcttttatcctatttgatgaccttaggggtttgattgtggcataaggtggattcagtcaactggcttcatttctaaaagattttagggagccaagtctcagctcaggactcctgggccacattctctaactctgggagactggtattgagccccagctttgttccctgactcctcgaggttaggaacctgatgcactgggggggccaagatgctgctggaccactggtcacagtgctctggtggatggtgccagccaaagcacttcacagggcagtggtagtgagctctgtcctcatttgcacatgccagtagcagtgcagtggcagtgcagcagggtgcatgctcagctgcagcagggtgttagtgggtactggggtgctggcctctgtgcaagtgttcacagcagcagcagtggcagcacagcttggggtgggccccactggacactgggcaactgtgcatgcattaacaccaatggtggtgttagcatggagacagggtgctagtgggggcaggactgtgtgtacccttgtgcacgtacatgagggcagcagtggctacccagggtggggacgggtccactgtttcagctggggtcaggcattggcaggcaaggctagcaggcttcatgcctactaatactctgacaacaatggcagttgggggggcagtgcactcaagtcagcagcagtggcatgtcagggtgcctgcacacacatatccttgtggagaaggaaaggcaaagtccacctgcacaaggtccacatgtgctggcaaagtgatgtggggagaccctgggtgagtatatacaggcaaagtggcacaggggaggctacagtaggggaagagcaggggtggagttagtgtgtgtccacgggtggctctgctggagcactctgccggtcaggtacagcctgccagccctgaagctatgatgcaggccaaggcagtacctgagggctgcactgcaagcagttgtggccaggctggggcctcaggagaggccatcagactaaggggtgctcagatcagactagtcctgtctcatgggcaagaccaccctgcagttccagtctaacagttcccctagggctatagtctcttatggcagcaagttgagcctaagaggatgggcatccctggccatgcttcactacagatgcccctacaccaaaccctctgggctccacactacctggagttcttccccatctcttctctaagcagcaattcctgccaattcaagtgtccatggtagtcgagtggtcacctcctggtggaattccagaggcccaaggttagagcaggttgctccttgcctgttgaactcaccccttcatgcaggcatcattgaggggcaggaacgagtcccagtgtgcagaagccccttgcagggttcccagcttcctcctgcttcagcccagcctctgtgtcttccttatattcaccctgaatgccttccctctgaagacatgctaggagtgcaccagtcttcctgatatcccagtctctcggtgagagatgttcctcctggctgtgtctagtcagcagccatcttggagctagtcctctgagctcagtttcattcttctgcatatggatagtcagttactccagcaccatttattgaatacggactttctccattgcttatttttgtcaactttgtcaaagatcagttggttgtagctatgcagctttatttctgggttttctattctgttccattggtctatgtgtctgtttttgtaccagtaccatgctgttttggtcactgtagccttgtagtatagtttgaagtcaggtaatgtgatgcctctggctttgttctttttgcttaggattgctttggatatttgggctctttttttttttggttccataaggattttagaagttttttctaattccgtgaaaaatgacattggtagtttgatcagaatagcattgaatctgaagattgttttggcagtatggactttttaaagaattgattcttccaattcatgagtatggaatgtttttccatttgtttgtgtcatctatgatttctttcagaagtgttttgtagtttttcttgtagagatgtttcacttccttggttagatgtattcctaggtatttgtgtgtgtgtgtgtggcgattgtaaatgagattaggttcttgatttaacgctcagcttgaacattattggtgtatagaaatgctggtgatttttgtacattgattttgtatcctgaaactttactgaagtcatttatcagttccaggagccttttggcagagtctttagggttttctaggtatagaaacatatcatcagtgaagagaaataattcgtcttcctcttttcctatttggatgccttttatcttttctcttgccagattgctctggctaggacttccagtactatgttgaataggagtggtgagagtgggcatccttgtcttattctagttcttgaggggaatgcttccaggaaaaagttctatttcacaagcaatcaaagaaatgtaaaacaaagcaatgaacatttgtttttcatccataatattaacaattagttaaaatataatattcagtggtggcaagggtatggtaagatagactcaagttctcactggaataaaatgtagtccatctgtagaataaagttgaacaatgtgctcttaaacccaggcattccatccttattcttatcataaaactcagagattaagatgggtgttaattatataaagtcattaatcaagattcttattgtacaagccagtaattgaaacaacttgtatatgcagcaagaagggaattgttgaccttatggaagagtagaatgatagatgccagcagctggaaatgggtggggggaatgaaaagaggttggttaatgggtataaacctacatttagacagaaggaataagtcctacatttaggtaggaataaacctacatttagatagaaggaataagtcctagtggacacagtaaggtgactatagtaaacaatttattgtatatttcaaaatagctaaaagggaagacttgaaatgttttgaacacaaagaattaataaatgtttgaggtgatggatatcctaaataccttcatttgatcagtacacatcacatgcatgtatcaaaatatcacatgtaccccataaatatgtataattatctatgaataaaaaaagaaaagaaagaggggaatggttacataagttataatatacctatatgctagaatggattttgaaatagttggatggcatcaccatataacgttacatttaaaaaccagggttccagccaggcatggtggctcacacctgtaatcctaacactttgggaggccaaggcaggcagatcacctgaggtcagaagttcaagaccagcctggccaacatggtgaaaccccgtctctactaaaactataaaaattagccaggtgtggtggtgggcacctgcaatcccagctactcaggacgctgaggcaaaagaatcacttgaaaccaggaggcagaggttgcagtgagctgagattgtgccactgcactttagcctgggcgacagagcaagaccctgtctcaaaaagaaaaaaccagggtccaacattaaaatgtacatgatttctaattacataaaaatctttgctaattcatagaaatgtgactggaaagaaatacaacaaagcactgataatcacagttactggacagtgggatgaacagtaatgcatatttctgtctgtattctttcctatactctccacattttctcaaataatcatgttttcttttttagaggaaaaacagcattattacaaaaaagaaaggagccaaagatcttaagtcaccatggctccttctattgcccgctgagctgtgtctcccaagctcactgaccttcagaggctttgttcataaaataaggacaatggtatctaagagtcttcacagaattgctgtgaagataaaataagaaaacgacatgctttgtaaattgtaaagcattgtacaaatgttagctgttactaacattataacacagaattaattccaataatctgagagaagagaaaagaaattcataataagatacctcaggctttgacataggaactaggaaaatacaagaataagctaagaatagaaagaagtaaaacatccacaggaatcctggagaatgttcactagcatatctcaggaagctcagagaaaacatttaacaagaagccaaaaaaaaaaaaattcacaaggcaaccaaatattaacagcactgcttggctaacaagccacacatgatattttgtctttaggttttttagctttctgttttgtttcattttgttttttcaagtcttctgaaaattgagaaatgatcaagttgggagaatggaggagttcactcattgtgacaggcagataaaaattagagataacttaggtcaaaatctattgaagaagcatcttgctccaaaagtcaaaatcagcacccagagggagaaaactggaggacagagagggcacttaatgatcacagggccaggactggactcagaaatgacaaggacccagcaaaaggattcaaattctttaccttgcaaaggaaaatgcctgtggccactcgttgctgcccactccttcctatacaagactctcctattcttgcttcttgagtgctcacctgtcccactcccctgcagctccctctctgacttcccttccctccccactccacactgtgcctgctctaagggtcctttttcactccctgctcttgcctatcctccctgttatttctccctgttctagctaacaccttcaaatctacatcttcatgcaggatcatttctcaacccccttaccatctctctaaatgcctctcagacacacacccccagaagccttgctgcccctggaaactaagcctgcagccaaatgcgtcttccttttttttttttttttttttttttattatactttaagttctagggtacatgtgcacaacgtgcaggtttgttacgtatgtatacttgtgccatgttggtgtgctgcacccattaactcgtcatttacattaggtatgtctcctaatgctatcgttcccctctcccccaaccccacaacaggccccggtgtgtgatgttccccttcctgtgcgtcttctaaaaaaaatgcgtcttctaaaaaaaacgcaaacaaaccagtgaaagtgggttcaatgtatccttacttgctagtcctaataacaattctgctagaaacaatttcctcttgtgcttcttcttctcatcccaaactaaactgatcatgtcccaaatactattaatacaatctttcatatttttttctaccaggcccttccacctgcccccatcccagtccagagattgataggtcactgtggcagctttctgattaccttctcatcactgcatctcctctccccaatcacttgtaaatgccactgtcaaagggagttttgcaagacaacactttctcctcacttggattctcccaacaaaggctttcaatgactaccttaaaggcctattagataaagaacaaatgcttttcctaacattcaagctcctgagtcctagctaagggctggatggatggaaatgtcttggccaagttcaagggttgggccaagatggtggccaacattagatttcaagcatgaaggctagggataccagttgtcatgagttaattgtgcatgggcagggctgttaatggtcaaaaaaagagtcaagtcttgggaaagaatataattgtcaacatttgagcataaagaacaacctcccaaagcagaatcattccagaaatggaaaggaacacagagatgagaggcaggagggtgggcttcagaaacaaggacagaagccaaagttggggccaaagaggcccttcccatgggcagatcagaagtgtgcttgctcagagcccaggaggctgaggttgggcaacatagtgaatgtgaagccaactctgtggagcacttgctccccacacagtgctcactcttctccatagaataaggcaagctgtagctctgaaaaagtcaagagtgtagcttctggaaaattaacctaaaagtatagaagccacccaaagcatagaaagcatccattcatcaactgatgaatggatagacaaaatgttgtatatccaatacaatggaatattattcagccataaaaaggaatgaagtatgttgcatattgcaacatgataataccttgaaagcattttatgccaagtgaaagaagccagaaacaaaaggccacatattgtaagatttcatttatataaaatgtccagcatatgcagatctctagagacagaaagtatcacagattggtgattgcttagggctgggaagattgggaggctaatgggtaataattaagaggtatggggtttccttttggggtaataaaaatgttgtaaaattgatggtggatgaatgtacaactctatactaaaacacattgaattatacactgtaaatggtaaattgtatgttatatgaattatatctcaataaagctgctttttaacaaaggtggcagttggttcaaagtagacttcaattctacacgaccaaagaaagaatcaaaaaataagtcagcaaggaaaaagtgaattttataacacctctatcctggcagcttgtggaaagcccaaagacgtgctatgtaatcttttctgtctccattgcgagattattttcttttctctgccccttggtgctacctctgcagcttatacatatttctgtttctccttcaatagcaatagattataactgttggccaccctggctgcttccctactgcacactgtggctctcagaggactgagactgttccctattggctcctatatctctagtccctggcacaagattgatgctgactaaataactgttgaattgatattaatgttataaatcctggtcccttttatctaaaaaatcttactatctgatgagaaactagtaacactagttgctgatgaggagaactcagtagttagggagagggatgggagagaagcattttgcacaccctttagtacctctggaatttcatgtatgtcaatatgtcaccttctccccagataaattaatttaatgttttaaattgtttaaaaatatatcatttattagcaaagacacagaattcatgcatttgacaaaacagagaactgtagaatgtgacaaagctctcaggagagcagactcagacagcaaactcttcagtgggaggcccaggggagtggaaatcaaagtccccaggagaccagagtggagagaattatagctctcttctcataattctaaggaagcaattgtagttctccattcattcttggtaatgacatcagggtttctctgccagcctcaacaatctcaccactgccagtctcaaggctgatacagattcatccacatcatgtggcattcacatccttgctgccatgcccacctgtccactcaggaggacagctgctgcagccagaaactgggagagaagacctcattgctgggcagaattactcactaactagtacagcatacgaagaccaccctcgccacacaaggagaggcacacctggaagcactggaagagaggctaacctcgtcccccatgccctttcctcctttctttgaaggtttttcccctctcttgggaccacttatgcaccttaagacccctggaccctcatgctgcacctcattgtccctaagcactgacgcacatcacagtgagaaaatagaaaataatgggacccaaatgtccccaaaagacaccagccctcacagggagccagcacctggttggggtacactttgaaatggcctgtagatgtctcagcctctgcctcctccaagtaagcaccctgaaagcagctctgcaactcctcaccattcatcaccagcccccagcatagtcccggtacatgacaggcagtatttgttgtttagctaacaatgaatgagcatgtagtagtgccatgcactgttgcagttcatttaatcctgacatcagccttaagaggcaaatgctattagtcccattttacaagtaagtcacagagaacttgaaatcacttgcccaagagcccacagctactaagtgacagaaccaggacacaaactcaatcggctacagaattctttagcttaactgaaatgctcatgactcatacaagagatattgaaagtgtgtgtgtgtcagggtgaaggtgggcaggggcaggggtagaaggaagaaagagaaagacaagaaaagaagggtggtaggcagggagggacagaggaggagaaaaagtgaggtggatggaagggaggccactaggtcccgggcacaggctttccaccttgagaggcagcaactctatacggtcagtaccctacagtccagagactgacccaggttgaacaaactctcaagtgactgatgaataagccagaatatcaatcagtttattagtttcagagagaactattacttccaagaaaaccagagtctcacgtccattggtgggaggtcaatgtacatgggaaaaggatcagcctcatctgaagcttgcgtggaaagcaaggactcggtgccagagagccacaggatgatgttaatggcttgtgtcagtgagttatgattgtctggtgctccctgctcctcctagacccatctgtcaagcagagcggatgtttctgtcagccagtcgggaccccttgctttggacaatgccggaaaaacactgacaaattactgctccgtggcatccccttcctctagaccatgcacagaccaccccactttggttaatacatttgtttcccagacgaggcacattgtgattgattagatttcacaattgattaggtttcacaatcccagatgtttaacttcattatgcatggattcttcttactaacataatctcagaggacaaccatgttctgaaaaataaaaaggggaaaaaaacaggacttattctcaggcctgttgctgctctcatcctctaagttggctctttgtctcagaaaagggtccagtttgtgtcttcacagtgtgaacaaattgggaactggttgggagggggacatgatgggatgggatgaaaaccaagcctggattaaggaggctgactccactgcagaggaatgagcttacagctcaaaaaactgtgatgctactctagttagtctaatttaatcctagctgcttgtgaaggccatgcataggctgcctagcttatcaaatttctctggtacagtacaagaccttataaccagtagcagaattttttggtgtcactactaaaagtcatatttaaatttaccaagcaccttctacattgtagatgttgtgtcaaactcttacacgcatgtgttagttaaccattgctgtgtaacaaattatcttccacgattcagcgtcttaaaacaacatgcatcgactgtcttgcagtttctgtgggtccaggcacagcctagctgggtcctctggctctcacaatgctgcagtctcatcttgaggctggactgggaaagactcacttccaagctcatgtccatgattattgtaaagatttcttccctcttgaattgttggactgagagttctcctcctcagggagcccccatgagcttttggctggagacctccacacttccttactatgtgcccttctccatagaccatctcataccatggcagcttgcctcattagactgagcaagtgagagggcaaggaacagtaccagtgacagaaagagagagagagagaaggagaacgctagcaagaaagaagtcacagactacagacttaaccatggaagtaacaaccccttacttcgctctattccatttgttagaatcaagtcactaggtcccatgcacactcaacgggatgggatacagaggggataaatactaggaggtggggattgttgggagccagtcagaagcacatgacctcctcaaggcaaccctgtgagatagatgctattcctgttctatgaattttccagatgtggaagctcagagaggttaagtcagttgtccaaagtcacatagcttgctgatggtggaatcagatctcacatacgaatctgattttataatcattcactgagttcagcttggtcaagtgattttcccatagtggtcccaatatcctatcaaaagaaggtcactcattctgtcaatgagtaaggttggttgcctctaatttagcatgagactaatttgaagggagaccaatttttggtggccactagcatcaggaccaagatctgggcctttccaattctggactttgaatctcagacttgctgcagagatgtcctgtgctcctcctccaacctggctctgtcaacacaaggcagtacctcactcttggtcactgcctggtttcccttccctattattgtagctgatgtttgtatatacagtattccccttagcaacctgcccaatgacataaccctgtagcaccaggcatagttcaataatgtctcataaacacttattaaacactactttgtaccatgaattgagtgatgcagagaaaaatcagacattgcacctatcctcaagacagtcacaaagtgtcttgattctagcattgtgccatccaatacagtagctactggttacatctggctaccaagtacttgcaatgtggctggtctgaaatgagataagttgtcactctaaaataacagtggatttcaaagacatatgaaaaaagtaaaaatatctcatcaatatttttatattgattgtaaaacaataatatttggggtatgttgaattaaataaaatatactattgaaattcatttcacttctttttagtttttttaatgtgtaatgtggcattccacatcggactcacatttgtggctcttgtcacatttcccttggaccaccctggtctagaggcagggagtcacgtgatacccacaattcccatttattgagggttcaccctgtgcctgtgttccacatactctctctctacatggaacacaagttatttcatctagtcctcataataaactcatgcagtagacatcattatttcctcttaccactaaagcggaggctcggtggactgaagcaccttgcctacagccacacagtaagtgggtgagcaagactgagaagctatggggctccagagtccatcagaaagaggaatacacacctgtgctgttcagagtgatggacgctggaatggagccacatggggaacccaggagaaagcatccaactccaccttggaaggccaaggaagacctccagatagacatgacgcttaagctgagtaagcccagaataaagatatccacgaagccaacaggcaggagagagctttcccagcagaggaagcagctggcgtgaaaccccagaagcatgaaactgcgtggtgcattcagggaacagtgtgggtttgacataagaaagtggagggagataagacgagcaacataagcagaaactttgcagtaaaagaactacacaccgtgcagaggggtttggactttgtcctgttgggtcagtagtctcaactctggccgcgcattggaatcaccaggagaactttttaaaataccaatgcccaggacccatgtcaaagcaattaaatcggaagatcataggagatggtgatgaggtggcccaggctccagaatttgttaaatactctctccagcgattctaatgtgtggctgggttgagaagctcttcatagtattaggaatttgcggaatagctttaagaaatgaagtcaaatgatcagagttttgtcttaggaagatcattctgagggttgcatcgaaaatgaattattttccattctccagtaactctggaagccgggaaaccaagcgggtttctactgaaatagtccaggtcagggatgctgaggcctgaggccacgtagatgaatggaatggctgtgggggttgaggtgcggagccccctgagagaggcccctgctatggttctgaccacctccagcctcaagcacttccaactgcctcctgcatctctcccactaggtgtcccacagacatctccagctcatcacatcctcattggaattattacattcccccagagcctgttcctgcaggttttcctaaggtttccttcattcccctcatggctccctagaaaccctccacccctccaggtccatcatcaactcctctccctctctcccctcttttcccacatccaatcaatcagcaggtcttgttgcttttatcctcaaagactgtcagaacagctcttccctgtcactccccagcccctctcttattcaggctctttcatttatggcttgaatccttgtgacattccctgtggcaatcgctactggatttggatgtccaaagccatttgaaactctgattcaataggtcgggtgtagggctcaggcatcacacacatgcacacacacacacacacacacacacacgcacacacacaaagagatataatctcccaaagttattctaacttcgttttagatatgtggttctaaaagtatgtccttgtaccagcagcatcaacatacctgggaacttgttagaaatgaaaattcttggacctccaccccaagtctactgaatcagaaccctgggggtaagacccagagagctgtgctttaacaatcccttcaggtcattttgatgcacattcaggttcaagaatcacctatccaaactactcatggaaatctcattcccacttgctaatgattgattttcagtgtgcacataacccagttctggccaatgaaacatgaaagaaaatcttccaggagggcttctggaaaaaaaatgttttctccctgatagaaaaagggagccatattttaaaaaaagctctttctccaatatgtatactttatgtgagtaataggacctgttctcatgtgaggctgtgatgcttggagctatggctgctatcctgggaccatgaggagaaagtggagaggatcacaggaaagctaatccaaaacctgatgttaaactttcaaattaatcaattctggaacttcccaatcttcatatctgatgcaagatcactgtcattcttatttaagccactcttagttatatactttcttacttgcagccaaaagcatcctgacttctatagcctcctgactgttatccatagttccaggctcttcccttcaaatctatcctactgtgagaaactgtgaagggtcttagattttaccctatctacaggctaacaactgagcatgaaccctggtgaaaggcataaaacttcttggtcagaggcaaaatattgtattactcatggtacagcaagcaccatgtttgcatcagttccccttcttctcaagtcacacagggacaacactgtgggcccatgtggtacctacacacccagtgggttgcattacaggagaagaaccccaagccaagggcccaaaaaagcagtaagcagcaaacaacaaataggttctcctcctgtcctcccaggtagggatggttaccttgccctacttagtcacctttatgaccagatacagaactgctcagtatcgagaaagagacaaaccctgcaatctgagacattcagcaaaaaagtgcagggaagttcagagctcatagtgaactgcctttccaacaccgtgtttatcttccagctagagctcccaaatgtccatggctgtagtcacctaagtccttgcctcagataccagcagagtctgagctagcttgagcccttaatcatcccttctcatttctggctgaaacctatcacaccctccaaaaaagactgactatgccccagcggctcaaggatactcaccaggcactttctcttacctccgcacagagtccacttcttgtctggcatcacagttttccagactttcatcttccaccaggcccctcctctcatctgcatctctttgaatttatgcttcagtgacagtctcagtcttgattccccttttggtcctacgtgcccagggttctgcattttccagggcagtccgagtctactttgttctctcaccgccagcaccctggacttccaccagtccagatgagagttcagacaagcggctccctgttgcctcctaagcacataacactcctcactctggaatcaaagccctacatgccctcctccaatttccttctctgaaattatctccaactatccctctacagtctacacactccccagggttcctggactatgtggttttctccatcccatctgttgtttttcccctctagacctttcctcatgatctttgctggatttagaatgtgctcttcctccccactctgctcctggggaaatcctatccctccctcaggcccatctgaaatgaagactttggtaaacctctgtacggttctctccctgctggccaggccctctgcttcttttcaacccaggggctgtgagcttctcttacagttctcatctttccagtcttctgtgacgtcctcccaggctggtctcattcctgctgcaaaataaaagctcacaaaagcagggactacttgatactcccttttgtctccctttctgacctgagtactgttgctagctctgttactaatagtgttctcccctaaatgcgtttgaacaccatgactgctttttcctaactaaagcaaatgagaaagccctgctgtgaactgcatccccgccatgctagtccatttttctgctgccttagataccagaggagggatgaagccttcgtgtcactgaaactgatgtcacttgttgagtccgccaaagggcaaataggcaaaatacaactctataggggaaatatgttgtgattgggggtgtgcaaactacacaatctcccaaacagtgtgctgagaattgattccaggtatatctggatacttcagcccttgcagtagctaggtggggcctggattgggctgagcctagtgggctgtaaaaacatcacttttgtgtatttatgaaaataaaaaggattgaaagcctagctttagggatgtggaattcctagcaccaaagggcctagcatcttgagggtctaatcctgcaaaggtttagactgtttcactcataagcaccaaataaagggaattgtcaatgaaatgaagataagaatgaggagttgagagggggacaggctatgctgaaaaatgtgatgaaagcttgtgtatggattgggactaggatggaatggctcagaagaaacgagatgggcataggtctagcatgaattgtggtaagaacaggaggcaatgggttagagagggagttaatggaatttgcgtgagctggaaatagggtggatggataggggagtaaggctccacccagaaaaacccacctggcttcctcaatgtttcctttcctccatccttcccagtaccctgatggatagctttgcacagataaattttgttcccagcccatgtccaaacaatatcacaaaatcagccctagccagttgtttctgtttacagccctgtctgtgattgatccagctctggaaaagcccatttatcatgaggaaccaaagcttcatggcctactgtctattttgttgctttattccctagcactaaatgggacttcaggacctcccacttgttccagtacccaatgacatgcctatatttccacactcagtttgcccttcccttcagcccctctagctctcagccttcctgggaccttaaataagtcacgcagctcctttcaccaactcttttcttgttctcgttacttctgggctcttctgcctttctatctcgtctccttctctcagcagctcactgtcctttccaatttcagctgaaatcagattccttctcccttgcctttgctttcccacctcccatggcctctcttatcatttattatttaactcagtcaccatattatgtatgcacaagagccatttctgaacatggtcggcatgaaaaaaataggacccaaagcagaagcaaacacctcttccctatcagtctcacagctccattgtcatcctgctccagtcctgagcaaggtccagcgaaacagccagatctggccaacacaccctcaagcccaattaacttcttaggttggacacagggaaaatttccagatggctttttacagatatccttcaatttatgtaagagatgccttcctggaagtggatgtttgaatgaaattccaaatggaatatcaggagggtcaggcacacaggatgtgtggttcagagacccaggttctattcttcttgagatggagtctcgctctgttgcccaggctggagtgcagtggtgcaatctcggctcactgcaacctccacctccagggttcaagcaattccctgcctcagcctcccaagtagctgggattacaggtgcccaccaccacaaccagctaaattttgtgggtttttttttttcttaagtagagacggagtttcaccatcttggccaggctggtcttgaactcctgacctcatgatccacccacctcggcctcccaaagtggtgggattacagacctgagccaccgcgccctggcctccagcttctattctttaatagccctcattaacttacttccagaacttgggcaagacctgtagcttctctagatctcaatttccccatttataaaacaagggagccagactatatttcctcaagtttctttcagtgtgaaaattcaaaaactcctattttacttaatgatccacatgattccattggagatccttcctacagttaaaattcagctctctcctcatcaataggtcattacggagcatgtgctatgctgctgcgcctcattagaagggaatgtagattaacctggtgaagccctccttttatagatgaagagaccagagcccagagaggagaagcacctaatcctggggtcacacagccagtgagaggcagagtcagtctaaaatgtacaagtcctggcctgagactactctttttttcctgtgtggtgttttaagcatgactgcaaatatttttatcctccttccatcaagaggtagatctatgtcccctactttctttttctttttttttttttttttttttgagacggagtctcgctcttgttgcccaggctggagtgcaatggcacaacctcagctcaccgcaacctccacttcccaggttcaagcgattctcctgcctcagcctcccaagtagctgggattacaggcatgtgccatcacacccagttaactttgtatttttagtagagatgaggtttctccatgttggtcaggctggtctcaaactggcaacctcaggtgatccgcccacctcagcctaccaaagtgcttagattacagctgtgagccaccacagcagaccttgtcccctactttttatttgaatgggtccttggcacctcccaccaatagtacatttggaatgaatgctatgtaacttccaaggcagggtgcatagaaggccatacagcttcagcctagctctcaaaggacatttattttctctcagagccttcatgtaagaagtccaatgggttgggtgctgtggctcacgcctgtaatcccagcactttgggaggccgaggtgggtggatcacctcggaggtccggagttcaagaccagcctggccagcatggtgaaaccctgtctctactaaagatacaaaaaaattagcaggatatggtggtgcacacctgtaatcctacttactccggagctgaggtggaaggatctcttgaatcccggaggcggaggttgcagtgaaccaagattaaaacactgcactccagccttgctctgtctcaaaaaaaaaaaaaaaagtctaacaatcctgagaactccatgctctctcagctgagcccacccgtaagccagcccagcccagctgccagacatatgagtgaaaaaactattggaagtggatcctccagcccccagtggttgaaagcacccccattccagtcctcccctgaaagatccacctctgtgcttttttctaacttctgacccacagaatttgggatcacaataaaatagtggttgtttcatgccacaaagctttggagcagttttttacatcgtcatagacaacctgaagaactagtaaactctcatgttggctaatattcttgggctcccttcccccaggtgaccaatgccaggagtgtgtgacttgcagcacatgtgctgaaggtggagagaggtagcctctgcctcctcacactgcacatcccctcacctgcctccagtgtggtcagttcacataggctttcactcctctgcccaggcaaagttctcctctctcctgccacggtcctttgtttatatcgtgagtgcaggcttgtcacacggatagcaaccagattatttatgtttgtcttcactagactacaggctctaaagggacacagctgtattctatgcatttccctgtgctgaggcctagcacctagtgggcgtgaaataaatacgtgtggaatgaaactgtcaaagaccatgtgaccagctggccctgaccccctgctaacaagcagcagacccagaacccctttctggttctcctccaggcagggcacagttgtttcctatctgagcaggctccatttgcttcacatcagcccaagaacagggaatgggaaatgccttgtgctgcaggagggaagacaaagtaagccagagagcacttggccatctggggctgggagcggaagagaatggaaccattctggagagccagacatttgttttgtagttgttgcctttgtgaatgtacatgtcctgaaaccctggttaattttcttgttcaaacattggtttaaaattgctggctctaggagagatactgtccttcagcaggttctgttataaactttgcaactccaaggtctgattcagcagcaagctggaaaagttcctggttgctaagagaccagagagcaaattagcagctcacaaaagacccagctaagaccagtaaaaaataagacaaacgaaaacaaggtaggaaatgggcctcctcaaaatcaaaataaggtaaacaaactggctaggaaaatgtctgattggaaaagacaattataagtattcttcatgctgaagtaaaatgcactataggtagctaaactctatctttgtctttttgtcacttgaagaaaacagcaggggagcccctttctagtcctgaaattccggatctatgagtcagagggaaaaacaaactgtcccagttgataaggaggaaagaaaaaagtgaaataggctgcctcttttatgagctctccctgccaggacggtgaatgggctacctggggtggtggcccagaaacattcctgcaagcaaacaaaagcctccccccaggaaaggtttctgatcactgctggtccaaggctcagccgcaacagagggctctgacccccacaggacttggccagacacttcaagatcccatctggcaatcaagcatgagaattcaggtacttgtaataagaaggggcaaagagaaaagtaccaaataggtcccaggtattaaatatttattttgttaaagtgcctctatagctatgatttttagtaatttcttttctggtcagacaatctagtaaaatattatattaaaattatttttaatcaaaaacagaaaaaagcatgccaatcacttacctctgatggaaattcattctccaagacacacagttttcctaagaacctactgcttagctggacaaaatagtaggaaaatgctccaagtggaaattaccagcctcttgagggaggagcttgaaaatcttaagtgatcacagaaaagtcacagtcatctgggttttggagaccagagaagaaatgaagaagggcaaaaaaaaaaaaaaaaagaaaaaaagaaaaagatggggtgtggggaggaagatggggaaacatggagctacaaattgggagaaaattaaggcagccagtaggcatatgtcagggagctatggcgtgatatgcctaagaactatgtgactgaatagcctccacttatcaatatttgttggacagcaaaaggatttcagaatatgatggatccaacaagcatgaaataatctttaggggaaaaaattacaattccccacatggcagcttccttcagatcttttctgacaatcctgtttgtcagatttctaaatcgcatgcaactgctatattttaggcagagctggtatcttcctggaaaaagaccgtcccaaatattcagtgcccctccctgcaggagaaatagacacctcctttctgatatatgcagctctggccaaatgacttgctttggcccatgaaatgtgagcagaagtcacatgtgtcactttggagtataagttttaagagctagcacgtggttctctggcttttctcttgctgtcacaatgaccagaacatgttccagatagtgccttatccaacaggcttggtccccaagagaagaaagcatggaacagagctgtggctggattgcagtggacacgtagcccagatgaaaaataagttctgttgtggagttacctgcaattgcagcaaaacctagcctatgtgactaatatacatggcccacgggactaaaaggtggccagagttgcccctcgccctcattcacattttctcactagctggccacagtctcaccttgagaggaaagtcattatgctccaggtggctttcttagaattcagatatgttgcctgactgacccaggaaatcagggctggcagccctgctgctgagcgtggttcagtacccaagaaacaggcaaagatggcgcacggagctgagaggagacagaaccatgaacttcgagttggaaatgccaggttggagctggctcaccagttctaatttaacccaaaaagaacaaacaaaaaacaaaacaagcaaacagaaaaaaaaaaaaaaaacactagaccttcttattcctacctttagaactttagagagtgttgatatttaaaaaaaaaaaaaaaaaaaaaaaaaggcaaacaaacaaaaaactgacccccaaagccaaaagaaataacatgtctttattgaagaaatgtccattcttccttcaaagcctctttcccttaacaaacgtggtatgcacagcaaaatggaaaagatgtcagcctccacagtacagaggaggtgagaagatctgcttcccagcacactgtggaaaggcagggcctggagcaaggctgtgacctcagctgcacatctgggtcctaagaccactggagggagctgtgctgagtcaaggttagagagcccttggcaagcagatccccggcaaggcagccaagtcaaagaggaagtttgaacacttaatgggacatcaaatgggattttccctgcaatctcagaacttctgctaaaagccctaaagtggatagcaataagtaaaagtgcccccgcagtctaaaaagaaagtgatcagaggatacctgcaggattttctcaaagatgagtgatccaatcctcccatcccacctccaccaccccaagagaatactagaagatttgcgagtccattgaaataggcgcatttctaagagtagggagttgtcagcctagtaggaaaggctagggtgtttctccatccctccctttccccatgaaggcaggaggaagatgtttctcccatcctcaagtgaggcacaaagatccaagagaacagcagggaggtcaggaggccttcgagagggagagagtgagtccaatacccagctgggtgctggctgagccacagaaaccagtaggctgacatggtgctccccagacaggagcttggggcttgcccttgcccccaggttctggaacagggaggctggcacctgctttttgtccagagaattgtaaaggaatgtaggaagctggctgggctggcttgcagtggcaagtacagagagggcatgaggtgggcatccctctcatctgggccacgtgaccactacggaatgtgtccctactctaggtctgataagacttcctcctaaaagggaagcccaggaactagaggcaaggtgtgggggaaggtggtaaaaagcagactaggccacctctccaaggcagacctagctcaggcttgagctgagggatggggaggggagaagcatagtgctgggtatgagattgaagttttgatttagcccggccacgacctttcaatgcttgaaagtgaggtgaggcagccaaaataaaactagttattataactgaaggtgaccaaaaagctgtgggctgtgcctgaaacaacgtcaagggatggtccagaaataaggaagagaaatgcaacagagagctagaaaacaatagttggagaaaaataaagccacctcctgattgtactccatggagtcacatcggtcaaaaaaccaattacaattggagggaaattcaccagagagagaagtgctgtctagagagtaactatgattggggagaactgcccaaagacattccattctccatctcattagagtatgcattctccagggtgtgaatgctcccaagtgctcccaagggggtggaaattggctggggtgggggtgtgaaaaatcttagatgtttcaaagttttatgaccctccaaagtttaatcctgcccaacaaaatagtatgtaattatttcttaatttatgtttactatacatttatttatcaatacatatcttatctctctataaatttatattattttatgttattatttaaaatagtgtttaggatagggaaaaaatgaaaggaagggaattttttttccttaggggaacaatgctgaagaaaagtctagaaacattgagttagagagaaacacaacattcaacctcaaaccagaactggtgtttggataaaatttttctggctccaagtagaattgctttcactgaatttgttttgatatcctaccttttgagggctttatcctctgcttcacaaggtgtccttttcatagggacccagaagagaacgttctttcaggtttcactgtaaagaaaagcagtgcttcttctggataaatggtttgtttatcttttatgttttatcttttatgagatttgttatgcacatctcaaattagatcaagtttccctctttgcttcagccacaggggagctcagggcaccttttgtaaccactgcaggactgggccatatgcatatctgggactttgccttatctgtgcttttagtatttttctacttttaactttgccccaattccctcaactgtgttttaactctttcctatttcatgtatttttataagccccctacaatcctttgtggaatatgtgggatataaatatgtaaagaggaacactacctctccttccaaagttttctttccgcccactcttattaagtctgtccttatacagttgcttttctttttaactcaatgcacaactaaaaggtattctattgggttttatctttttcttagttttccaggatattaagatcatcttgaaaactgattctgtaacccaacatgtttgccaactttgtgttatccatagtgttgaggaccatacctcccatgtcttcatccaagtcattgataacaatgttgaatggaacagggctaagacagacccctaaggtatgccactagagaccttcttccagccaatatcaatgcactaatcccctttctcttctgatatggttgaaccaacgattagcccaccacatttctgccatctgtcttctggctaagctacttggtcaaacatctctctgaccaaggagcctctgcctacagcattccttagacctgttactcttaatatcgctccccaaaaggaagtaggctgacactggatgccgggaactcaactctactgcaattgtgtggctgccacctctgcactggaaatttgatactggatcccaaaaataagaagcctgagttgccagctgcatgagtaaaatgaatacaccacccagagctatgtgtttccaaatcaaagtctaatgtaggttctcctcaccggtggagcctgggtcacatgactggcaccagctgcaaaaaatactaaaaatctcagttctctggattctgccttggagcagcagttcccatatgtcaggaactctaacaaggattagaatgatgctcaaaaagtgctaagcagtcagacatgacgaatgtccctagagcccaaatggtggggggacatggctgcccaatgagcccaggctccatcctgcagttctcagacccttctccaagctcctaggagaggaaagccagtgggctaaccttggacggggtgctttccagagacagtctcagctagtttgcaaggggtcaggcagtgctgtgaaggctgtcggtgccctcctgatgtcccctcagggcatttgatcccctcctggtgtgcttccacctgagtcagcaggcacctgagtctctgtgtcagaggactgttctcgggcagcctcagccctgggaattcacatcccctaagacaaccctcaatcaatatgattgacaacataaggattaaacattctccagccttctccatgatgaaacaactctgaagtgtgacttacaccattaacagacatcccctgtgggactcttccaaagttaccctcggggacactttgcttcatactcacttctttcccttctttcttccagttccctacgacctctggattttccctgggaacacacttcctaacactttcacacaaacctttgcctcagggtctgcttctggaaaccaacctaaaacaggaaaccatggctgccggaagtccatggtggtaaatcgggaattactagagaaggaatgaagagaagaccccaaacgtgtccgttgtccccctggttggaccccctccagaccaccttggttctgaatgtagaaacttaacctctaaatatctgcccaggccctgccctggtccagaagcagagctggaactcaaaaccagttttgctgaaggtgtgcaccttcccaacatccactggtgagaacatcccagcacactgctctgtaacttccagaattcattcctttcccctttttgaatgtcaagagctcatatgcccatctcatgtcattgagcgcaaatccctcccctataatttatcaaagattgatgacagtgactctgaaatctcatgtcaagtccctcccaggctgcacgacataattcatcagggtcagagccctgagtttatcacagctgctgctaccggctttactgcctcaatgcctgtccttgacttcaatcccctctttgcaatgtttgttctacccttttcaattggaagaccactttccttactggaaaagaaggaggtaaaatcatagttaggcagcacagccctcactttaccttcggcgaatgttaaatcattttctccacgcaaatctttcccttaatttttgcatgtagaacagagaacaatggggttcctcagagagttcagaacccctagctcatttgagacagtagattttcctaccccacttcttacaggtggggccacactgctggattcagcccttgccctctgtcacttaggggacgctgaaggctgttttacaaaatgtgaaccttcatggccacttctgaatcctaagccaactgttttcggacccaggctgcttcttctcctgctgacagctgtcactcctttattcccaaccacctctctacttaagagcctgactaaaagtttttttttttttttttttgagacggagtctcgctctgttgcccaggctggagtgcagtggcatgatctcggctcactgcaacctccgccccccaagttcaagcgattctcctgcctcagcctcccaagtagctgggactacaggagcatgccaccatgcccggctaatttttgtatttttagtagagaccaggtttcactatgttggccaggctggtctcgaactcctgacctcctgatccacccacctcagcctcccaaagtgctgggattacaggcgtgagcgaccgcgcccggcaagagactaaaagttcttaattatagtccctggcccatactttgaattctcttggcttttattcctgagggcaggcctcatgaaatcacccctttccatcactttaagggaaggaccatcctgcctcatcctcaggaagtaacatttttctgcaaggttagccaccaacaattgcctttagggtcatcaaatttttgagactctcaagcccagaagatgccctggttccctggcttctaagcctcttgcgtccctaatttcttactacaacttacccttccattcttgcactatttttttctaatctagctataagagagattcacttagtttctttagctaaatttccatttttcctcttcagctggatcaatgctattttaaaacaacaacaataccaggaagagtaaatgagaatctaacgaaaatagttatctgcagggtgtgaatagaaatgtagaaatgtagcaaaagggctagggatcggagggagacatcttctagtataccgtcttatatatgtttgatttttcaatcatttaaatgtttttacatgtttagaaacaaaattaaattaccaagagcgaaaaaaaactaaacctaaagatgagttttaacaaaagcaaatgaaacctaattctgtatcaaatcatatagaaaaattctaattcaaagaatttgggacacagtaccctgactatacacccttaatggaatatattctaaagagaataaacaccacaaagatgccttaaacctgactgagtaggtttgttcttagtagtataactggtgcagtaactctgaaatgatttgtgtgtgttgtagaatagagaaagttaatgaatatgttggcattttgagaaccaagttctcactgtgagagaaagaacacatgaatagggattgtgggaagggaaggaagaccctggggtgttggatttgaattggaagtatcaaagtaaatacaagatttctttttttgaaaaagtatttgctagctctatccactgaaagagcctagaaataacaatgctccaatggaatgagtgcaccaagcacccagaatttggttttttaatagtgttctccattgaaaggagccaggagccttgggagaaatgactgatccgattctggagcagagacagtacagggtaagcctaggatgtcaggttgcgctaaaaatcaagaaagtgctcaaattctaatggtgacatgtcaaaggagcacgggagccaaactgaaagggctcccaccaggcaaattttggacaatttgagttttaatatttgtaattaattatgacacatggattttttttaagttccccagttcatggtgatattcaaaagggtggggaaactcttcttcatgaaagaatgcctgttaatgaagtagaatgatagaattagacaattaccattttacaacgtagtgagttactcggctaagaatcatcggtgtattctgttaccattgaataaaaggttggtgagatattcatgcagttcaaatataaccccttcagattacttagtaagtaaaaaggggcaagggtgcaatggagaacagtggtggacaccacttaaccaaatgatcaaactcagcatctaataacgggaccaactgacatgaaatggcagccaatttctctacaatagaaatggcacggattcttcaaaaatctcaggaaggaccgagcacagtggctcacgcctgtaatttcagcactttgggaggccaaggcgggtggatcacttgaggtcaaggaattcaagaccagcctgacatagtgaagtgaaactccgtctctactaaaaatacaaaaattagccaggaggtggcgcacgtctgtggtccctgctacacggaaggctgaggcaggagaatcgcttgaacagggaggaggaggctgcaatgagccgagatcatgccactgcactccagcctgggcaacagagtgagaccctgtctcaaaaaaaaaaaaaaaaagaaagaaagaaaaaagaaaagaaaaaagaaagtcaagaagaattttaaaaaatgatctattctagactcaaggataataaagacacatgcaatgcatgatccttgaatcaaggagggaactacaaaggacattgtggggacaatggaggatatttggatgtggatagtatatgaaatagtgctatatcaatattacatttcttgaatgtgatatggtattgtgaaggagagtatctttagaagagatgtgctgtagtgtttaagagaaagtattatgatgtctataacttaaatgattcagattttttagaaatatatatatgctaggtgtggtggctcatgcctgtaatcccagcattttgggaggccgaggcgggcagatcacctaaggtcaggagtttgagaccagcctggccaacatggcaaaaccctgtctggcaaaaccctgtctgtactaaaaatacaaaaattagcccagcatggtagcacatgcctgtaaccccagctactcaggaagctgaggcctgtaaccccagctactcaggaagctgaggcaggagaatcatttgaacctaggaggcagaggatgcagtgagccgagatcacgccattgcactccagcctgagcaacaagagcaaaattccatctcaagaaaaaaaaaaaaaaagaaaaaagaaagaaacatagataaatagatagatagatagatagatagatagatagatagatagatagatagatgatagatagataggcataggcatagatagagagagagagacatggctaatgtaagtgaaacgttccaggtgttcatcgtactcttctttcaactcattcatagatttgaaactttttgaaattaaaaattgaagtaggagaatgctctggcttcacctcaaaccatttaagtcaaaatctctaggggtcagcccaagtttcttttatagcatttctccagaagtgtttactgtgcatccagggttgagaactactggcctacctgattcatgatgatgtccaggccctcagaccctgcctcagcccccaaggaccctgaaaataagtctcttaaaggtcacaggggcatctgagtctccagcaggcccttgcagccctgagtcagtagcccaggctaaggaggagagagtaaagagtcttcatagaagtgtctgcttagcataggaaccctgactgcttttaggtccttctggcttcctcctgccaggcctctcccttctcagaggcccctctgagataaccctcattctgccccttcaggctgcctctgaaaacctcaggcctctcttcctcctcccttgttcataaggcctccagcaagggaccttgcatggcacgccctcaataaatgagtgccaggtgagccgaggtgggctcactcacactgtgcctctctcactgtcaccctcaggggggaggaggaaaagcccatatcaaacatgggcaaagggttttactttgtccaaaaaaaaaaaaaaaagcagaagctgaaggtcaaagaagcaaagagagtgggaaggactctgttctttacaaagaacagagtcatgacacctcacactggacccttgctaggtgtaggtgctgtggccgcactgaatctgtgttatctcataaaatcaacagcctagccttatggggtgggtcatactgtcattgtcacttcacaccatgtgtccccagcatcacacagctggaacctcagcagtctcggaccaaagcccacacctctagccatggtgctagactgcctacataggacttaaggaggagaaggaaagcaagagccaatattgatgaggcgcctactaagatgatcttgttgaattctctctgcagccctgtgaagtcaatcttatcttcttttgatgaagctgagcaaatggactctgagataaagtaatttcattccatcatgttgaacaagcctaaaatgtatcatgatctgcattgtcttctgtatgaatggcaatctctggagttgtgcaacccaggatcaagagtgacttgcccagggctatgctgccagtaagggatggtctctggatttggaagcaaggtctctcagactttggcctccctggaaaagccctgctgtcccctcacccccaccacctcaagtgttctgttaccagacatctctccgcagggatcagaacctcccttctgcagggagaagtgagtcttccactgcgctgccatcaaggaggtgtcagaaccctgagctcttctagacagacctcagctgttgaacatgtgaagaacatgcctttctgcagatgatgaagtgggatgttggggatgagaaagcagaggcagaaaagtctgaggcatgccccccacaattcagcagactgtggggtagtggcactcatagctaggatgaccagctcatcccagttttctcaggactttccttgttttagcattgaaagtcccacatccagggacaaccttcaatcccagtcaagggagatggttaatgtcttggtcagcttgagctgccataacaaaatcccatgatggaataaaacaacagacaaatttctttctcacagttttccaacatcgaggtgctggccaatttggtttctgttgaatgctctctccctggcttgtagaaagcatcttcctagcgtgtgctcatgtgggctttccctggtgtgtgcacatggagaaaaagtaagaaaaagagggagaacaagagacaggaagaaagagagtgcgctcaggagaatgctccaacgtctcttcttaaaggacattaatcctgtcatgggggccctaccctcatgacctcatctaaccctaaatacctccaaaagtctatctccagatacagctacattggggtttcaacatttggattttgggtagacacagttcagtccacagcagttgaataacctacttgcagccaaatccctcttctcaacccctggtccccgagatgcccaaggggagaaggctatctattcttccagaaacccactcagccacaacagctagtagatgaataccttgcactggagtttctggttttttccagattccaggcctaaggaaccctaagtggtgcctggctttcgtttccaaggcagagtctcctaagagtgggctgggtagggagggtgatcctcaaaactcctagttgctatggataaggttctgagagaccacacatctgtacacaaagtcacacccaaatgcttcttttgtgggcctttccagatgccccagtcaagagggagaaaaggcaaggaggctgtgcatagaccagggctagaatcctggctaacactcacagcctgcataacttccccgtgcctcagctttctttcctgtaaaatggggatgcattataagggttagaataaaatgggtttcaagtgtttggcacctagtaattgttcagtaaatggtaatcatctttatttctctcctgcctaccttgcattccctccattccccctcccctacctttcccattttttcattcattcaacaagtacttattgaataactactatgctgtagtcactggggatgcaggagtaaataaaacagtttctccctccaagaaacttacatcacggcctgaaaaaactaaaagaaaaataaatatgaaaataaatatgaaagtgacattatgtgatggttcactttaggtgtcaacttgactgggctaagggatgcccagatctttggtaaaacaggatttgtgggtatgtctgtgagggtgtttctggaagagattagcatttgaattggtagcctaagtaaagaagatccgacctcaccaatctgggcaggtatcacccaatcccttgagagcctggatagagcaaaaaggtggaggaagagcaatgtccctcctctccctgagctgggacaaccatcttctccttcctttgaacattagagctcttgatccttgagccttcagactccaaaacttacaccactatccttccttctccctggtttgtaggcccttggcctcagaactataccactgggtttaccagtgaattattatttaccagtgaattataccactggctttcctgggtctccagcttacagacagcagattgtggaacttctcagcctccaaattgcgtgagccaattcccatgataaatttcctcttatatatacagatggtccccaaccttcaatggatcaacttataatttttcagctttacaatgagtttataggggtgtaaccccatcataagtcaaggagcatctggacttataatggttcgacttttgatttttcaactttacaagaggtttatcaggatattaaatacattttgacttacaatatttttgacttacaatgggtttaccagaatgtaggcctattgtaagccaaggaacagctgcatctaaatatatcctattggttctgcttctctggaggaccctgactaatacagactacgatagaggtgggaatggaggccagaggaggcaggagagtggatgaatctgcagcccagattcatctagaatggataaatggaaagggatgaaagggatggaaaaagatggaagccaagagagaaagagatcagaaacataaattttggaaccatcagagtcaagatagcctttaaagccagaagtagatgagatcaatgagggagcaatggtagacagagagaacctctgaggtctgcagggctccaaccttcagaggttgaggagacaaggaaggacccctaaaaaggggtcacagctagagacaggacattgagggagagggcatcctagaagtccacactgcagaagatctgaggggaaatgggaagagaggtctggagagagcagtgtagacagctcccctacagtggagtgtgtgcctgggagtcggcatcccagctgcaaggagaagccccaaacggtatggccatgtttcttttatctctgggtctccccaacacacagtaggttctcaatcaaaatctactgagttggcatcagttagatgtcctgtttatggctgaggcaaagtctggagatttcccctacctctcaggccctcgctgcaggcctctgacactccagggatagctggcaagcccacaaggcctccctgagggtccttctctctcagaaaatatcagcacatgtgtccagcagggcctttgatggcttcacacaagaggagagtcatgtgtgcattcctggctctctggacaagaaataaatgttcaggcggagagggagaacttggctgaagtggaggagggaattgaaatcactgaacaaaataacagcaacaccaataacaaccatttattgatctcctgttctgtagcagacgctaggacaaatgcagggcatttgttgacattgtctttcatctcagtccagttcagtccatctccagttacctggtgagggaggggctgcaaaccccaccctacaatgagttaccctgctgcctgaggccacatacacagtagctccaaggctgatgttcctcaaccactgtgtgaagatttatcattgaagaaaggagagatggaggtaggaatagcaaaggctaaagacaaagctaccccaagcagcagcatctccttccatgacttcaactccactgacaccaggctgacctgggctttccctttgcctttcccaccatcacctttgctagctggtgggactttcaggccaatgggttacatgtttagaaacaaaattgggcagtgggctggggccagcaaccacagaaccttcctcctcagccattgtcattaagtaggcagagatttcctgaccttgtcagtagccctctattagtccattttcatgctgccaataaaggcatacccaagactgggtaatttattaagaaaatgaggtttaatggactcacagttccacatggctggggaggcctcacagtcatggcagaaggcgagaggcacatcttacgtgacagcaggtaagagaggaagagagccaagtgaaaagggtttccccttataaaatcatcagatctcatgagacttattcactaccatggaacagtatcagggaaacagcccccatgattcaattatttcccactgattccctcccacaacacatgggaattatgggagctacaattcaagatgagatttgggtggggacacagccaaaccatatcaagcccctcagccaacattttcatggtggcagctgctcatgaagtgtaatctaaaaggacataaaaaacattcatacacacatacacacacacatacatacatatacacacacaaacattcatcacacactcaaaaaatctctcccattggctcacctcagcacctgaaattctgccaatttaaggtcctgtggagaccagagtagttgttatgtttatcaatatgtgtatactcactgcacttcagggaagctggagtttaaaggctggaggactaggaccaaagaaagaacagttgtgctggtggagagaaaaggaagtgagacaagctgagccttgccagagaaaaggcagccaggatagtgcagaagagggaaaggtggaggctcccgaagggatggaagccaagcatggaagaggaaaagagtcgggtctttttctgctctcctaagagttctggtttggtatcgtggttgcgagtgtgagatcaaacaaccaggccgggagcagtggctcatgcctgtagtcccaccaggctggtcacctgaggtcaggagttcaagtccagcctggccaacatggcgaaaccccgtctctactacaaatacaaaaattagccaggtatggtggtgggcacctgtaatcccagctactcgggaagctgaggcaggagaattgcttgaacccaggaagtggaggttgcagtgagccaagatcacaccactgcactccagcctgggtgacaagggcaaaactccatctcaaaaaaaagaaagaaaagaaatcaaacaaccaaggcccaaatcccagtggtgtcacttgctaattacgtggcttaggaaattactcaatcctcctatctgcatccttaaaatgggaagaatgacagtacacatcttgaagggtgatcttgaggcttcagtgaggtaatccatgcaaggaccttagcacagttcccagaattgaataaacacacagtaaatgtttaatattattattaatatttaactgaagtctgcggcctgtttccaccatcagctcctccagccatgagttggagtctgccaaggattttagagttcattgattctctggatgtgaatcattgtaaacagatagattggtgtcttctgtttggagacaatatctccccttcttccaatggcagaacatctggtgacttcccaggagataaaagggtggagtacaataaaggccagaaacctggttctccctgagggagcagaatgagaggaataggtcccggtggcatatgctgctttccttgaccttggcacctgttccaagctggcagagtgcagaggagggagcactggggacacagaaattggtgtaactcctacagacagcaatgtgctcatagctcaaaattttaaacgcgtgtccccttgaccctaaattttggtttctaggatttttttttttacagatatgcccccacatacaaaatgatgtaaatgcaaagttattcactgcaggatttgttatgacacagagactgggaaaaaaatctaaatgttcacactttactgaatatattatggtccatccatacaatggaatattatgcaacagtggaaaactgtgaagaaatgtctataaactgattatgaaaagatctccaagatccattgttaagtaaaacagcagggtccagaagaatgtagaaaaagtgagaaaaagtaatatgtattcaatatgcatagactatatattcaatatgtatagaataacaccaaaagaaaactcaagagatgataatattggtctctgaagaagggatccaagaagccaaaagacaagatagtcactgacttttctttcatatattttgaattttaaaatgctgaagacaactaaattttgtttacaagcacgggacttggagtcagacagacccaggttcaaaacccagatccactggctatgtgatgttgggcaggtcacttcagatcactttaatctctttgagctttgtttcccatttgtaaaacaaggatgagaataatacctatatcacagggtggttgtgagcattcactgagatggtatttttaaaaatatcctatgtggagacaggcatggtggctcacacctataatctcagtgactcaagaggctgaggcaggaggatcgcttaagcccaggagctcgaggttgcagtgagccaagatcacaccactgcactccaacatgggcaacagagtgaggctgcctaaaatagaaaacaaaacaaaatggggaggtagctacagcaaagatgacttttaataaatttttgatgaatctgcatttattcccttctatatgcccaggagagcattataaggtaaggttcaggattgccagtagatggaataaagagaaatgaaagtaaatatctatcttacaaggagtggagggtggcaggtccctcagtgcatgtgtgctgaggaattcgcatcactcacatgtgctgaagagtccatccagctcaccgtttataatgccagggtttgcggggggcagtccccatcaccaggtcattggatcctcactgaggaccctatgacatgaacaagctggagactcctggtgccattttacagataagctctcccagggagctgcatgatgggcctaatgttattaatcgaacagacatgagtggagaggcagtaggtcagtgtgaagtgagcataggttctgggaagaaaacaagttctggttggccatttaactgtgctgagcctcagctcctgcagccacaaaagggagatcataacaccagctgcaaaatgttgtgtgaatcagagcttcaggcactgtgaccaagacacgggaaagctcagtcaatggaagctatgattatttgtgtgggattatgattggaggaaggcagtggggctgtgtgcccccaaaagtgccttaaccactcaaaaacagaatctctgccatgaaggagttcacagtctaataagagaaagagacagatcatctctattcaataaagttccccctaaataaaaatatggtttacatcagttagaatgacgatcattaaaaagtcaggaaataacaggtgctagagaggatgtggagaaataggaacacttttacactgttggtgggactgtaaactagttcaaccattgtagaagacaatgtggcgattcctcaagaatctagaactagaaataccatttgacccagccatcccattactgggtatatacccaaaggattataaatcatgctgctataaagacacatgcacacgtatgtttattgcggcactattcacaatagcagactttgaaccaacccaaatgtccatcaatgatagactggattaagaaaatgtggcatatatacaccatggaatactatgcagccataaaaaaggatgagttcatgtcctttgcagggacatggatgaagctggaaaccatcattctcagcaaactatcgcaaggacagaaaaccaaacaccgcatattctcactcataggtgagaattgaacaatgagaacacttggatacaggaaggggaacatcacacaccggggcctgtcatggggtggggagcggggagggacagcattaggagatatacctaatgtaaatgatgagttaatgggtgcagcacaccaacatggcgcatgtatacatatgtaacaaacctgcacgttgtgcaggtgtaccctagaacttaaagtataataaaaaaaaaagaaaagaatgttcaaaaaaaaatacggtttacacaagtgtattcctgtatatcatggtctcattataggtgtagtgccaggtgttcccatcggccatgattaaaaatatcaagaggtgggtgtcaaggagtggaagggtgggaaggccggaagcaaagcagagaagtttgcaaagatccctgcaacgataaatgaagatggggaggagtcaaatggggcctccaaggagcttcctttgcgaggcattggtgaggagggagtgcagtgagctgtgtacgagaggctgaagcagggacctgggcctagggcaccacagcaagcatcttagggagggggctgacaactgcagccccaggtgtgctgataacatcacatgctagtcctactttcctactttatttttcttgcgaaccttaattattccagagactgagtcaacaaacaaccctgaatcataaagtcaaaaggccttcacaaaaggatgctgatattagcacattgtgaacttactctgttgggaatgcgatctttcagaacaacccaggagcagggtactattttcatcccacccttctacagacgaggaagcagactcagaaagattcattcatgtctgaggtcacacagccagccaggggcgaagccaggattcaagccaggtgtgtctgatgaaaacactcctgctcttcctcacttcactgtaggttttgaacatactttttttgctgctgtgaaggaaaataaatgcagatgtggcagcagtagtatatgaatctatgcatgtgataaaacgtcatagaattatgtacaaggcatactaaaaaaaaatgagtacttgcaaaaactggggaaatccgaggaagatctatgatctagttaattgcattgtgccagtgtttgttttctggttttgataatgcactgtaattagtcagatgtcacctttagggcaagctgggagatgagtctacagaagctctctttttgcaatttcttgtgagtctatgcttttttcgaagtagaaatctggaaaaaatacatgtagaaatctcctgttgaaaatacaaacagggccagagtaggaccaaggagactcaacagctcctagtaagtaaagaacagcaccagggcattaccagggcagtaggagccttcattccaaacgttaagaattacaaaatgatacagctgcccccttacttacaggactcttgtatagctttattttagggtaacccaagttttccagattcacctggctacagggggggctcacctttacagatatcactcatgtttcaccaatctttcccctccttgctatgacagagcttccagcccaccccaaacctcacccacccagtcactgctggggccctctggaggtgtctcacacaagcctactggccagatgctgtagtctgctgctcacctgctaccctgtctgcaggtgccctctgtgcccagaaattccagggtgttgcgtcagcagggcccctgtgccaggcacagaggtgactagggtctgtgcccaagaatggcctctggatcttagcaaaccccaacccaattccactggactcccctggcctgaagcttctctgcattccacacagaaagtgggtggatgcccactgaaggtcaatcttgattgcctggcaccaaagcagggcagcatatgtccaacagagccctcatgaaaactgctcccaaatcctccactctgaggtttagagatgtgtgcaaggttttgaaacacaaatgcagttacagtaagagctaacatttactgagcatttactatgtgccagaccaagcaattcacatgggtaaacttgtctaattctgatagataggtaagctgctgccacaaagagacccatcaataataacccagtggcttaaagaagatagaaatgtagttctctctcacataatctgagggagtccccctggtcagcagcagctttgcttcaggcagagtccacggcccaggttctttccatcttgtttctctgccatcccccaaaacgtcctcagcctcatggtggcagctgggtcattgccatgcctgtttgcagaccaggaggagagaggcagcaggcacgaggcatgctgatcgccccacatcactgggcctgggactctcatgcaccactccactcacattctgctaatgagaacattctgcaggtgagaacttagttacacaggctcacctaactgtagggagtctggggagatggggatatgtgtgcccgagcaattcttttacagtgaaagaagagaaaatgtgttctggtggaccattgtccctccaccacacttcctcacaggtatgaccaaagatgttcagaatggttaaatgcttgccctaggtaaaaactatctaatctgataagttaattttaaccagtgaagtagacctggacccctttcagataaaatatgcgttttgtgtgttttaatagggatccaatggagatgcaaaacttaacccagaagcatagctctagcgggagatacagggtcgggggtttggcagggctttttgagtggcatcatagtccgggctttagaacggggagtcttgaatgagtccaggtccttcatatgggaaaaccactaaaaatctcagccctcagctctgagacagaatccagggtgataatggatgtggcacagctagtgagctgcaagtggctgtcacatgtagggggttattttttatctaaggggatctgcacatcccaccaccaaagctgccttttgggaaggtaacaggtgaccctgtccaaggtctgggctgaggatgaacaagtttccaaaggtgagctgcaaggagcttgacaggagtgtgtgtgtgtatctgtgtgcatgtttgtgttcgtgtgcacacatttgtgtgcatgtgtgtgtatatgtgcaaatgcacacgagcagcttcagccagctgagcagccagtcatttattcatatggatgacttgatttttgattgagttaacaagtacttattaaacacagttttgcaaaggcctgcagtaaattggaagctatacaggaaccctataagtttttacaaccctgcattcttcaaatattggaataatataaaagataagtagggagtaagaggaaggaagagcaaacactagagaaggaggagccatgggaaagtgggttagaagagaaggaggagggttggttgtccttctggtttcgaagcaccagtgggtccattcaccaatgaatacaaaccaacctattgtgcaaattattaaactacatcatctgtcctagtctgagctaatattcactacaatggctcatgttgctgagtgcttactaagctccaggcactatactaagtgttttatatattctatctcatttaaccctgactaccctgaggactggcactattattgtggctctgttattagcctattttatgggtgcagaaatgaaggcagacagatgttaagcaactgactcaaggtcacacagctagtaaactgcagactcaggcctgtctgattcctaacctaaccaccatgtctaacacttgttgcccataggcctcagtctcctcgtttgtgaaatggaaccactacatccagctttgcttgccctatgggctgttgcaaggatccactgagaagtgattgccaaggtgcactgtgaacttacaaaacctaatgtaaaagaatcaaaccacattgctccaagttttgctaagatgaatctaccttaggatcatctagagaataaaacagttactagcaaccaagattaaattaagcctcctctgtttggaaacaactttagaggaaggatgttgttgatttgcctggcagagaatggttccaagcctaagagctcacagttgtttttatcccaaccgccttatcagaatatttaggaatcaataatgtagtggcatgctctgaggattctcaagaagtcctatggcgagccccacatgcagaaaaactaaaaacccctggtcaataatcaacaccaacttgccagccattgactgggtcactgtggaagtggatcctccagccccagtcaaaccttcagatgactgctgcctcatggagtccctgaaccaggaactgctcctgactccttgagccacagacacagtgagagattataaatgactactgtgtgaggccactaagttggaggggttggtaatttgtaatacagcaatagataattcatacagcacctatgataccttgtgacttaagtacaaggttattgggtattaaccaaaattctagttttcaagcaagagaaactattctggtacatgtaagccaaaggggaattttcagggagggcgtcagggctcatcaaatccaagaaaagactggagactcaagtgtaggatcctctggcaacagaactccagctccagttcagggagaggaacagccaggtttccacacctccatggctccagagagccactaatcattccacacatcttgatttagtccgttcagactgccataaagaataccaaagactgggtggctcaaacagcaaacatttggttctcacagttctggaggatgggaagtccaagatcaaggttctgacagatatggtggctggtgagggcccttttcctggttctcagaccaccatcttctcattgtatgctcatgtggtaagaagcagagagaaaagaagcaagttctcctgtgtctcttcttataagggcactaatgccattcatgaaggctccaccttcatgacctaattacctcccaaaggccccacttctgaatagcatcttattgagggttaggattttaacaaatgaattttgggggcacacaaacattcaatccatagcacaacctccgtgtactcactgaggattcagtgtctagagtgacagagacattgatcatgttccagccccctgactgcaccaagggtgagagaaagcatctgccccttggtattatttccctctgagacaaatcccactagggaaagatgattcttgaaagcaagtcatggtgcttttagagaaggggatgggatgctctgcagccaacatcaataaatgcccagccagtggtcattagatggtgttacaaagaagaaggccttgaataatactgaaccaggctacgtgtaggctgtgggctttatagtcattaatcctcacaataatcttaaaaggaggatgatattatccccgtcatccagacaaggaggcagaacctcagatacattaagtaacttgccagaatccacgtggaaagtgatgaagctggcttctaagttaaagtctatggggttccagagtccttacttgtcccacataaccaggcttccaagaagggcctcaagggaatggaaccacattcttgctttgatgaagtcaaataaattaaaaagagtttattaagggaaagagacagagactgaagtaaagggttcacctgatcttctcccaaggaagaatgtgcctgagtcatatctgactggcttgacccagaaagaagagggtagtcacaggcagaaaggaaggacaacacaggcacacagagacgggcggtctccagaactcaaaacttcccaagggtttacaccctgtgtactgaacatggtccgcttctgccacctagccacagatggtctcctcagccacagcacaagaagcccaactgtggtgaaagcctgtgggtgggtatgcagcaagcacaagccacatgtaaaggctttcctggtaaatttccaagatgaccaatgccactgagtcctcttctctgtcatgtgccttcttcatatttatccgagattcccagggacaggatggccagctcctcctttagattagggagggtgggtccttccccacccccatctatactctctgccccactaaagaacttttctataatcccatcttcaccatactcagcatttgccaaatattattcttcattttctaattgtgtcttttctagtttgtttggaaatgaaatctggtttcacctgaaggttgagagctaatatgaagcatattcctgcccttgggctaatatctttatgacatcatgacactaaccagctagaactgacttagtttttgttggccagaagccataacatctctgccaacaagaaactagcataggctggattaaagtcagcatgagaaagattacctgaagataagaaaataaatgaaggcccaccatgcttctaagcacatagtaaatagtcaaatatgtgcagaggagatgcataaacatatctgtgcaaggctttcaaaaggatcaggaagacaggtctcacaaaaaaagcatttccaggctttgtattttacagaccaatatttttgtgttttgttttttattttggggaggaaaatccacacaggattattatctttttactttaccaagtagagacattttaataaagctttaccatcctttcataagataatagacctgttaacacaagccaagtatgaagtataatcacagaataaaggacagtctttccagggaaaaatcatcggcacactggatacgggtctttgttttacactatatagtccctctctggctagtttaagcacaaacaatatattatggagcccagatagatagttcacaaatcactggaaaggctgtagggatatactccaagttgaattccatattaacaccccaaactatgccacgtaacttaccactgagggagctgctgccacagccgctgaccactctagctcctcaaaatgagcaccagctctgtgccctgttcagctccctccattattccaaattacccctccatattccaaatcaaagtcctgcatgagtcccagctgattggctgaacctaagcatatctagatccccatctgccaaggagtctgggaaacgtagttttagttttcagcctctgcagtacagggaggcacaggggctggagaaggcatggagtgaaccagttagccactgttggtgagctttttgtcagaccacagcacttctaaaacatgtcaaggtctaagcctgggttacagaatcacatttgggtgtactggcatgagagccatcctaaggaatgtgtgcagtcacgctttattgagaagattctgaaggtcagtggtcttacacaggcaccttatcaaggttctgacagatatggtgtctagtgagggccctcttcctggttctcagaccaccatcttctcattgtgtgcgcccatgtgataaaaagcagacagaaaggaagcaagctctcctgtgtctcttcttataagggtgctaatgccattcatgagggctccaccttcatgacctaattacctcctaaaggccccacttcctaataccatcttattgagggttaggattttaacatatgaattttaggggcatagaaacattcaatccatagtacatcctcagtctactctgctgccagaaccttgatatggcacctactgagtgaatggctgttcttaagaagggaatttgctgcctgaggctacagcatgaccacactctgactgtagtagacatctgtcatatttgtggcttctcatcaacttttgagtagctttcccgtatctggggatattctcatgtaataagtctcatctccctaatattgaagtcagagatcgagtcagagttcagagcgttcaggtgtctttgcagctaagattcagggatgtggtctgagctctcacaacccaaggcctccactagagatttgattcagaagtgagtagcataaagagcaggcagtgcacggagcttctgtttttgctggcatggaaggcagcagaggccttagctttcagaagtggtggtgaggggccgggcacagtggctcacgcctgtattcccagcactttgggaggccgacgggggccaatcacgaggtcaagagagcaagaccatcctggccaacatggtgaaaccccgtctctactaaaaatacaaaaagaaattagccaggcgtggtggcgggcacctgtagtcccagctactcagaaggctgaggtagcagaatggcgtgaacccgggaggtggagcttgcagtgagccgagatcgcaccactgcactccagcctgggtgacagagcaagactccatctcaaaaaaaaaaaaaaaaaatgtggtggtgaggtctggttcctgcctcagaagtagcatcagtggtggtggcaagagtggctgcaataaagtcaagttcctggtgtccagtgctcagtagcagcagccatagtaataccagtttccctccatgatctagccctacagcacagtttagggcattgttcttggaaactttaccccaaatctatttctccaccctccaaatgattgtttgtccttcagtttcctttattaaatcccatctgcctcaactagccagagtgaatcctgttgtcagcaaccaacaacccacttgatgtgctagataagccaggaacactgaccctgaatctactgcctctacaccaggctgcagtgtgaaccatttctgcaacagagagtatcggcctgaacctcatctcccattgccttcttgagtcaggtacaaagaaggatgggaggaaagcgtacttccttctgactcccagctttccaggagctcctacagaacaagaatgtttcttcttcactggattgttatcaccaacaatttgtgcagggcttagcacagagtaggtattcagcaaatgtttgacgaattaataaataagtgaatggtaaaaacactataaagttatacccagctggattcctaacccagatctgtgctgtccattaacagtacccactagccacacatggccactaaacaactgaaatgtggctagtgcaattgaggaactgaatttttattttatttcagtgaactaaaatttaaaaactgatacctaatcccatttttggaaaacttttggctcatttgtgtatgtaaatgtacattttagctataaattgtataaaagctgaatacagatgaaatctttccaatgaaaaattagcatacaaattgagatgtggtgtaattgcaaagtatacaccagattccaaataatataaaaaagaatgtaaaatatactattaatgttatattgattacatgtggaaataatattctgaatatattaggttaaatgaaacattaaagttgacttcacctatttctatttacaatttttgatgtgactactagaaagtgtaaaattatatatgtggctttcattgaatttctgttagcacagatctgaacattagcataaatattgctcagtggtcaaaggggatgccaaggacacacatttcctctgagcactagaggctccaaccccacagacctaggcccaaccttaccctttcatttccccatcgcctttccccagactccaaatccagcaggaggaagtgtagacgtgggcctctgcaacatgtgaaaaagcagaaatcacaaacgcagtgtttttcagcaggtgatttaggcaactcttcatcagggaaagggctggaagtaaggccacaagcagtgatcaattgtttgctatttgaaggcaattcaaaaagaaaaaaaaatccccaagtgaacgttccttgggtgaccagtgtgccacctctgcataagtctatgaaatcaaaggccctgggacagcctctaatatggtagcttcattccaaggaagagtttaaagcacaaagaagagctgttctagttagtatgagtcagggctaaatgttaagtctcctgatgctcactggggcacaccatctctcagcattaggtgccaatacataacatgccaaatgggtttgatgtgagaaaggaagtgtctgccttataggaatcacttggcctgcatctaccccaggatttccaagcctccctttgccagcactggaaacgcattttgagaaattggagttggggccagaaagcattctattcccatcactggaatctgtgtggcttctatttgcaactccagtagatgtgaaactcttaaaatgattttttccagggtaggaaggaacacaatgatgtctttggctaaacagtgccgggctactgcacagttcaatcctgagctaagtgaagggggaaaagtccggggcactaatctggcgtgactggcagcacccgatggggtaaggaggacagatgagaagggtaggagaggactggtggggataggggaacagggaagggatggaaaggcctgcttctgaaggcttgcatctaacagaaaaggaagggaacctccctgacttaccatgcgggacccaggtaattttcatactggaagcacaatctacaaaatgcttccctccaacccatccccataggtacaattttaccaaataaaatcattcatactcacatccaaatttgccaatctgagcaaaatatagttagtaacaaaggaaggcaattttcatattttatcattcatcatagaaaaaaagctttaatattttttaattaaatacagaagaaaattgtgttgccagagagattgtttgcctgcctttgaacaaattaacaacacctgtttgcaaacaaaagaatttccagaatggagtcaaaccctttattctctgttcaggacccagcccattcatgtcttttgtatacagtatcaaacacatagtaggtgctgaataagtatctgctgactgaatggggtgcctcttttatccctatcctttatttcccaaccctaaactggatcttgatccatggggaaaatatccccacccatccattcctagagtagccctgtctctttcaacagtctttgatacataacattggtttagagacatatgcctgaagggaaaagagggagggtttcaggcagagaaagaaacacacaaagacagggcacagagactaggcagaaacaaaaagatctaagacagagagagagagtaactgaaacacaggtgcagagcgggaacaactgtgggagacagggacagaaaaaccaagtcagagaaacttaaaacgcacaccattggagataaagagataaaagggctgggccagaatgatcatcttgaagtttctactcagctttaatgttttctgatagagaaaatggcagagagagaggaagacacggcctaagcaggaggataaagagacaaaggaagttagtagaggcagaggcagccagccaggcgtgcctagccgggaagcctggtcctaccccggcctcacacccacggggatgggctcccatgcccactttcggctcctaccttaagtccagccaccctcttcccctacccgcccctaaagatctccaaaccactcggcaaatcaaatcctctctccccaacatcctccgtgaagcattctcgctgctccagcccgcactcagctcttcccctctcaactcctaaagccacacccacctcccctaaccacagggcagggctgttttcgagtttgcccttggctcctatgagcacatcttgactcctgcaaaagaactgtgtgcttgtcagggctccagaccctacctcctatattccagtattcttcatgacaccagcccaatgcccggtcttcctaagtgctcagtgaatactttagggcctgaccggccctaaagtgcacgcggggaccgtggccgtcccctggtcagtttggcaggctggccacgctgaggccatctcctgggctcctgcgccctctgccggccaggaggggacccgcacgcgggacagctcgcggccggaagggcgcgcctgctgctgggaggctggcgaggacgcgggcggccctggcaccgtccgagggttctgggaagggtggtgggcacagccaggaacagctgctgtgttcctcttaggcgtaggagaacaacccctctcgcccctacacctcctccggccctgcccgctgggcgctcagagcttctcgtccagctccaggccctggttatcccgggcgcccccgcgctcggggcctgggctgccgccgtgtgtcccactcaggtagttctggatggcggaggcgcagtctagccgctccatgacggtcatgaggtagtgcagctcctgcaggctgccgttctgctcctcaaacaactccaggatggccgctgcggggctgcgctggcaggacaggaacctggcccgaggtaggggaggaagagaagggtgtaggagcagggaggggctccccccctgctgcaggctccctgggctgcgcagcgcaaggtccgtcccttccccatcctgtagcttttgtccttgtcctgctcttgcctgccttccagggcacaggaggtgggaagccccagggctttgaaacttgagattgtcctggcttggaggccaactctgacccctactcctctctaggcttcagtttcctcttattaagatgagggcttagacaagaggacctctaagtttgctacagttctgatgttctgtaattgccttctctacctcccccactccaaatacacccctagcctccccctagcctcctaactccctccttcctccctctctcctaggccacaacatcctgctcactactaaggaaacagttgctgtaaaccatggctttttatcacgactctcccgtccactaaaaccttccagagtctctcacctcctaaccagcccacgctccatgagcctttctggctcatccagcacctggccttgccctgtctttatgctttctctcctttctcccatcctgaacccccttagctcaggcctctctctttctcgccttgcacacactacacccacagccacctctgctactccccaaaacaaaatggctgatctcttccccatcacttcctccctgaagccctttctagttcacccctcccaggtggaagagaacattctgcatccctcagttcagacttctggtcataacgcccgcagttcattattattcttgcttcagctgttttctgtctctcttcaatgtgttatacaatactggattcttacaggaaggcacaaggaacacttgcctttatttttcaagctctctgaaccctttactagtgtgtgcgctcctaggcgccgggaccatgcctcattcatcttgtatcatagtgcttagcacagtttccagggcataataggtacttgataaatgtttaaatgaatgatttaaaaatccaccctgtagtttgcagaccagcctggccaacctggtgaaaccccgtctgtactaaaaataaaaaattagctggacatggtggcgtgtgcctgtaatcccagctactcgggaggctgaggcaggagaattacttgaacccgggagatggaggttgcagtgagccaagattgcgccattgcactccagcctgggcgacagagcaagactccgtctcaaataatgataataataataaataaaaatccaccctgttttcagggtccagctctagccccatcaccaggataaagtcttccctgaccgctgcactcatagtgtagtttctggagcttagctcagtattctcctgctttctgagttccttgacagggatcatgactgcactgtcaccattattgataacatttattgaattaacaagtgtcaggcacccagctacatgctttacacacattatcctataatctgtcttgctcctcctcagggcatagcatggcaagcactcaacatgtaccaaataacttccatgttaatggattcactgttaaatgttaattgagcacctactatgcaccaggcatcattctaggtactgatgatacagtgattaatagagctgcccttttatgggaaatagggtggacagtagccattctctgacttttaagtcactcccttgcctgtgatccagtctccagagtgtcctgaggaaccccattccagcccaccctcctctaccatccacagacctcacccctcttcctaccggatcttcatgccgcaaagccccaggtgggaggccagtctgcgccagtcattgccggtgatgctgtttggctccaataacatccgcagctgctcaaagagctctgggggcagccttaggcagggaaaagggtgttcttggaagaaagggacaaacagacccactctggttctcccatatgcaccctaaatgctgtagtcaccctgtgggtgccagggtaggaacccaacatcccccaggcagcagcccaagcaacccccgtctcacctattgcatgggggcggctgggaaacaggtggtggcgctgcccaggattcctcctctgatgcctggaatctgaggatttccatatacttggtctccaagccctgagtcaacacagggcagggaacacacttaggggtcacaagccatccccctgagtaagaagctggagtcctacctccattcctcatgtctctccttcagtctgtcactcagagccaccttaccaggagatacaaccctgctccacccagcaccctctacccactgtctccctgtgacttcagaaccgcaccttcagccttatgtttgcccctgagctctttgggaactgggacatgaagaccagagtgcagcctgagccaccaggggaagtcctgggtggggccgtggagcagtgggaggtcatccaaccatagagacactgatctcagccatatgtgtaccttcctccattccaaccttcccttcctcttctccaagtgacaacagggtatctgcctgccctccactaaggtgccactatggttccccaaagactctcaactccgatttcttcgcatcttcccttggtgcagcaggagaggagagatacctaactcccagcctgcctactcaagaccctcttcctggtcacttcccacactgaaaatacaaaacatcatctctcaaatcccacactgaagataccaaacatcatctctcaaatgtagacaatcagcctagaaagaaaccatatcaacttgatgccccagttctctgagttgggagaaggggttaaactagggtttggttcttttagcttcctgctggattcatccaccgatagacaaggagagtcagggatgagggtaacttggagcccagatgatctcagcccctcaaagagctggtatgggggctctatggaaagtgccatctttacctatgtgattaagaccatagttactgggcaccagaccctgtgcccactttgcctaggatttcccccaggccctgcccttcctctgcccctcagctccaactcacatcctggaaggtgtgcatggtgacaatgatctcattggttagtgctgaacagtcctcattctcatcggctataaagagaaggtgacagcgtggccagtgagtgaggaaacggcctggggtaagagcaggagaaggtaagggactctatagtaagacttgggaaatctgaggaagctggggtccaacactccatttttctctctgcaaagatctgtgtggctcctggcctttcagggaaggtctgtgtgcatggctgcatgggggtctgcagagctccagggttactgggagggaaggagaggagacaggatgggaaaagagaggggaggaggtacacacagggctcccggactacctgcttttctccggaagcagaaggagcggaaggggcactttccatgccagatgtggagatggggaaccagctggcaactgctgtcatccacattctcccaacctggtgagtaggcagacagcagagggcctcagagagtggggccttaaacaagtattgaagggggctgtggggaggcatgaggacagaacaaaggcaggagggtctcaagggaatgggaatccccagagcctgggctgggaccccaagagggcccttgcactataaaagccttccatcctttcctgcttctgtggggtataacccctctccttcccacctgccacctggcatcaccctgtccaaggagtgagtggcaagggctcagtagacagcagagtggtcaaagccctgggggctccatgaggctactgctggcccagaggtcacaaacagacttggggcctggtgtggtggctcacacctataatcccaacactttcagaggccgagacgggtagattacttgaggtcaggggttcgagaccagcctggacaacatgatgaaaccccgtctctaccaaaaatacaaaaaaattagccaggcatggtggtgggcacctgtaattgcagctactcaggagactgaggcaggagaataacttgaacccaggaggcggaggttgctgtgagccaagatcaagccactgcactccggcctgggcaacagagcgaaactccatctcgggaaaaaaaaagagagagagacttgggatccccagatctccagatgtccaggggaggcccagaacccttcattcctgtggggctcccgatcatcctatcccacaggccactgcctccctcaccctctgagatgtacgtgagcttcaggcactggtcgcccctagccccattgaagtcgaagagctggcagggcccacgcaggcgcccaccatggggctgctcgttggtcagtgcccactgcagggcgcagggcgtgttgttgaggaagtagatacgcagttgcagatgggactgtcctggcaccagcggtgagcagaatacggccagctgcagccatttgcgggcttcgcgccccacaggtgcctccagcacacaggtgtagaggctgcagagggagccagtggcaggcactaatgtgcagggaaggctaagacaccaacacactgccaccagcctcctgccacctgaggggcctctgtggggccttcaaggaggttcagagaacactcgaggggagcacttagggaggaactggtaggttggggatgaaaagtgagcatgtcacagtgactggtgactgaatggggaggagagctggcaggggagagagggaaagtgggctcagggtgaccatgcttgggagggcacccgcacatggccctattcctgtcaatgggtggcaaggaggctgggaggcagaggacctaggactctagaaagacaaagagaagaaggacagagatggaatggagtcttagagaactggtgctaagcctggggacagtcctgaaaggggcacagtgtagagagagataatttgaaagacagagagagatgggaaagacaggtccctcttagatggagagatggtgctgagtcagacacttccagacagacagagagacagcaatgggatttgcagtcatggacatgattgatgtgagaaaaactgctacaaacattaggacagaggggccagaaagagacaccaggggataaaggatttgcagaccatcttctatacagagagatgaagataaggcagacagagaaagtgggcaggaaagacagtcctcagagagatgggtgtgggaagacaggccaatggcatgtgcctacctgaagtgggagaggtggatgcgacactcatcccgggaggcgtgggcccccggccgccccaggggcctccataccttggcatccagcagggtagtgttgctgctgtaggtgcgagcatggctgggctgctcggcacagtgtttgaacgtgagagtgcaaggcttcaggaaggaggccccatgggggccacatgccaccacagggcttaccagcccctgggcttgggacagcgatggggcgtccgacaggtcccacaccaggatcaaagacacccgctcctggcggcccacagccacagcacctggcagggagagggagagctgagatgggcctggtaggcaggcacacccctgcccctgaaagaggccaggccagagagaaaggaggtggggcaggagcccaggagagacccccagcagggcacacagggaagtggtatgaacaagagtaagacgactgtggagctgacttgtagtgtaaccctaagcaagacacttccctttccacccaggctgctgctagcccatagtgtgccttgtgtgaatttgcaaatggtgctcttccctccctttactagagaattgtcacagcatactgattcattagaacaaggcactttacttccacctgccaggaagttgtcccaaaagatatgtaatatgtccatccctgaagtcaataaagctatactcaaaatataaacaattatcagaagtaaaaggtgtctatgaacattgctccctcagatgtggtgacctaatgtacagtctgaccaactgtatgcggagatgagagccaggagctgttacctggtgggatgagcaaggagatgcctgtatcctggagcatcaggcaaccgccgcggtgatccacctctcgagccgaaaacaccaacagtttgtgcatcaactggcggaccatggtctggccttgagtgggtgtgtgtagctcctggtagaaggcaaccatctctggcagtgtggctggcaggtgctgccttgagacctcattttctagttggggggtaggctgggacactggttcctcttgaccattcagtgtccagcaggcccccagcagccttctagggcagtgccatcgaaggcattgggccagaaggaggacacttgccactgggacccccaccagcagtaggaactgggagggttggaatgaactctcctgggggcacattcgcctggttactcaatgccgctggctctccttcacccctgtgccagccaaagccaaaggcctggtggggaagaaggggtcagtgtcagggtaagcccttttaagttgtggaggtcaaggcttggcttacacatagctgcaagttgtcttcattccagcgcacactgcacactttagtcacaccaattcttttaacctgtctctcttactcgagaacctaccctggctccccgtgacctaatacatcaaggtaaactgttctgaagcagagtgagcttgggtttacagttagagaacatgagttcaaatgtcaccttggtcactgtggctgggtaaacttatcatattgatgtaaggcaggagagccccaaaattggggcttagtttgggagggtttgtggcttcacctaggcaagaattcaagggtgagccagtggtgtcagacagcaactttcactaaagtggcagagtatagcagcagcagaggtatgctccttacagagcagagctaaccctaggcagtgtgcccagggtagcagctctggggcatttctgccatcatatttatgtccacttttaattacatgcagtaaggggtgggttattcagaaatttctagaaaaaggagtggtagcttcgggtcactgccatggaaaggggcagtaacttccaggcatcgccatggcagtggtaaactgtcatggcactggtgggcatgtcttatggagaggtgcttttggtgccttttccctgtttcagccagttttctatctggcctggaatcaaatcccacctcctgcctcaatactgcttaatgtacctcagtttcctcatctgtccaaatatctaccttgatctacaagtgctgatacaaaaaaatctataagtggaaaaagcaagtcgcagagagataaaatattctgagctcattaatgtgaaaaacaaaactgcatataaatagatacatatttatgggtgcatatatggaaatgtaaaggtatagagaaaggtctggagcagtggtgtacaataaaaatgtaatgtgaactacacatgtaattttaaatttcctgatggccacattaaaaagaacaggagaaattaatacattttatttaacccaatatattcaaaatgttatttcaacaggtaatcgatataaaattatgagatatttttactttcttccttcatacccagtctttgaaatccatgtgtaatttatatgaacagaacagctcacttgggactggctgtatttcaagtgcccagtagccacgtgtactaatgaatccggtcttagactgtgcaggtctggaaggacacacccccaaactattcccatgagtcacaacaaattgagaaggtggaaggtgtgaataaaaactttgtatttttttaaatccttttctctgtactttgaatttttcacatcaagcatgtagtttgtattaactttgtaattcttttctgaagctattaaaagtggggaaaaagtgcctctttgtgtaatggtgaggatggcataaggtcatgtgaaaagtatttgtagatgagaaagcactgtccaaatgtatgtgtttctttatgcccctccttctgccagaaaggcctgaaggtagctcacagggataggcaacatacaacaagaacaacaaaagctaaaagtggaagcaaaaaaaaaaaaaaatgaagaagacaaaacacaaagatgcagccctacagtgaagctggaatgaggcagggcaaaagcatacactcacctcctgctcacctggctacccagccaggccacaggctgagacttcccagtagctcttcctgaggccctccagaacccacctccgcctcctcctacttcccctcttccagcccctacaatttccaacacgcctgccctgtagcctgcccaggctccccacacctgcttaattctagcctctggcttttgctcatgctgttttctgtttctccactcacttgctctccccacttgtttcctctccctacgtggatcctcccattcaatagtgcctcccgctggtgcaccggcctttgacagcctccagctcgcgaaatctctctccacagccatcccaccatactgagtcactcttgattatgtgctgtcatgtgtgattttcccactcaaatgaacattttctaagcaccggctgtgtatcggacactgtgggaagttcaatcctgccaaagatgacgtcttattccgctctcaaggagcttctgcaggaatggaattcattggcttggtagctgagttctgtgaggcacaacgtcctccttcagagccctgggaggcccctctggttgactcactagaggctgcactggaagagcttccagtatccagtcctccccacgcccttcacttgcactacccacctggaactgaggcttggcccaccttcttccttccaacctcaggacccatgaaaactgaagccccttcctagtgcctcttagaccagggcagaacctccactgtatcctcaggattgaagactggggcagtacctgtttctcccatgtcctcactgaaagtgtgaataagaagcgggggttggcattgttctctttgcctaaagagccaacccagcagacaatgcaccagcctttttcaaccaggcatcctggagggcacacaggtgaatcagtgaattggcagtgtcccaaagctgatgggaagggggttggagcagcaagctaccgttgatgtcccatcatttcttttggttctttcacattagtaataattataattccaactgtaataacaatagctaacattcgcagagctttactcaatgccactgtgttaaagcactctccatggcttgtctcatctcatcctcacagcagccttaggagcgaggtgttatttttatctccatttcacagataaggaatccgagctttctccccacagtgaagatggatagggaattactaaacaactgaagacaggcaggaaggaggagcaaagacgaacaaggacttccagagataccccctttctctctccaccccttcttttccccaagtatcttcctttccttctctagaagaaataaagttggaagagaaagaagcaaaaatgaagtaaagacaaatagaaggacctaaatttacatcctcagttatgtggtaatacccaccccactacaccacacccccacctaccaaggtaccagtggcaggggatggaattgctaaagggatgaaaggaggggccccagctcgcttacacagcagtaaccttcctggggccaccaaagaccagagtccagatccccagtgaggtgcacctcactgggtggtgcagtagagtcccctggctcaacctccgaccctggagaagttggcatgcaccactcccaaagccccactgggcctctcccagggtgactgctcttccaggctgccctggccctcactgcatcctccctctggctccagaatggggaaaggtccggagtcttgctgaatggcaactatagcactgcagccattcgagtgtgacttggggcatcccaaccccatgcctggactcctcattacccactcctccagtctgtcttgctccagaccccagatcaccctgggtagcgggtccccgaaacgagagtcctttagaatgctgccatcacctgtccctaggcagttgcatcctccagcacaaagatccaaactcctgctgcaaagttctgctcataccctttaagaaaactctcaacctttcctccacctcactggttctccctgtgcctccccaacacctgatagatgtccagttactgcagaacataacaagtactgggatggatggtccaaacccaagtcatgaatggcatttgttagtatagtagacatttccgcaggacacagaatcatcccagtggtcctcatacccattggccaagtcccattttcctcccctcctccagcagagggtccctacactccagcaggcaggctaagctggcctggctcctcccccgaagctccaggtaaccccatcacaatgcccatcccctctccagctgccccaagggggtgctcaacttaccgtctaggagctcttagaggctgctggctggtccagttccttctccgagaaacaagggtcagccagattcagtcggcaggccagcagacaagtggaggtgggcggggaatccaggcaggagtggcctggcatttcctggcagagccctgcctcccagctgtctaaagaggggtgagggagagtgtccctgtctattggcaaagtccagcccaggtaagggattagctgaggatcccagaagtcagtgaactttccagtctaggtctggaaggaaggagggaggcagggagacaacctgggtgtaggtgctgcaccttgaaacccctccttacagtgccctctgctggtgagtggctgtccccagccagaggctattattaaaatagcagataggaggaggagggaaccttcatctgagtttcttaaactataatgtgcacaacagtcacctgggagatcttgttaaaatgcaggctctgattctgtaggtctagtatggggcctgagattctgcagctcaaagaagctcccagctgatgccaatgcaaccggtccaaggagcttagagagcatctagttccacccgctccccacacagagaagacagtggagccactgagacggttaatgactcaccagttgctggtggacctgagatgtacccatatttttccttacacaaggtgctttctacttcccccacccaaagttggcagagacactgccggttgggagacaactgaactttggggccatttgccattctgagttcttaaaactctgcctaggagcggtggcaccacaagaatgaaaactccttgtggaacttttcccatgttttcggctgtctcctcagctcctggtacagcctgatagatagaaggtgttcaataaacatgtcttgaatgaatgagtgaagcagttgagagggaaaaggatgcattttggctccaactggccaacactgagcccaggtgagccacacgttgggtatgtaatattgggcaagctacttaactcctctgaacctcaattcccttgtctgtcaaatgcagttaagaatatctaccttgtgtgagataataattgtcattattgagctaataaatgtcaaatgcccaccacagaatgggtggtcaatagatggtaaccgttgtcaccagggtctggcctcctgcagttgaggaggcatggtgaacgcccccccaggcccctagttatcatctcccatagaaaataagtaacttcctctgcttttgtctcagttaataattctctagcctcttgtctctgactgcaatgccctcccctctgcttccttccctggtggaggtgagagggtggaataaacctcccaggggagcccagtaccccaaagtgcagagatggtagagagcgggcaacctgggaagcagacctcatgcctaaagacaagccaggaaggggtgctcagaactttgatagggaatgaaaggagtggggtaggggtgtttgtctttgttgaacaaagctctgtctgagtcacacaggaggctggactttgccaacagacagggacactctcccctacccctctttagggcggctgggaggcaggactttctgccaggaagcgccaggtcactcctccttgactccccacccacctccacttgtcagctgccttctcctctgagtcataaagtcctaggggtttgtgaaagatctgtcaagctagggttctaagccaggaaggtcatgccaaccaggaggctataaccaggggctgtgttcatggattatgaactcacttcccaagctagttcttgccactcttggggacaatcccaattataaggaggctctgaagaaatgtgaaggctcctaccactcactcccatggccacagagctggttcatgggatgcaaagaccacaggcatcaacagcattataactgggggctgagctgtcacaggagggccagtgtcaaaccctcaccacaagccctcaaacattccatcaaggggtagcctccagaggccaggcaccaaggagggtctggcagaccagaggggctcctcctgagaggaactctttggggccatgaaacagcaacttggacttcccagccagtgtcaccacccttctcatctgagaaaggcagatcagcagggagcaccactccaccctcctcccagccccaccctcctcccagccccaccctcctctgccttccacacatcatatgtcatcaggccccccgcctgggaggtgtgctgccagaggtaaggggagcacaggcctaggaaccaggaggcactgggagaggcaggtgtcaggagaaaagaggatgggggcagggaggggcagggagggggcctccaccactggacagaaatgtagaaaaacaggaaggcagaagatgagcaaacggacagtcaggagcacagaaagacaagtagaaatatgcacaggtgggcatgctgctcagctctgtcccagaacctccaggaccagtgtccctgacccttgacagaaaaggatggattagggccaggcacagtggctcatgcctgtaatcccagcactttgggaggccaaggcgggtggatcacctgaggtcaggagttcgagaccagcctgaccaacatggcaaaaccccatctctactaaaaatacaaaattagccgggcatggtggcgcacgcctgtaatcccagctactagggaggctgagacaggagaatcacttgaactagggaggcagaggttgcagtgagccgagattgcaccactgcactccagcctggacaacaagagtgaaactctgtatgaaaagaaaaaaaaaaaaaggatggattagatagtcagtccagaatactgaaaataatcagattgttttctctccttcaaatctggttaatcatggggggaggctgaaatatcatgaacaaatgagaagaatgatatttgtggggccttggtggggccttggctggaggagggtctgtacattgtcccacatgcaaatgacatgcaaagcaacatgccaccttggcagctttttaatcaaagaccaggcagttgtttccttgaaaagtcaggccacaagaaacctggatgcttgtgcttacatcctgacactctgggaatggaaagatggagcaggaagctcataccccatggctccaggggtagaagagagctaaaagttcagaaaaaggaatccacggtgtcaacaggccaagtttgaatttgggcaggagatcagcctgggtgggccccatgagtgtgccagtctgatatggtgagataagcctgggacagatgtgctgccgcattcgtgactagaaaagagtccccaggaatttctggctcctgccttcagattgtgaactttccaggttggtagatcagcttaggtagaacagttctcggtgagggccagctacatacctggctaagcgctgcccactgcagaaaagctcatcacccgggacctgatctccaggactcagaagcacttggaggaaggcctattcacttagaagcagttaccagtgctgggcagtgtcctccaagtgccagaggagtgctgtggagaaaagaagtccatggaagccaggagatgggcaaggtgtggcctggggttggagagagctcagaggtacaggactggagctgggccagggagagaggaaggacctccgtgagtagaccttctctgaggggctcaggccaggaaatgagtcaggttaggaggcagagacagacgaggagccgcaggggaaggctcatcactagcatgttctctgcctccccagattttgcctcttcaaggtgaatgcggcttcaaggggctatctttgtgctcctgccccacctggggcccatcctggtctggctgttcactcgtgatcacatgtctggttggtgtgagggcccgaggatgctgtcctggtgcccattctacaaagtcttattgcttgtacagacagccatctactctgtcgtggggtgagtacttgtttctcacacatggccctggtacccaatggggtgggaacaagtcctctatatctgaattactcccatatattggcctccaaaggtaggcgctttgtcttgcctctcaccaccatagtgggtcctccagaaagtaagaaaccctctatgcctgcctggggttccagttagcccttcttccaccctctctaagtctccccagcccctcctccacctcaccatgcccagctcctcccaccaactccctccctggcccttacatgatgcctaaacccatctgcccccatttcagcccacaagggtatccaagagtccttatgccagagagcctcctccatttgccacggaacctcctcccactgaatgtttttgccaccatgtctccacagctatgcctcctacctggtgtggaaggacctgggagggggcttggggtggcccctggccctgcctcttggcctctatgctgttcagctcaccatcagctggactgtcctggttctctttttcacagtccacaaccctggtctggtaaggcacacagtgctcagtagcagaagtaatgtgggagagggtgaaaccacctggctccagaagcacataattcagcagagcaattgagtgcaggcaggtaatgggtgggcagacttctctgcactcccatggtgtgcacagagccccagggactgagctcgttgctgggctgggtactgcagaaaggtggaggtgctggttctcgggcagccagctgacccccggcctctatgcccaggccctgctgcacctgctgctgctgtatgggctggtggtgagcacagcactgatctggcatcccatcaacaaactggctgccctgttactgctgccctacctagcctggctcaccgtgacttcagccctcacctaccacctgtggagggacagcctttgtccagtgcaccagcctcagcccacggagaagagtgactgaggccctagggcatgggagaggagggacgcccagggtggggaggaagagtctgcaagcagggctgtggagttagggttcaccccaatgggaccaccctcctgggtcccctggtgccgtttttccttagaaatcagagaaatgggaaagggggggaaactgattttacacttaaataataaaatcctattagtaactctgaaggtatgatgtgaagtgtgtatttgaatgcataatatgatgactagggcggcagagtgggatagaagcttctggacctctgtgtgagtgtgtgcgcgtgaatgaatgtgtgaaggcccatgggggaggggtgggcacaccagctcgcctccattcacatgcctccccacctggcataaagatttagcactcagatgtttaattacctgaaaaacaaaaggctttttaaaagtgacaaaaaagccaaaacagaaaaatacaccttaaaaaagggtactagggggccaggagtggtggctcacacctgtaatcccagcactttgggaggccaaggcgggtggatcatgaggtcaggagttcgagaccagcctggccaacatggtgaaaccctgcctccaaaaatacaaacattagctgggtgcagtggtgagtacctgtagtcctagctactcaggaagctgaggcaggagaatcacttgaacccggggaagaggaggttgcagtgagccgagatcatgccactgcactccagcctgggtgacagagtgagactccatctcaaaaaaaaagggggggatactaattatacatgttaaggttatatagtatatattatacattaatttatatatcagatttatgatgcaatatctagttataacatatactatggttgtatgatatatatgttatacatctctgataaataagattatagaccttcttttttgctttcatacattcctatgctttccttattttacatcaattaattactattagaataaggcaaagaagattgaaaaaaagagattaagcctcagggtgctgacaggtgaatccataggagcttcttgttcagccttctatcttgcttctctttttctaaaccttcttagtggctttttaatttttgactcctcccttctctgattttcttctgtccttgtttcaaagccctgatggtggcaaggagtgaccgcccttgagtaagcctcctcaaatctttaacaaggtcagctggaaggcccagacaccttgcagtagggggtctccacctgctgcatgatggggatcaccagaattgtttaaaaatcctcatcagcctctccaggaaggaggcctgggcatcaacatttttaaaacttcccaagacctcctcaggtgcagccaaggctgtaccacagctgtttggagctatttaaaaaaatgcatgttcctcagaccgcactcaggacccataaatgagaacgttgcgggtgggctcttggcatcttcagatttaaaacctcctgagcacttctgtcagctgctagctagtttgagtgctttgggcacagatcgtttatcagggcccgtttagccttgacactctgaggttttgtgagctgagttttagagctgaaacaaactgtatgctctcaggtgagaagccagtaaggcagcataatttgagaagaggagtggctctttccagagctcacccaagagagggagtctgcagcctcccctcctccaccaagggcatgctcagcccagtgggtcaggtcacaggcaccccaggaggacacacacagtgtcccacccacctttgtatctccagccccaggacagggcagagcacagagtaggtgcttgtacgtttttatttgttgattaattgaacgaataaatgaacacattgttgtactttaaaaacaaatgctgaccagcacctgccgccacccctacccccacccctactctggaacaactgaaaaaagaagggaaaggctttaatcattttggaaactcctggttctaatgtgcagccaaactgagatgtgctgctgcagggtattgcttcttactgcttctcaaagtgtgccccagagacctcctgagacacttgttgggactccagacccatgaaatcaggtcatcttggggagtgagagcaatagggtatggtgatttgcagttctggccatggagtcagaccaacctggggttggatattgactctgttatctattaactggtaacctggtgcaacttctagctataaatactgatggacagaggataggctcggaacccaaaatacatgggttcttacccagctctaccaccattgtgtgatcttggcaagtgggcaccccagacattatcttccattatcattattatcatctcataataatatatgcattgtaatatttgctaccaattttattcattaccagctaattctagaagttaggtggaacctccaagaagatgtatgatgcctagggtattactttgacctccccaaggcaagctggagccactaacccatgcctctagcttaggacttagccctagaagaaagcttaatttgggcagtgtcccaagccctgggctagcacgaccgcctgatacagcatgagccaagctaaagagatttttggccatgtgcagaaactcagcatgaaagggcagaatcccaactccaaactcttatcctctaactccaaagttgtccttaaaatcctcctctgccccagctccttggttcctgggtgaagggagcccctaatcccacagtctccaacctccctggggctcttatctttccccttaccccacttcccagttcagagcccagcctagtggacacctgcctttgcccctcctctcttgttacttaagagctgtgcctaaatagacttggagctgcctcttctctttgcaagtgtatcccaagcttccaccattcaaattatgtgcacatttttgttctgaggcagtatttttccatttgcctctgatttggttgagtcggagacagacaagatcataaggctctgcagatctcccgtccagcggctagagaggcactaggtaaaacagcagacccaggaggtggcatatctcattctattgtatcctagttcatcctttcctcttctaaaccttcactcttcctcactttgccaatttctgcagaatggaaacatagagaggctaggtgagatggcagagtggtaggtgtatgtctagtggtcaaagattggtcagctgggctaggaacagggcagagtgtaggatgtatttattctgcacatctctggcccctcctacctacaggcaggtagagctgctgcgcaggagatgcctagaggcccctgaatgttgtcagtcctgggccagggctccaaagtctcttttcttttgtgaatggccactatctgctctgtcgcttggggctcccctgtaccccaagcccagtttcagagtcttcccagaggtcccctttcttgtagttccagaaaacaagcacacaatccttttgttttaaggattttactgctgattctcattagcagcttacaaggtactcagtccaaagcccaactttgctgagaactccctcagatctcgaccttcctcttgtatcctcaagtagagcccaaaaaaacatttacttgcctcccagactccttctccccccacccccaaatgttgaggacactccatacatttaggctcttcttctggtatggaagccaggggaagccatccctggtcacaccagggccttgatcatgttcatcagggcctcatttgtccctttcccaggtcgcccagcccacacagagattatccgctaagacaagtaccagaaaaatccccctagcgtccacttgcacctactctaacacatttctcattttaagggctgaaattcccctctcaagttgattgtagtttgtcacctcttcccagtaggttctttggccttgcaaacaccccttcaaagaggaatactattagtcaccttaatgtacatgatccttatcagatcactttctttaaagactgaaagtgccagccacgggagctgggcagtgccaggagtagccactggaatggaaaccatggtgaccaggactaaagtcaccattttacccagggtggtgtgtcccacatggcaaagcaagcattgtgtcctgtacagaagactgtaaactctgtcctgccctgtgattctggtgccttctccaatcccagcctcagactctgggagacccttggccccctcccctcttcattggccaaggctgctcaaagccctggacacctcacgtttatatcaacagagcagttgctagaggaagcagcctcccgccctccagaggggtgtctggtgcccgagccctgttgtttgtgtaccttgtctcagtagtgaccagaggggcaggcaggcctgggctgtgtctctggggcaacgtactgttggggtcccagctgtccctgcacataaagcaccgactccatcaatgcacccctgaggtatcctctttcagggagtgagaatttaaaccttcctctggtgaggcttctattttccaccagccctgctcctggcctctctgctcccttcccaatgagggcagctccacatccagccaagatccaaggaacaaccatgcctgaccctgtcctctccttctcagccacctcctagaatctctgaatgttttctgaaatgaccgtgggaaacaggacagggagaggcatgctgcagcgtatcccaggcctaacccagctcctttcagccactgccatcccaacagaagggggcaagggcctgcagagacaggctgggaggattccaattttggtttccatccccagatactagctgtctggtgtctctttacctgtacccccaaaacacagatacacacacacacacacccctcatgtaccaattactccctagagtctgtttttcctgcaagaactccttctcagcttcttcaactcccactggtctctgtccttcccttctcccagagctgggcctcatgggtgctggcagcagttgagactgaatggtgaaggaggtaaaacatgactctggaagcacatggctctgccctctctagctgcatcaccttgggcaagtcacttaacctctctggtctcaatttcctcaccagaaaaattaggataataatagtacctaccccaaacatccttgtgaggaataaatgagttaacctacataatattttagagtaatgtcaggccagcagcaaggactgtgttaatgtcagctctccttgttactaaattccagggaatatgacacagtaggagaagcatggaacttgggagctgacagatatgggttcaaatcccagcaccccactgactccacatgtgaccttgaatgaaataccttactgcccagtatcctcctgtgcaggagggggactactgatagaaccttacccaatagggttaacactgggtgtggggtgtgccagccctgaagagtatagaggcagctgtagggagaggagtcaagctcctggaatctgatcccccagattagttgctgcactctggggtgagcagagtaaactggtctgacttggaaagaagagccagagaccagccaggaattcaggcccccaggaggtgccataaatagctagagcagatcagagggcctccagggatggcaggctgggagacggggaaggctcaaaggagcagtgaaaaaggaagctgtcagtcatcagtctgggggcagacccaggaccctctcccaaaggtcgaagggaaaactgtctataagtaagacagaagaaaggggtcaactcttaaggaccagcctgagaccacctgggcaccattcactctgagctgttgggagaggcaggaaattctcgacacgccattcacctgtggtcttcacaagcccactcggcgccctattttctgccctttgaccatttggaaatagaaatcaatagcacagcctgtgtcacagatgggaaaacggaggctcagagatgtcaagtgatttgtccaagatcacacagtgaatcgggctaagatggggatatgaacgtagaatattttttgcctcctaatccagggttatacatgacagccaaaatagaaggccctgtcctcagggaggaagtctttcttgcaggggaacagtgaactgaaaggatccatcctccttgctttcctccccaagacattttactcttcctccgttgatccaagcatatcaccctagctgggcctgggaagtgtgagagggatgcacatttataatgcttcagagatgtttcatcaaaggtagctgtgcgcagccctgggaataggctaaacttgaacttgggctctgaagacctgaactcaaagcccgtgtgatcttatacaaatcacttcacctttctcagccacaagtccctaacttgcaaaatgaggcccataattcacacccatgtgagactggtgtaaggactaaatgagataatgcatgcttgaatgcttgattaatgccccaaatatgataaaagctgggatcccctggtgagccagcaccttatttatctctgtactcttggtatttaccaccgcacctggaacataggaacctctgataaatgttgactgaacaagaaaatgaagtaaactctttacatttaaacgtggtatgtttgtgtgataacaacattctttgcagtttatcagctgccactgtctttttattgtggacacaggcactattatctctactcagtgctttattccccccgaaaaatgtttgaaaaaataagatccagataaaaatgctttcagtggctgggcgcggtggctcatgccacccagcattttgggaggccaaggcaggcggatcacgaggtcaggagatggagaccatcctggccacatggtgaaaccctgtctctactaaaattacaaaaattagctgggcctggtggcacatgccagtagtcccagctactttggaggctgaggcaggagaatcggttgaactcgggaggcggaggttgcagtgagccaagatcgtgccactgcactccagtctggtgacagagtgagactccatctcaaaaaataaataataataatccttttagtagtaaatccaaaaggtaggggaccatataatttattgtccacagcgggacacctttgggagtaaaggggtgctattagtaattatgtctggacaacaggaagaaaccatgactggcaaaccaaaatgctgggcatcacactaacagagcactctgctgctcagactctctggaggagtgagccctaaatcttccaaaccatcttgactcctcttctttagtcagaccctccaaagggtgccctaccctctcatccccaccagccaaacccatttggagctgttttcagatccgttccccagtgttcttaggttcctcattttcaacctacaagtgaccctgaccccttccttctgcttccctgagaatggcctagagtgtttgcactgctccaaacacgaagacttttgcctctgctaagtacccatcatgagagctgcaaaaatcatctagccatcctctgctgctgttccggctcagggtcttttctatgggcccccatcatctctctctggcctcagtaggcttctcactggtcccctgcctctgctcttcccaagtgctcagaccacctgtctcacctgttcagagacaatggcttcccacctcagtctgagaaaaagcaaggtacttatgacagcccataaggccccagtcccttttacccttgttatctctctggcttaatctcttagaactcttcagtcacccagatgtatgtcctcgctagttcctcaaacaccccaggaatgctcccttctcagagcctttgctcacgttgttcccttccttggaacgctttcctcttagacaaccaaatgattagttcccttgccttcttcacgtcttcttcaattgtctccttttcaaagtccttcaccctggccatcctataagtacgtaaccccacctcttagcacttcctgtttccatttcctgtcttttctccttggcacttgtcatcacaaaatagaccatgtattttacttaccttatttgttgttcagttcctcaagctccacaaatcatcacagcagggattttcatttgctttgttcttttgccatattcccagtacctgaaacagcacctggcatagagtagatactcaataaatatttgttaagaagaataaaagactgactgtgagggcacatagcatggaggttgaatatttggcctgaagtacaaaagcctgcattttaatcccggctctgcacacttctgtgactcagtttacctgtaacttgggataatacacatcgcctcccatggctgtggcaagcatgcatctgatttcatttaaacccctaaacccactgcctggcctgtttcaaaatctctgagctaagtaaatggcagctattgttactcagggaggctcctgatcgatttgacattacattatggctttgtaacaggcaaatcagcacccaccgcttttgagtcataactcacacacttactccccaaattgtcagttttgatcccacctctgccaggacccctcctttcctgaacccacgttcccccaaagcaaatggcctgggtctttttgcagtcagcccctttcaacacacatctcctcctgtttaaatctcagaaggccaccctcctaaatctcaggatgcctgccctggggccccttccacactctcccccagtggagctagggaatttgggtgggaaacaaaggggagaacataaggtgagctgagagggagagggagaagagagcaggccaagccatacccacctgccaggttcctgtctttgcctactgataaataggggatactaatggccagattttccattcccccaccccagcacccgctgtcactcaattaaaaaaagatagagggagagagcctgggggaggggcaggaggccttggctataaagcctgtggctaagtggggaaagcacgaagcctggcctgctgggtccttttcccgtcatccccagccagatttagctgctgacagctgcttgggactctgccgccagggcctggcccagacctgcctgcctctctcctctccctcagtgactcctgagccacagcccctccatggcccagaaggaagaggctgctgtggccactgaggctgcctcccagaatggggaggatctggagaacctggacgaccctgagaagctgaaagagctgattgagctgccgccctttgagattgtcacagggtaagcctcagatgtgggtcagggttctgctccctagaagagtgcagccttgggttaggctgtggaaattcaggatggttatattaggcgtcagggacagctacaaccctgcagcagtgagagtgcaccagtgggcccggcaggggtggtaggggacccagcagcaaattctcttggcttctcagggtgacaccttgggctctctaatcagggagaggtaggaggagctccttggaggcaaaagcccagagaataaaaccacccttcaggcctcctggtattgggatggccacctgcctctctgggtagaagcttagtcccagggagtttggcgaggacagaggatgagactggcacatctatatgtggctccgttcaaagcaacccttcccctcaacttctctgttcctgagtgggtctctccgctagccataggcctctagccctttctttagagcttcttcctggagtagatgctcccaagacaggaaagatagatccatcctttcccaagactcagaagcagcttttttcttattaaatcttttgagtctcctcaggggctgtcccacagagaaacagagaaattacatgcagataacgcagcccaggagcttatggacacaggagctgttccaacatgctcaggcattgcctggaggaactgggacccaaagaaaagggtctacagactgcaaggagggggctgtgtgcagggtacctctgtcttatccagattatgccatctccaggaataaaactaagtagtcttcttcctcttccctttctattcctgtagtggaagacccttctaaatcctgagcaaagaataaaaagagaatctatgaggccatatttcctccttgaaccaaacgttcccttcatggggtctccaggaatgaccacaggcagagtgggtgcgagactaagagaagtttcaggaagaaaggaggcatgatgctttcaagggggaaaggaagccctgagtggcaatttggacttgatatttcaagcttgacaagtgattttccagtcagccacagttttagcacttataacatgaagatctatagtagtaaggtcccttccagctcagatgttttctgattttcaagagaacctaagggaaaatgcatcctatttcctgaggcaagagtagcccctgaatttccatttgcccatgcccacccaactaatctcaccctcatcctaggattaagggagcagctgggcacagattaatatagacacagggaaagcctaaggcagcctggccaggagagtcctcaattccagtggctttcttatggaaggagagcctttttctaacacctaagcatgctggtatacgctatccttagtcatacacacacgcgtgtgcacactacactcttgtgtggctttccaacacagagggagggtaggtcaagaacagaattagactatgtttgttcagctgaacatgctttgggggtcccagagcaatggatcctgaagggttaagtccactgatataacttacatttgtccagggctttataatcacaacatagtttcatgaacatgagaccattcaacactcagcacaaaggtaggagagggagatatattattgccactttacagagggggaaactgagactcagagagattgaatggtatgtccaaaaccacagaactggtaggtggcacatcttcttactcccagcaaagtatcctttctactggtttcttattcattctggatcccaggtttcccagagctccacgttatctctatctgggaggtagtgaggacccaaggctcagaaaaaggggcacagaaggggcaacgttctgagcattctgtgaacagttcaggtgggagcagagcgctgagtgtttcctggccacaagtaacagctgtagagagctgtctcctgggcccctctgggtaaacagatggcttaaaatagcccagaggtgcagctgggtctgtgcagggagagggtgagggaatagctttcctctccttccctcttgagatgcattccccccaggactccctcctggagtcaagggggtcagcaaagcagcttttctagcctggtctcctatagggaagatctttagtgctccttatatttgggccaaaaactagcagaagagcaggtagcttttccggaaacagtccgacatgaggagggtagctggtaggaaggagagatgcccagctcatagcgattctggttgaatagggcattcaggatagaaagcggaactgagcacattaacaaaataacatggtagaatgttctggaaaagggcctaagcctgccgtagcgtgctgaagccagttcctgttggttcacaagtctcttccctactctgcatccagtgatatcacctcgggagcttgaaatctctgtaatgggagtacttaccttatggaaatcagcaaactttagaaattggggattcttccttctatcagagagatgagtgttacacttatcagcacaccattgaaaaccagaaacctctgaaagtgagaggaagagcagtgggaaagggatcaggtttggtaatgcttaagacggagctctgaaggatacaatttgaggcctggagaaggcatcatatgtatcatacatcaatttcctttttcttttttggagatggggtcttgcttcttgctctgttgcccaggatggagtgcagtggtgcaatcacagctcactgtcgtcgcaacctcccgggctcaggtgatcttcctgcctcagcctcccaagtagctaagactacaggtgcatgccaccacgcccagctaatctttgtatttttatagagatgggttctgactgtgttgcccaggctgctctcaaactcctggcttcaagcaatcctcatgcctcagcctcccaaagtgctgggactattggcgtgggccactgtgcccagactagctttgagtgtctactgttgtccaaaaccttagaagttagattactcactctttcaggtgaggaaactaagcctcagagggattaagtcatatggccaaagcttgttgatggagtaggatgtgaaccccaggactgtctgactccaaatcatcacactgcatccaaaaaaccagagaggattctttttatatttactgaataagagtttttcatttactgcctgtttcccctgttagtatttaacctctatgaggacagcactttgtctttttcactgctttatctttagcacctagctcctgataggtactcaatacgtatttgttgaataaatgaatgacctaatgaataagaaccttttgggtggttcttaggctctctgtcagacaagacagggaatgaactgggggagggtttcttgaggacagcagctcagggtgtatgacgatccagcaacactagatttaggtaagaattcccctggctcatgcctgcttctggacacagcacgttttagtagagctctggggcacgagagctggttgtctccccagctttccaacccagtgagaagtgactgtggctctgcctggcagcacccttgatgtgagcttggctttgtctctagttatgttgtatatgtttttacagaaagcagaacctcctatcccagggattattatggaacaaagataaatggcacacagagtgattcttcttctaaccacttctttagctaccagtagtttactctagccatgtaaggaacacagagaggcagtgtccagaggagaagggtgagataaggagtgaggggacttcgacaccagttaacaccagccacagccctttaccctcaccctggcctctggagcacgctgggtggtgtgtcaccaagaagagaaggcagcgcactgactctggccaacctgccttccacagagggttgggggcaggtcaaagctcaggtgtgaagaccatgcctaccagggaaaacaggcaagttcagggtttcccttgggcaaaatcccatccagtcccacagtctggagttcccttctcagctctagggagtcaggctgctagaaccctctgctcctgctcttactactctttctgattatgcccactccttggtatccgctttgaaaagtggtctgagaaagcagaaggccaatgaaaccagcaatcctccctctttcacgccagtcaccaacaggtctagtgagggaaagctgaaacaagtcaacacataattacctatgagtagatttttccactcatggattattctggagcaaatgtttaatctcagtccagcttcaactgccctctgggttgcttcctttcacagtatagatttacgcttagaaaattcaaacgttttgaatgtgaacctgagaaaaatgtattacatttactcacatcccttctccctccatcaagcagattatcttcccaattttttttctagatatttggactctctgtttcctcccaagtgaactgaaatgtccagtagcctgggtctaagcagatgaagtgtgactggtcttgtttggagaaagtatgaggaaatggtgcttaacaaggtgctatcagaggctggggagagggaatagaaatcaggctgtaggtttctacgcatgaggaagtgactggatcagggaaagaaatctactaccagcatctctctcctgaccaccacccaccaccaccaccccaccccacacacacacacacacacacacacacacacacacacgtttctacgcatgaggaagtgactggatcagggaaagaaatctactaccagcatctctctactgaccaccacccaccaccaccaccccaccacacacccacacacacacacacacacacaggtttctacgcatgaggaagtgactggatcagggaaagaaatctactaccagcatctctctactgaccaccacccaccaacaccaccccaccacacacacacacacacacacacacactcacacacacacacacccccacccctttaccagtaaaatattttctgggttaaatgtaaagggctatagttaaatatgatacttaggcctatcatgctacttaaaaaaaactgctggtgatgatttaacaagttaggtgtcattatttccttccttccactagtgggcataatagtgttaatttattctgtgagtctacaaaattgcccaagatggccatgttgtctagttccctggagaaattccagacttctactacctctgttctcctggtttccccccaggacgtagctatttcggtctgtgagaggcctaaagaatctcatctgacctttttgctccttctagaagaccaagaaacccattcagaaatcaagcaagtttagtctctgagcaagcccaagggaacgactaggaaccaaaccttccctgcctttcctttgctccttgaaagcacttcttttcctgaggcatctagtccagaaggccctgctgagggacagagtagattctagggctgctggccagaggggttggaaacccgtatttatagagagatgacctttcttcctctcccttgggtttcaggtttctttgggtcttctcctcttgcctagggaagaggaggaggggaaaatgtcagagcttaagaagggcagaaagaaacagtcacctcacaaccatcaaagccaatttgcaattgcatgctgggccaaattcacactggcctaaattcatactttcagctgagctatagggagctccagaaggaaaagagggaccacacagcagctactgtttaagcttccaagctatttgagtagccatgaatacttgccagggttccacctgataatccatcatataggtggccctggattagacttggggagtggggcaaaaggtcttgaagagcaagtttgggcaggaacggtaagctctgagcttctcaaaagcaaaaagccactccaggaagtgaagggaccatttggcaactggtaaagttgaggagtggtctggtggggtgagtacctttggggagcactcactataagtgaacgcctgacagggattgagaagaggagcagggaaacatcaggcgatccattctcctaaaatgttaagtaaacaataaacacctccaactagggacacaggggcttagagagctaagtatagtacctgatggaatcctggggctgggtcctcaaacacatccatctccacagtggaaaatgaacctgacagcacgggacatggaaacttgggtggatacattttggtgatgggtgggggtgagggaatcctgcagggaaataagtcaagtttactcatatctttggcatctgctgctcatccctaggcagccaaggccctgggataccagggattcccctgcagcccagggagtctgttgacttctttggggaaagagaagaggtggagacaggcaatagtagaattaatggtgccataggtatctcttggggcaggcagagagattacatttttaaaaaggaaaacattgaatctttctagctggtactcatctcctcctctcttgacatttttcatctctcctattaaaaattcattttctttggacttcaaacttgaacaaatcttgcctattttagaaaaacacacacatacacataaaagtaaaaacaatcttcaactctgatgtcttctctggcccttctcttttttcttctccttgttattaccaaaattttcaaaattcctggacttttcctgctgttttcatttcctaaccatccatctcctcctcaaaggcacccacacaattcatcaccaagtttagtgtcctaagatacctactggacttgttcaatttgaggcttttcctcagcttcacactatctgcctattgccaagactgtaatcttgcatggacatcatttttattgttttccttctcaagaacctgtaacaattctctactgcctcccgaatcaaggccaaactttcgagaaccttcataatacttcctttactgtacctatccaattttagcagtcttataatgttctcagctgttttatttacatcttctctgtccagctgcaatctagctgctaaattataagcatctggagggcagagaccaagtcctttaagatttggaggtgactcaatactaaatacaggcttaactatcccaagatacccttgagtagtctgtcctcacagataaaaattcttggacacttagcatgtgacaatccctttacctgaaagtaaacagacttgagaagtagtcacttgagaaggagagcatgttattgcaagttttaggccatttcatgccaagatgcaatttacatgagttacaaggaagagaaaaaagcataaaatgctctgcaaaatctttgttttgctctgtcatgagaaattttatatgcttgctacttacctggccacttattggaatcatccagagagctttttaaaaatactgatgcttggaccacctctccacatgttctgatttaattggtttggcatgaggcccaggcactgacattctcagtcttctaggtgattctaaggtataggcaggttaaagattcagtgatttagaaatgtaggggtatgttgtgctggaagagtgatggtggagacaatgtcctagtagggtgaccaaaatgcacacctcagtccaaattctcctctccttcagataaacccttctggattttttaatgcttttttttttttttttttttttgtcactgatgttaccacagacaagacctatttatagtaagagtgaatgcatttctgaagtactgacctggaagagctacctactctaggctggttctagaaacaagaacttatcattctttcctgtccttttgtctccttgacctacagagaacggctgcctgccaacttctttaaattccagttccggaatgtggagtacagttccgggaggaacaagaccttcctctgctatgtggttgaagcacagggcaaggggggccaagtgcaggcatctcggggatacctagaggatgagcatgcggctgcccatgcagaggaagctttcttcaacaccatcctgccagccttcgacccagccctgcggtacaatgtcacctggtatgtgtcctccagcccctgtgcagcgtgtgctgaccgcattatcaaaacccttagcaagaccaagaacctgcgtctgctcattctggtgggtcgactcttcatgtgggaggagccggagatccaggctgctctgaagaagctgaaggaggctggctgtaaactgcgcatcatgaagccccaggacttcgaatatgtctggcagaattttgtggagcaagaagagggtgaatccaaggcctttcagccctgggaggacattcaggagaacttcctatactacgaggagaagttggcagacatcctgaagtagggcaactgggctttgcctcacgtgagttttcctggtgccatggcaccaacactttattatgttaactccagtagaaggtgtgaggtcaggtagaatctgtgatatgtctgattttcctttggaagggtttcatttctctgcttttgactggttgcaaaaatagtttagaacatgtctctttcctctgaatccctctctaaacttttccctcccacacttttgtatcaaagtaactttcccctaacttagaatactcaaggttgacaggaatcctaaaactttcatgaggcaagatgacgttctttggtaagatttagatggtgcaagcacctgctactgaaccacagcagagaagatactgaaatcctctgagtatgcccctgtgtacatgtcagggattactaattccagacatcttctagatgcctcactcccatatccactggcaatcttaccattccatttttctctaatgaatgttttttagtccttcagggacaattttttcacttatggtaattttgaaattccccaaatggactggtatttaacttgttttaagccagacctgctttcatgttttcaaacaaatggctacactttgaaggagaccaacaattgctgtgtgaaaatacaatacgggaacattttccttatgttgagaagacctcagtagaattcatggaggatgtcgaatgcaggaatggggataatatagcaacaagctagtccatgcaggaacatttaaagagttaaaaagacatttgtaaagtaggcagcagctcagaagtaacctcttacagatatcaagaggtgataggagaaagattagctatttaagcaaataattaggacacaattaaggccaatttggcctcttgctgagggtaaattaaactctaacagaaacaggctaattaccctcaggaaagagggctaaaggatcctttactatcttttttacatttagtctgattgagtttgcgcctacagaaatgctatgacgaagccccctttgcaaggccccagttactgatcaaaatcttccagtaatagaggaggggtactcacgacactcttacccaactttaatcctgcaacaactcacatattactaaaacatgaaaacaacaagcttccatgaagataatttacttttggtctctctcactcctaacacccttaagagaagatgtcgcttcatagacacgtttaggaaatatcaatgttccagagcttgatgttggcaggtgttttctattagacatgcacatgggcacctgatcattctcaagctgagcatttgccaacccatgaagatacaactttcagccatttcttttaaaaagcaggacccagtcactgaagtcagtgagcctatgatagggtatactgtgtggtactctgctcacataaaataagacactttatagtggtgaacagtagtcaaaacagatttctgagggtgccctctgagaatataaaatttaacttttagaattccttgaagattttgttagtgtatgtactatcactgtaattataaacccaacatagattctacagactaaccggcagcttaaaatttaaccccagtatattttcctttcagacatctttcagagtcaagggcccaggtgcctaactagcaagtccttagagcttttttttttttttttttttttcagtgatttcaaatataactgtattatctggacccattaacatgcttccctgtcttctatttgaattgctcatgtttgtgaagggaaaggttaagatatatcaagttaaaaaaaaaaaaactggcatgagataagagtgtaatctaaaagcccaaaagaacaaccctgcttaattaaaataatcttgagaaatgagcatttgttaaataaagtgtcttattttacatacttatttcatctttcttttttttttttttaatgacaaaatagtatttaatcctatatttagtcaaaagaccagagttaaaccagatctcttctggggctttttctgtgtaaaccacatcaaaacatgaacgaaagactggcttctggtttagtcaatcctggtaaatttacccaatcctgcaaaggaaactatggaggagaaatccagggacttgttgggaagggcacacagaaaccttagttcaaaaagaaactagtcattgttcggggccagcagagctctcagtaacacattttctttgtttgttttaccaaggtattcctgctgccaccaagagacagcaatgacatgtacagccatctgggacatgcctgtcttcctaataccatttggagctggacaacatttgacaccaaccaatcatactggacaaggcccttagaggacttgaaatatacttctcatgctgtagtttatttaggctgtgactctctctctaatgctgctctcgggaaggacgaaagtgacctgcaaggagagaaatgcaaccatacatgggctccagtcaactatgggactgaaggtcctaattgctcacccaagggggctgcttaacacaaacagcctcagacccgaggtttagatttctgaaatatgcattttatgttaagttgggtatttttttaaaaaaagaaaaacagcaacattaataaaagaagtggtgtgtttttcccgtggccagatttttaagaaacttgaacatctggaagttgccacagacaagcgagctagtccagacacagggacactccaggctatgaaccaagccatggttaaaccaagacttgcctagacaatgcagaataactctcccatacagacttcttacgacaatcaagtgagggcctttcccttctctgaaggcaagtaatagggcagaaggtggaacaaaaagcatgagaaatctaaggtagccacatcccaaatgccagttaataagcaactagcttctttattagagaggagcgggtgaaaagtagtagtttaatgttcagatatacaatcatttaaaagtattcaatacatggtgtttgatggtaatggcaggatgatgtcaagtctctctttttttttttttaaaggtttgtttgagtcctatgtggaagcaaaaattcacaggtgaatttccgggtgtttgccaaactctaactaggtttccaggaataatgtgttcactctgattaccagggcatgcctcctttcctcaggcttcaagtgtgataagtcgtcggaatttgacccaagactactatcggcaaatgacaaagtgctttatcacattcctgctaagtcccagaattccacttacagccaatcctgaatgagactaggttttgtctaaagaatcaaggctcaaacgccaagaaaaaaataataataataaccataatctctttaaaagtaaaggaagcctagaaaatccatgttttgacttgtgttaaggtttacagatggtactcaatttacaatggtttgtcttgcaatttttggactttacaacggtgcaaaagccatacacattcagtacacccttcaactgaactcaacttaagatggggttacccagacatagacctaagttgaggagcatctgtaattgcagagttaagcaaaatattttaagtttctttaagtttcttatcccccactctcactttcaattttgtgtatttagataatctctccttcctttttcccttcaactttatgtggacaaaagcaatgcttcaagaaaagcctcaatctaaaagtttgataatgaacttgaccctccactgcccctaccccaacaacatgaagaacttgtctgttccacctagaaatacaaaagtgaaatacttttttgaaactgttgcctcttatcaggctgatatgtgataagaacacagtctaaagtacaaagattatatttaaccagtactttcctggtgttttaaccagccccttctaaaatacagttgttcttttatacttgggaaagcagcaagtcctgtgacagacccaaagtcactctagggagaaaatcaatagcaagtctggctgttttaactctcaacaccactgtaagggaaaacaagaaaatgtctagtttcccgaatagctctgatactgaaccattggctaaatccatgaactttattttcctaccatgaccacaatagacgactggtctttgcagcttcggaagaaaagaggactaatatttagaccccagctggctgcacatccaaatcttctatggaggttaaaaacacaaaagtggccatcccactccaccaccaaatttttttttttaattgagatagggtcttgctctgttgcccacactggagtgcagtggcacaatcacagctcaatgcaacttcaacctcccaggctcaagccatcctcccgcctcaacctctagagtagctggaactacaggcctgcaccaccaggcccagctaatttttaatttcttttttttttgtagagacagggtctcgctatgttaaccaggtttgtctcaaactcctgggctcaagtcatcctccagtctcagcctctcaaagtgctgagatgacaggtatgagaattttttgagaggaagtggcctttatttttttaaagaagactcataaggatttttgacaatcactgatttattgggtcactagtctgtgctaagtactctgccaggcatttaacatacattatttcacttgttttcatgattaaattcaggcaggttcaatcacagaaaccatgcagtggacaaaagagagaaaaagttcaccatgaggagattctaaaaacctgccttttgacttgtctatttttatctcttatttctcactttgcttctcctcccgcttggaccctttgtctgactgtttgaaattaagttgcaggtgaaccctccattacccatgtccagaacaaatagacataagcacagaacctcactaactccccaaatttttatttttccatttttatcaccacaaatttcttggtaacaatgtagaatttaattttgtaattaaaacaaaaactctcccctaggaggaatctgatgacataaggataacaccaagttatgtgcacaaacgacaaaaaatgccaaactaactggaatgatcatccttcctgaaatttctcttaaaaagcagagaagtagaaccaatgctgccacctagtggccagccaaacaaatcaggtagcatactggagaaaaaggtcatagtcccgacaatctggtttccctgcctattatcaagccacctaactccttacttttccacaaaaaaacacaaccacatatcttaagcaagccctcctccacagtcataatccaaatacttgaatacagcaaccaaagtctgtcttgttaaacacactacttctcatgaaactttcctctgcctattttaaggtaggtttgcccggtcctatggcccagtagagatgacacaggagaacacggaaacatccaaaatgttcactggttcagagtgtgtacacagtaattttgatgtctgttgcctcaaatacctcctcgatcatcgcagatacattttcccattgcagacgatcaagaccacatccaatcctgaaaaagacaaaatatctccattgatggtaacgaaagtatctaggaaactgctcctctcttttaagctatatccactcaaagcataaaaacaaataatctagtctgacacccttatgggcaaccatggtaggagtttggaagtcaattcttgttgtgagtcaccgaagaccattcctagacagctctaacatccaaaaactatcacttctgtttgcctaataagatactactttccaactatttcatgctacatttagaaatgtgtaactgtcatgacattagagactcattatccctctatgactactgactaaaattggctgtggatggatggtgaaaggttggtattttaaaaatgcacttatggtaacagaatgttaacgaaagtaaggagaagaggaatgaggtacaggatctgcaaaaaagaaagtcaagagggaatgctgggaaatggtaagatagttgcaatccaggagtaaggtctttgcaacaccctggtaagaataaactcagtccataaaactctactacttggcaccttccaagatgttactctagtgatcctcaacacgcctagggaaaaaagagacctaaaattggtaatttcatgtcataatgtgataattaagtccataaggaattgtgattaaaaaaaaagtttctgatatgtatgtacaccataaatatatcaaagaccagtgtaaaataagggacatttgaggccatatgcaaagtaatgtggggcgcaagataaaactgcatgtatgctcagcattgactcaaaactaccagggtgacaggaagaaaagaggtgaggcccatttcctgaaaagaaagcaaagggactactgaaccctcaatgtcattccctaaattcccaatagctaaagtctaagaagttacatcagggacagatcctctggctattacccatactgaccaaaacaagtgtgcagtataaaagggaatgataatttacaactttcttgacgcaaagtaataggtttgggagatgggaagtggtccaagaggaaaaccaccattgctcagtcttgattctttagcttacattgctttaggaataaaggccaagcttcaagcagagggtgctgagaattcaacaaatgtagctgaatgacaatggtcgctctctgctaagcaggctgaggcagatgtatatttcaaggtaattgtcctgattcattcaactcaagctagaaaatggctgtgccttagtctaaagccagacaactggttcactggtggttttacaaaattttgacttttgtccacctttaaatctatattttgggttaagcttttaagttgtttgtctttgggtaagatagtaaaccccaccaatcaattaaatctccatttaggaccatggatttccttgcctgggcatggagaggtcagtgactccattcttcagacaatgagacttcattgcctctaaactcttctgtaagttttcataagttggcttgtgcgaagcccttttctttgtaatctgaacacaaaggattcaaactttcatcatcccaaaatgatagccaaagaaaagtcatcacattcccccaacatcccaataattaaaagagtaagcacatttttatagaattagtctagagcaaggatgacaaatgtcatattgccctttccacactgttatgggagaccttcaagaaaatccactaaatagaggctgagaaacccagactctgccacgtagcaatctttccttttcctaggaaacccatgagattagcagatgatgcctattgtcaatatttttaagcaaggtaggtgaagtctctgtgccacttccaagagataagctgcatatctctaacagggaagaaagcataccacctgaaaattccctgctaaaagcctctacttatttagaaactgtgcttgcttgctttttgtctctctacataaaacaacagaaaaaactggtagggtcccaaagtaaaaccactggaagccacataagctttaaggacagaattcaaaggggctaggacatctccccactcagtttgtcatccagatcaggcttgtagtgggttagctgtaagctacccaccaccaccactaaggaagccacaccctttcagggaccaaatgccatcctggactgttgaagaaccccacattcaggcagtagttaggagaggagctaagtattatttgggactgcacttattattttttgtttttattcacccccttgctatcagtgtgctatttgacatggaataagagaaaagctcctttgggaaatctgtctcttgagacattattgtttttatctcactctgcctaggaaatatagtatggcaggcattcctaacttttgcaagtcttagaacaggcctatggtacatgatacacgactttcccacagagctgggatgcagcctcacatttctttctaacccagtgctccaagtagccgccatcactggactggagttgtcataagataggaagctttttgacattcttagttgtctagaatagaacatcatgatcaacacaaatgcagtgcagcccatctgttcacaaatccttaaaatgtattaagaactggccctgaaaaaaaaaggaattggccccatcttaccaagtaatatatatatcgcccatctctcttcagaacagccacttctccagatttcttttctaagaaaaagttatttaatagtagaaatgaaaaagaaaaccaaacactgatctctaaagattttaaaatgtttacagatctgagtttacctcagaactagaattttcaacactgaagaagggaatagggaagacctattgtctcccacaaacactttgctttttatcagcattcccaaatactatattccttaacttaacagctttcttacagtcatgtttcctcacaacccatcttttgtaccactactacttttaaatatatcctcatttgtccacaaactttctctattgccttgaaattgttttatagtgtgtagttttttacttgccaaatgtgtatttactcaataattatctttttacatacaaagagctgtataaggcattatgaggaatacagatatataaaaaaggaattaattattacagagttttcaatccagagaagatatcatcattccaaataactataatacaaagcagtaagaattgcttttgtctaaggctaagaatcactgtggacactgatgctgttaagcctggaatgtggtcggagaaactgttgcagaagctttacataggattctagtgcacatttctggtttaaagtggcccgtagaaagtgatgggaggggtctgtaaggaagaagaggtttctaaattcctctttgaagagaaagcagaatattggtaagtaaaggatcttgaatgccaacctatagactaagcatctcagagttatttcaagtttcagagaagtacagtaatatcgtcaagaaagtttcatgatacaagaggaagagattaaaaaccttcacaggagttgggttttgatatggtaaacgtctaaactagaggccattcttggggaggaaaatcttaaaaacatttggttcttaggaatcccctctttacacgcatattttattaaagtgtaacagattaaaaggtgctctagccagggcaaaccaggtaagtggtttccaaaactcacgttgatttaaaagttcttgcacccctccaaatttcttcttaaagaggacagctatcccagcgcccatgcgacaatcctcactgatacagtgggctaaagagtctgttttcgggcatgcaaaaaggtctcctttcacataagtgatctaaaaaatgtgcaaaggaaaagacaatgttttattagatacagtaaaatactaagctatttttctgtattttgtgtcccccacgactacctctcccggcaccccttcctccaatctgatttaaagccaaaccaattacagcatgtgtaaaaggaaagtaatggatgatccctgcctagaattttgagcctttttaaagtaaatcagctagagagaaaaaaagataatgcaatcattaatttaattaaaaagtgtttatgcttttgacctccattattacgaatttcagttcaccaataagtcaatagttgttacgcactctgcttccttctggatcttcattaaggctgctggccatgatactgagtcgctatttccagaatttaagtgtttcttcagctatgagaagggaaaaggaagtaaaaatgcttaggcagccttagtatataatattctgattgccctgtacaaccacttaataggcttttttccccaacgtttatcgatgaatgtgagtttgttcggcccctgggacgtaatacaaaacccttctggggcaaagaggaagaacgcttaggttcggaggctgtctcgacccgctctcatttcgtgctttcctggagcgccccgctccgtcagcggaagcaaagcccatccctaagacacgcctcctcctttctccagggccactccggagcaaggccgatttaggacggtctccttttctctgcacgacgcaaaagtatttccccagtgggtctggcttagaagaaaacagaagggacttggccacagtcccgttaagccgcaaccacagagtgtacagggtactggcgtgctgagccccaggcgtggggaaaggaaggcggcctctcaaggaacgttcaccccccacttttttggggggtgcgtgggagaaggaaagagtctattgaagcctcccattctctgtctcctaccctagggcgggtcagcgaggacgcagtctgtcctggggtcctatgggagggtgcggggaggctcgctcaaagccccaacgtacccaagtcacccttcacctggaaaggagtcggttgtttggaggtccccgccccgcggggaagggctccggatccgaccctggtaggtggggagcagcggaccagcccaaacgcggagccaatcccgccaaagcccttaattgcacgcatctaagatggccgcccccgcccggtagcggggcggaaacgagcccctctagcttgctagccgagcccacactctttggcgaaggccgccgaacttccggcagtaaattccgtggtttcccgccgccgcccgcgcatgcgtaacgaaactgccccacgagtcgggaaaagtggcgcttgcgcattagccgcaggggtgtgtcctagtggccacttggaaaggggtgggcagctggcaaaggggctagttagcgcctgcgtagtactaagctcaaggcagcgttttgagttgaagggtctggcgcgtctggaaagcgcctgcgtattcctttcactgggggtggtgtcaaagcgggaaggtgggcgtggcttcagggaacgcctgcgcgttgctcctccgaaggggtggggcgatccctgaactggagttagtgggcgtggcctcagaggcgcctgcgcggaggcggttggagggaggcccgattcccctttgttcgggttcgccattttgctaggcagcggcagtggcggcggcagcggcggctggagcctctgattgggtttcggagtccggtactggagccaatcagcgcgggcagcgaaccgggggagcgaggcacggtgagtgtgaggagccaatatccagcggcccagagccggccccagcgccccgattggcgggtctcgctgaccactcaggagaggcccaggcgcccgtcgagcccggggagtcgagctgagcctagccgagccgggcggccagcggccccggcccggggcctgcgagcgcctcggggcactcccggccgaggcctgcaggggccgccccgcgcggggatggcgcctcggggagcaggcacctcggggctccgaccctcgcagggtgccagggccagttgggaatgcgtccctgttccccgactcaggcccaggttctcaggccccaggcctggggccacgaatggccctacactaggggacacatgcgcgccctgggcctcggcgatttcctcctggtcgttctggccgcaaacttaaacctgcccttgcactctccactctccggcccttgggacaggaagcctccccggggcccgcgccccccgctccccgctcccagcgagccgggtctgtcttatctgcagcccctctaggtcgggagggaggcctggggagggtgcgcgccgcggccgcggggtcccgtgtgcggctggcaacggggctggcccgcccacgcctcggagccctatgggcccgcccccgctgtctccctggtggggagagggggccgttagttcgcccactccccctgctccgccgcgcccctcctcccagcccgctccgcccgggtctccggcccggcgccgttaccaccccttttggctcgtcatttcctctcttccccgccccgttcgcagtggcaggaccgcacacctccgtcttggagcccaaccaagcggtctccgtttcttgtccgggctgtaagaccagtccattcggtgcctggaacctcactcttagaagattgatacccttgcgcattctttccggaggctgcacaacttgctgttcatattactaatcttatccactgctcattttgtgaaatctccctcccttgggaatatagtacagttttgggggttttttttccctttgtttttgccttcgcctttctatgttactttgtgtcaggcttgacccagtccactcatctcttggtttatgtttttctgatacactttcaagtcctgtgttaacgttttctcagcagatgtttagaaactaacagtgttgtggggttttccttagggtgagaggttgctgttggcaaccaattatccagcagttagtatatgccaggtataatccgtgtgttagggagggagtacgtagaggtcaataagaactgtgcctacctgatggaaattgacaggtgaacaggtagttaatacctaacggttagtgctataaaggggccaagttcagttgctgtgaagtatccatgcgtgagctagcctccgtgaaaggcttatcaccaccgcacttttgactggccttgaagaatgatggtaattcttccacaggaaagatggaagagcttgctcgaagagaagaaaagcatgtgcagaggaatcaaattacactgttggaggcaggaagatgggatagggaagtgggcagtagttgtgatagtttaggggggaaagcccagttggtaaaatacttgtatatcttgctaaggaatattttggaaacagttattattttgtatggaggttcaagtagaagggatctagagctatattttttcctaagattgaaaaaacgagtttctgacttgtttatgggttctgccccgtgatagtggctgagttctttggggatgaagaggagacttgtcctaggactctgaaaattatttttactcatgtgaatcatctagtgcattccctggcacataaaggtcttaagtatctggtgcccatttctaaattcacatttaatgttatacaactaataggtttcagaaaactcgtattccagtgctctttcattactaaaacttcggggacaggttttattttcactttttagggtgagtttttcattgttgcttaagtgattttcttaattcatttgattgtcacgttatccgcattagcagatgagatgatagagcttaagtagtctaaaaaacatgtatatttgcctttggaacgtttttttgtttgtttttggatacagggctttcctctgtcatccaggctggagtacagtggcgcaatcgtagctcactaacctggaactcctgggctcaagccatcctcccttcttgttctcccaaaacgttgggattacaggcatgagccactgcgtcctgacctgaaatagatgttttaaccttagtatttaaaaataggtatgttctggtcacttcaaaatcactaaatacttttgcttggcatctttctaaaaggcattataatctggtaacttttttgctaaataccttacaagcttccaccagtctgcagaagaatttctttgtctgacattttgagagaaagtagtgtggccccaagctttttttcctgtttagtccactgttcacatgctgaaatatttctgttcttgtttttatgctctcttgatttgtagtacttcaccttcctccacatcatcacatagctaaatctttctcacacttaagaccagttcatcctgcaggcctctgatagcaaagaaaaaaaaagttcaagtagtacctttttttttttaagccttgttgatttatccccagctggaacaaatctctgtcctccaaattcccatatcactttatctcttaggattccagtataggtttttagtccattactaaacttaaagactctttgaagtttgaatcttcgtcagagatttctttttatttttaaaaccttcagaacagtgtctggcacatggtacataattagtggagagaagtgcattagaaagctccaatccagaaatctgtaggatgatggggaagctggacagccctttgttgtagtctagtctttcatcaagcgtctatcaggacccacttgttgagttgtgaaagaaattgagtgagccaatgctgggaatttttaaataatagaatagaaaatatctgccaggcatgatgatggctcacgactgtaatcccagcactttgggaagccgaagtgggagaatcctttgagctcaggagtttgagaccagcctgggtagcatagggagaccccctctcttaaaagaaaaaaaagaatagaaaataccaaagtgcatcttgtgttgtataaaggtaaatgctgtttcatgaaactttcatttcagttacatgctttatacatgtgtgcactgagttgtgataatgaaatgtgtttcttactaagggttgtggtcaaaaaagttaaaaagctactgttctaggctttgcctggtagtgattatcaactgtgataatcctatggcttttcatatgcttacactagttgagtttctgaagaggttttagctttggagtttgtgtaggtccacatagaatgggttcctagtaagtggttggctaagtctcagcttttgcaccttggaatagtggggcaaagagaattgcactgagaagagaatgcactaggaagagaattttcatgctagccagaataaacacttattatttgtttctctctctttgaggaaaaaccattcaaaactttgtgttaagagcaagagctagacagactaaatctggcttagtttgtcataatcttgggcaaagaggcactttgggaaagactatcgaattgtattgcagtcttgctaactgaagctcacagtagtaggaacatatgactttactgaagccagttgcttatagcattaaccattaacagtatcaatatcatgatacaggctaaatcactctgtcattaatgtgagagagaattgctgctagatttgaagctgctcttcaaatcttgatactcttcaaagtataaatttaaatattgctaaattggttcatttgtattaccagaataaactagttaagaagaaaatctgtacgttacatatattagtcattatgtgcttcaagttatatttagtcttgtaaagatgtaaacttctggatattagtcaaggaaaaaatctcatataagaaggaaatttggagttggggaggcgttgaaacctaaaagacattcctttcatgatccttattttttaaaatcaatttattgagagatactttagaaacaaagtataataattttaaatgtgtattttgatgagttttgacaaatttgtacacctgtgcaactgctaccacaatgaagatataaaacattttcatcaccctacaatgttcctaaggctccatgccagtcaacctccctctttcctgtctccctgtattctccactcccaaggaaccactgatccattttctgtctctagattactgatgtcttttggagattttatataaatggaatcatatatattcgtttacatcataaccttaattttattagtttatagccataaatgtattgtgtattagagacaagatagaatttagggaagcctgttagtgcccctaacagactcacagtctggctgaaaacctgattttctattctatacccagaatctctgaggagcagacttagtcaaccaattccaaagagactggtgtaaaaatcagaaaaccggtttgtcatgttgctgattatatttgctccctgttggccaatctatatgtaaatccaaattatagctagaaatttacctagcgagcattccattagatcaagggcagtgctttggagaaccatatggccacaagtcctcttgctgtgatgacatagcctgttatttatggctcatagattcttatgttgtatccattttggttatgagtaatggggttgattaatttttattttgattaaattttgttatatttttcctaacattccaacattcatttgggaaataagaatttctcaaaattcttattctagaaataagaattttcaagtgtgcagtgaaatcaaaggaatttgaaaataaacacctgtatacctgccagttagggtctattaacatcttactataattgccttaccagatatttctccacccattcatccattttttgatgcatttcaaagtaaattttagatatcaatacacttctttctaagtacttggacatatagttgcacatattttggtttcttctttcacactgtattgagacaccttgcaaatgattaattccaccagcatgtgtggatttatggagagtggtactgtactttgccacgataatgagcagctcagttaggtcacgtcattttattattcagatgttggaatttatgagggcctagtgaaaaatcagagagaaagacctatctacatttttgtttatatatctgtcctccctcccatatttccaagatgaattgccgattgctaacttatatcattttaattttttaatgaagtctttattaaaggttctcagatatcattcagtttatctaattgtatccttatttttaaaagtggatcttcaactcttaaagtctatgagaagggtaaattttgcctaccatatgtagtggacctgagtaacatgtttggtgggaagcaattacgtgttacaacttaaagaagctttattctctaaagtatatgtgcaaacctgaaaatcagtgttaggtatgccttgtatcaaagtgatgtagcttaacgagtatctcttaggtgcaagtattgctctgacagtattgaaaggtaaggttgccagtatactgaaagcattttagaaacgtgaaaatagcattatgttgttatgattgtgccatgtaatcccagttaaaaatgatactgaatataagcatttcctattctcctatcctgttttcttgcaaataaagtacagtgataaattatccaggttaattgtctggtaaggcctttattgacaatctcactttagtttctttccccacctttctaacaggagtgtacctcacagccttctaggatctccagagtggacaggaatctcacttggagggaccatggagcagtatacagcaaacagcaatagttcgacagagcagattgttgtccaggcaggacagattcagcagcaggtatggaagcaaaactgctttaaacattacagcaatgaaactgataacagcaccactcaattggttggtctattgccctggggaattatttgaaagataccagatcttgtgagatattgggtctgatggcttgtgctgaaatgccatgtctagcccatgaccacttagaatctactcttcatgggtgcctggttatagtaaattgcctcttttatctcattttaagtaaaaacatctagtctggttttcagatggaaatttggactttaaaatttttctggattctatttggtctttttctcttcttgtttgagctaacttgtgatttagtaagtctttggccacaacagacaaaccaacatagcttccaataaatcttctgttttttgatttggtctgccacattttttattcagaaaagctctggtttaacattaggataatatttagacagccattcttatggataagacatactagaaaggaattccctgctgctggtttattcctaattaatagattgctttcttgaatttatacacaggttacattttctgatgctttatgcttgggtttattatagtaaaatttcacttttttccccaccccagaagaaaaaaatgtattatgtttctatttgaccttaggccaagattgatattttggaaatactttgttttcaaaatggaatttagctaatatagaaaagtagtagggaagggaaaggtagtattgatgatgagtttttcccgtctaatgatcaaagacgaactcccctgatagctttcccttccatacagctgctgtggctctggcagtttccttcaactgcctttttagaggaagggattccacaaagggccctccattcacaccagtgccctggagggtgggtttttattctttcagaatttgccattagtggatgtaaaaataaggttgaatcattgaaaacatggctcttaaagcagtccagttgggtagaaataatcttagttttgaagctgggcatggtgctgcatgcctgtaatcccagctactctggaggctgagacaggaaggttggcttaagcccaggaattcaagaccagcctgggcaaaacagcaagaccccatctcaaaataagtacataaataaagtttaaaaaaaaaagaatcttagttttgggacatgagagcattgacgtcatgaagatgatttcggttcatagtgattaattactcctcctttcttggtgattgcatttaagcccagaattttttatggtagtttcagggctattaaaacctaatcatttttttcttgtgaactcatctgaggagataaaaagggcattaaacaattgtgtaagtagaagtgtcagattcctgtttctggagggaaagattgcattacaaatctttgtgttaatgatgacaactgttttgagtttttgagtcaaatttttgaggtccactctggagacaaagggctaatatctttaatcctactaccttcaacaaaacagcttcaatatagggagtctgtacattttgaaagtccttcaggcttccgtctctctcctccaagaggtaaggtgatctgtgtcttgaactacacatttccttcctgacatatttcaagctcttcctgttcctgttctcagcagcagggtggtgtcactgctgtgcagttgcagactgaggcccaggtggcatccgcctcaggccagcaagtccagaccctccaggtagtggtaccctctctgattctctgtgagcactgcatgaacttctcctctcctcatgtctggtgctgtttgtgttaggatctccagtaggaatggcaaagtcagttgcatgtctttgatgctgctaacttgtctttgaggcttataagatgccagtttcctaatatttcatgccaagtcatatagagaccccgtatcaactttctgagaattggatttgactagcatgtttctttgagaatgcctggaaaagaaatggtataagtgacaggaagaaattcttataagtgacattagaatttattcagggctcggccgggcgcggtggctcacgcctgtaatcccagcactttgggaggccgaggcaggcggatcacgaggtcaggagatcgagaccatcctggcaaacatggtgaaaccctgtctctactaaaaatacaaaaaaattagccgggcatggtggcgggcacctgtagtcccagctacttgggaggctggagcaggagaatggcgtgaacccaggaggcagagcttgcagtgagcagagattgcgccactgcactccagcctgggtgacagagcgagactccgtctcaaaaaaaaaaaaaagaatttattcagggctcacactctgatccaattaattgcatggtaaaaattttgtgtatttgtgttacaatggagaaggaaatatatacatatacagacacacataaactaggctaggctgtgctttatttttattcaaggggcaactcaactgaaaaataatcattgcacttggcaaggtttatctaagcactgaatcttgttaatctcttgttaactgctattgtttccactacctttcctgggggaatagtgacctgtcttattactagatctgcaaagattaccccagatacctcttggttaggcagaagcaggatgtgctttctgtaagtcttaggtgttaaagccactgtgataattcttggttaatcaatacagttctttagcatcgtgtatggctaagtatcctaaattgggttctaatttggccagttcctataaaacacaggagtagcagcactagtctactctgtgtatgtaggttacttttattaaaataactctatttttgagaaattggcaagatttgggtaccctactttttccctccattgaattagaaatgattcaaagtagaatctagaatgtagaactggcatctcactttattgctagtgctgctaagcatccagcagataactacctcttattgtcatcactttatcctttcaatcccacccctacccctgccaccaatagtgtttggtaatgatgtacagccaactttgaacataaattaagccgaaagaaactgagcttgtaggcattccaaaattgtgttcaaatctcacagtccaacagcttgttaatgtttttcatgcttgcttcatcttactcatatataaaacagtattttggattgtcattaaccccttgtggaataggaatgtaacatgctcttaactgtatggcttcttgtttgatgcatgtgtctttgtaacatttttctgttgtaaatacagtgagctctttggagtctcaaatcatttatcatgtgcacgaatagcacatcaattggggaggaaattaagatgatgaatagatagaaaattattaatagctgtatcttaaaacttgtgtttcctacttacatagattttatttaaaagaagtggaaacactttatggaaataatagaaacctttcctctagggatctgattattttgggagaattttaaatagttattttggttattcttgctatatgtattctgagaaatctttcttgatacagaatatgcaagcatttggtgtagcaaaggggatttgatttggaatggggaaataagggaaagagatagcatgagagagtcaggctgtaaagtccttaaaaaagtaaagtaaaggttctcaatggacagtttaacaaaacttaggatttcaatgttcctggtgattctaatacattagtggtggtggcagtggcggcggtggtggtggtgattgtaggaggaccttactatctaacctactcatctaggacagaatgatctgttaactaattgctgttacttgcacatactttcattaagtgtgaatatttcagtcatgaatattctgttctaagtaatttctgtcaaagatagagtctgaaaatgaaaattttggactattccatggatcattacagtttacttctaaagcacttttaaagtgcttccagaaagcattctattaggtatttttgtattgggacttaagatgtgacagagcacttgtagtgacctggctcctacagtagtctgtttactcataggagcttgaaatttgtacacttgactgctctgtgtaatttcaatatttgttgttgcttctgataaagctaaaataaccatgtggatattatagaggccagtgaggaattccaccatggagactgcaaactgaccagaaagtgcttttaagaaatctttagtagtgagtttaaacaacaaacatatctagaattcacagagtaaaatgagcaggataaaggtatacatttgacatttcattttagcttgagagactgtagggaaaaaagggtcatcctctacataagcttccagagctgcttgctacccagcctcctagagtcattgctgggtacagtttgatttaccttcttcactttatttagaatttgtactcaaccaccatcaccaccatcacctttccctctcattgccttctctccagccttcactacagaccattcctggattggtttaaacaggcaactaaccttgccattatgattaaatgtttgtcatggatttagcccgtgtttggtgacaaatgccttatatctattgagacttctcaaagactctggatattctccattatgtctgaccttaaagtattgagcttggcatttagtaacaggattcatagatatttaaagataacttgaggacttgagacatatattttcttagtcttttctaccttttccttttctagcaaggcagcagaatagttccagtgattgtcttttggtaaaaaccattttgtgtcttatgttatttcattgttcttattttatttcattctaggtccaagggcagccattaatggtgcaggtcagtggaggccagctaatcacatcaactggccaacccatcatggtccaggctgtccctggtggacaaggtcaaaccatcatgcaagtacctgtttctggaacacagggtttgcagcaagtgagtaatatttaaaaatattgagcagtatatcagaggagaggtttcaaagaatagattattacaacctatttgataattgatattgcatttaactgcttcctaacccacattttgcattcagttgattttctgcctttatagtaccagtgatataaactagaactatgcagaaattggacagctccagtaatgactaagatattaggcatgatcttgaattgctgtaaagtatatgaagaggttagaatctagtttatagtatattttattttaaaagaaacaaaaatgagtatttagaaagttagaaaaataacaaaacgagcaaaaagtgggtccaaattaattaagtagaaaactgacgtatagaaaggataaataaaatctagattgtttaagcagaccaataaaacaggtaaatccagttgaaacactgattgagaaacagaaaacaaaagtaagcaaagatgtagaagagattaaaggaaggccaggcgcagtggctcatgcctgtgatcccagcacttggggaggccaaggcaggtggatcacttgaggccaggagttcaagaccagcctggccaacatgacaaaaccccatctctactaaaaataaaaaattagccgggcgtggtggcacgcacctgtaatcccagctacttggggggttgaggcataagatatcttgaacccaggaggcggaggttgcagtaagccaagattgtgccactgcactccaggctgggcaccagagcaagattctgtctcaaaaaaaaagaagagattaacagaaatatgtagaaatgttacatacaactctgtggcatcatattttaaaattagatatttctcatcgagatggcaaaaaaaaacaaaaagtcattatatccactgttaggatggatgtggagaaaaagaattaatcattatttttggtaatttaaaactgtagagttattttggaaaggcacctcactatctgttaaatacaatgaatatttgagctagcagtcccacttctgagaatctgtcctataggaagaaaagcatcaatagtagggggaaattacaaagacacttttcatagcattgtactagcaaaaaataaaattgcaatctgagtgtccattaataagaataaggaaatggttggaataaatcataatatattcatagggaatattgcatcatcattaaaagaaatgaactgttgacttggggtgggttaatattgaaatatttttagtggaaataatttgcagagaaatagtgtgtgatctcatctttgtaattcataaccaaccccccatgagtatatgtttatagtcatggaaaagagagtatgagataactattagttactctatctaaatgtttatattgtttcaacagttacagcagtcatattaatgtcttagttttctggaggaatttaagttgaaaaaagcagccatgatcccactgctcataaatcaaacttgtactttttgtgtattcttttgtgtttttatgcataatttttgggcataattgtaccatgcatgtggggttgtgttttcattttttttttttaattctttcataatgttcagtcaacttgatgaatcagaatttctaatttataaaatatagttaaggattttggttttcatttgcctttgtaggtaaacatttgggcacgatagttttatttttcaactgaattctcaggataatttctttggattggggattgcttgggtaaagggtaagagtatatttgagcccactggcatatttttgccaagatagaattgtacttgggattaaaaatagttttcacatttctctttgcataaatatatgaggctttaaatatcttttcagcatgtgctttccttgattccctattgctatatcctttctgttcttctctctttgcttcctctccagtcccccttgctgcgccttctccactgttgagtagagacaatgtggtatagttaggaacagtatactgtgagtgtagtggtccaagctttcattaccaggtctgccattaaataagcattctgatcttggccaagttatttaattgtcggtttgctcatccaaaaataaaatttatatgagatgatatctagggttcattctagctctaaattctgtgatttttatggggttttattttgctataaggaaccttcaaatagttatttccctgcttccaagtagggctataactaaccaagctgaaaaaaatatattctgttacgtaaataaagctctctaggtgagattccatagcctcccttacaatacttaaggctttaatcccctttgtataggagttttttttctcattagtgttgagtagccattttttaaagaagactacttcttaaccttttttgaattgtattctctattttagaatcctagtaaagcttgcaccctctaagaaaaagtagagatgtccagtctcatgaaaaattctgcatataattttagattaaaatccttggcctgagaaagatactggaaccagagagacagccaagaaatagatagaagaatattggaagttggcatataataaaagtggtataaacatatcaatgaagaaatggctgaagaatgatacagaaaagaaactgatttctaattcatactgtattttaaaaaatatttgctaggtggattaaagatctaaatgtagaaaagtaaacttggaaaattcaaaagaaaatataagaatttttatgctatagagaaggatatttttaaaaacaaattgactaaaacataatatgcattgaaatacatcaaataaaagtaaacaaggtgaaaacttggaaaagatatttttaatacatacaaccgagtttgtattcagaatatgtataaataacgtttatgtatttatacaaaaataggaaaatgggcgaagaatatgaatagatggaagaggaaatcctaacagccaatataaacttagaaatgaagttggttcacataaccagataaatttgtttacttatttatttgccaatactttctgaatgccaattatgagctgagtatttggaaaaaataattcagaagacctaggcaatctatcccctaacaaagtaggatccatgaatgtctctaagacatggaacccattgacctgtttttttcaccttccttccatcagtagtcctttttcctatcagctggtagactttgtgataacttaaggttctaggcatgttcttctttccagaccaaggtggtcccaagttgaaattatggatggaaagtgacctggctataaaaatctatctttctgaaagtatcctccttccagactgccatctatgttgaagcaatgctcaaataaaaaaagtttgttgatggaattaatggtcaaagaagcaaagagaaggttacttagtactagccatgtattctggcttttaagtttgggaggtattcttgaatataaaatacaagacattttgagctatggggctctcctcactgctttctcttttgcacttaaaaaaaaaagtgttcactagttatatgaaaataggattttgtacacccaacatttaaagggttgtattgcagttttttagttccaaaatttagagaaatatttttcaagcttcttgtcaggtttctgataacactcctaataaagtggctatagccattaaaaaaaagaaagaagatagatttggatagcacacgatcccttgctttccataattgctttataaggtttagctatccaatcctaggaccaaataggagatacaaattaaatcaacaaaaatttgacaaacattaatgacagtagtgagtattggtaattggaaactaataggaggaatataatctgtcacattgccttaattatctattaccatataacaaattatcctagaagttagcagcttaaaacaacaaacatttggccggtgcggtggcccacacctgtaatcccagcactttgggtggccgaggcgggtggatcacaaggtcaggagatcgagaccatcctggttaacacagtgaaaccccgtctctactaaaaagacaaaaaaaaaattaagccaggcgtgatggcggacgcctgtagtcccagctactcgggaggctgaggcaggagaatggcatgaacccaggaggcggagcttgcagtgagccaagatcacaccactgcactccagcctgagccacagagcgacactccgtctccaaaaaaaaaaaaaaaaaaaaaatttattttatagtttctgtgagttaggaatcctgacacagctgtgttggattctttcaaggtcctctcaaggcccttatcaaggtgttgtcctgggctgcagtcacatttgactagagtagaatacattttgggttttttctttgtttgtttttttgagacagttactcgctctgttgcctaggctggaatgcagtggtgcggatcttggctcactgcaacctctgcctcccaggctcaaatgatcctcccacctcagttccccaagtagctgggaccacaggcatgtcctaccatgcctggataatttttgtatttttcagtagatacagggttttgccatgttgcccaggctggtctcgaactcctgacctaatctgctcgcctcagcctcctgaagtgctgggattatgggcataagccattgtacccggctttcagcatttttaatatatatagtatttcctctgtaaaaaagtacttcatcattcaccaaaatggcaagattaaaaaataataataaagcactttagagtgtattttatttttttatttttttgagacggaatctcgctctgtcgcccaggctggagtgcagtggcgtgatctcggctcactgcaacctccgcctccggttcaagtgattttccggcctcagtctcccaagtagctgggattacaggcatgcaccaccatgcccggctaatctttgtatttttagtagagacagggtttcatcatgttggccaggctggtctcgaactcctgacctcaagtgatccacccacctcggccttccaaagtgcaaggattacaggcgtgagccaccacacccagcccagagtgtattttaaatatgcatgcttttcaatatatataatcataccactgctatctttcataaaaaccgacattgatttgttaatatcaggtatccagacagtgtcgaaattccctatttgtttcataaatggaaaataagttgtgtctacttcataatggagggcagagcaggacttcttttttcctcttcagaacattttctgctttctagagaaatgtggataactctcggggaccaaaggagaccagtgtcagtagagtacaatcctttttttatgttcttttctgcagatacagttggtcccacctggacagatccagatccagggtggacaggctgtgcaggtgcagggccagcagggccagacccagcagatcatcatccagcagccccagacggctgtcactgctggccagactcaggtaattccactagctctgtcacacaggagcaaaactgatttggaagagtcagataactgagtcagatatttcatgtatagcatgtatagtagaaaaggggatgaaaaccataaaaaaatatatttttggccgggcgcggtggctcatgcctgtaatcccagcactttgagaggccgaggcaagctgatcacaaggtcaagagatcaagaacatcctggccaacatggtgaagccccgtcaaaatacaaaaattaggtgggcatggtggcgcatgcctgtaatcccagctactcgggaggctgaggcagagaatcgcttgaacccaggaggcggaggttgcagtgagctgagattgcgccactgcactgcactccagcctggcgacagagtgagactctgtctcaaaaaaataatttttttttttaaggactacatcgttctttgttagtatctttgggatctgttgaattgtgtcattacttatttcctccagacacagcagcagattgctgtccagggacagcaagtggcacagactgctgaagggcagaccatcgtctatcaaccagttaatgcagatggcaccattctccagcaaggtaagtgtacccataagcttccctaggactttttggggcaacttttttgtcccttagacaactgacatctttagaatttgagtggtgaacttgacactacatattttttggacaaaaaaaaaaaagatttcctctagctctccattgattgttggtttcttgtcaccatctgtgaccaacagtgattccatgtgtagcagtttctatagtggttgctaatctagggattgtgtaagcttttagggaagaagtgtttctaaacagaagaatagaaatagggagttcattggtaaagagagaaatagatcaaaaatcaagttggctttagagtgctattgctgcttatgtttttttctgggtcattccattactttaaatgactattatgtatacagcacttttactaagaagggtcctcaaagagcctctagtctagtaagaaagacgtgaacaaataaatacaatgcagggccctcatggaagtatgttctaggaatagataacataaataatagatgtttggtctgggaggaggagtgcagaaactgaacttgaaggcttttggaagcacctgttagtcaaatagttaaatcaaaaaaggacatctttgttagattccatgactttgtgattgcaaatttgcaatatacaggatccagagagtgcactaactgtgtgctcttgtattactccagggaggccctgaactggattgagcccaggcaagagctcaaacagaatggtgaacaaatcctcaagtgctgctattgatagtctggggacttggaatgcttggtttaattttaagttttaatactacaactgactcattgtcagtttgagataaacaaagtataagttttaaaatctctgtcctgaagcagattgctcattatgtacaagagcagtaggtatagctgtagtcagactgacctgtagaagaggaggcctccaaaccttttcaccttttgaaaactgctaaggatagagttactcaaaactgggacctagacagttaatagaatttcaaagattgtgattacttagattatatatagcacaccacagtgggagagtactttttctccccttgtgtttttcagtgtgttttgccaggatcggtgagtgtataccagatagaagagggactaactatgttcccttctttctgttctgtgtgcctgttttttgtttgttttatgttttgttttcttaaagttacagtccctgtttcaggcatgatcactatcccagcagccagtttggcaggagcacagattgttcaaacaggagccaataccaacacaaccagcagtgggcaagggactgtcactgtgacactaccagtggcaggcaatgtggtcaattcaggagggatggtcatggtaagaaaatgtatttttcagctttgtctttgaaattttcttgaacatgcaacttgatgcctcctaaaatttattatgttgacctcttgggattgagatcgatccttaaggcactgtcggtaatctactttgacaataacattatgacaaaccataattcattctgagcacctactatgtgccagggactattcaccagggactattctagatgctggagataaagcaatggataaatagtgattttatggaattcttttcagaattcaaataacgaagggaattatatactaatctttgagaagtggaaagtagtattgcccatgatggacaaaataagaaataagctaaaaattagaaagattgtaattgatagagaaaccaaaaaaaaagtgtcatgtaaatgtattgggaagataggaagatttgggtggtgtaactgaaagctaaatcctcatatgtcaaaataggatgttaaaatgcataaattaagaatgagtaacagaagtctgcacagaggtggaggaagctatgaaaagaaacagaaccaaccctggctcagtggcatgcacctgtagtcctagctacttgggaggctaatccaggaggatggcttaagtccaggagtttgagctcagcctgggcaatgtagagagacctcgtttctacgaattgaatgaaaaataaataatttttataaaagattcaatacagttattcaaagcggttgtatttgggaaagagctgtggggtacaggactctgttacttgtttttacctacatttagtacagtgttttggtgttttttaagaaaaattaggattgaattataagttaactattatttttataaatataggcatttagtagcacttggtctatctatttttgtgctgtttttttgtcttatgactactgttcctgaccattagatggcagcagaaatatctagagccatgggtggacatgaattagggcatggttatatagtttctcagagtggcacctgaatctcctatgacacagtcatctggggtgtttgtttaaagtgcagatctttagtataaatttctccagggatccgcatttacccaagtaccctataaaaattactttttgtggcatttacaaaaaaaatggatgaagaggaaccaagaaactgtttctatgtccatacttcatgccaccaataagctctggtttcctgttcacacagatggttcctggggctggctctgtgcctgctatccaaagaatccctctacctggagcagagatgcttgaagaagagcctctctacgtgaatgccaaacaataccaccgtattcttaagaggaggcaagcccgagctaaactagaggcagaagggaaaattccaaaggagagaagggtatgtataacattgggaaggatataggaaaggagaatagcagggttctacttttgaaattatcttttatatggcttgttttctcacgtaccttccaaacaattgacgttagatacttgttgtctcttttgtaagagttagcatttgttattactaatatgcagctgcagttataataacgaaaacaaacagtggcttaaataagatgttattccttttcatacataaaagtagtccagagataaattatcctggactggtagcacattttcacagttctcaagacctgtttcactgctttaatattgctagtgtgctgttcatggtccaagattcctgcttaggctccagcctaggaagaaagggaacaagaaaggtaccctttcttttttttttttttcctgagactcagtcttgctctgtcatccaggccggagtgcagtggcacaatctcagctcactgcaacctgcaccttccatgttcaagtgattctcctgcctcagcctcctgagtagctgggattacaggtgtgcgccaccacgcccagcttatttttgtgtttttagtagagacggggtttcaccatgttggccaggctggtctcgaactcctgacctcaggtgatccacctgcctgggcctcccaaagtgccgggattataggcgtgagccaccatacccggccaggtaccctttctttcaaggaaactttgaagaagttgtgtaccttccactagccggaatttagttacctgatcacacctaacatgcagataaggctaggaaagtccagcctggtgtggtggcaaatgcctgtagtcctacttggaaggcagaggcaggaggatcacatgagccgaggaattcaaggctgcagtgattcatgatcatgccactgcagtccaacagcaagggtgtcagagtgaaaccctgtttctagaaaataataataataaactttaatgctaggaaagtctttttactgaacactcatttgctcaaacgaaatttggcctgttattaaagcagaggaaagtgtatatattgtgaagtgtaggtggtagtctgttattttttttaaaaaaaattcatactataagcattcacagtcttacagtagttatatatggttagctatattacttactaggtgttttctccaaagcttccatcgtcattctaagtcataattgtcccttgtgactttgatcccagctgtcttaaactttggagaatggaatttgtgcactagataactgtgctggttctggatagtattaatagttaaatggttttatttctcgttttagaaatacctgcatgagtctcggcaccgtcatgccatggcacggaagcgtggtgaaggtggacgatttttctctccaaaggaaaaggatagtccccatatgcaggtaggaagacatatacattttattcttctctttattaccttgtattgacttgagttgaagccttcagcagtgtcctcttgctattttcctactctgggactactcacattctctaaactggatgcaatcttatgtctctttagattatcttttatcttaaaaccactaggccagacttggtggctcatgcctgtaatcccaacactttgggaggctgaggtgggaagcccaggatttcaagaccagcctgggcaacatggcaaaactccatctctacaaaaaaatacaaaaactagccaggcctggtgatgcatgcctgtagtcccagctacttggagggttgagatgctcttcgtctttgtcacttattactattcattctttcttgaaaatcacacttttcttaattttcaaggaacaagttttatttttattgaacaggttttattaccccatcacaaatataatttgaatgtttacttttttcccttctaactgatgtgagcctggtctaatcctctcttctttggcttagatttataaaatagctgcttaatttggtttcccttcttccacttttgttcccctctagcctactctccacatcctagtgtgatctttttaaaatgtttatcctatcaagtccctgttctgctcaagctccttcaacccctaccctttcccatttgcacttagactgacatccaaagtgcttactactatgcccagcaaagccttacatgctccagctcctgtctacctctaactgcatttctacttcttggtctctatgctgctgtttactgttcattggtctacttcctgccacgggtctttgtccttagaattttcagtctgtatgccctttatctttttcatgcatgtctatctccctatctgttaggtctgggtttaattaaataccctatctagaatagatctcttctctctcagtatgttcttacaacatcttttctttttttggaggcagtggtgtgattatggctcactttagtcttgacctcccagctcaagtgatcctcccactttaggctcccgagtagctgggactatagccacgcaccaccatgcccagctaatttttaaattttttgtagaaatggagtctcactttgttgcccaggcaggtctcaaactcctaggctcaagcgatcctctcgccttggcctcccaaagtgctaggattacaggcgcacaccattgcacttggcccttttctttacagtgtaataatatttaagttgttgaatttttcaagattgtttccttcactagactgtaagttgtatagagggtagaggattgtttcgttctctgttatatttattggacttaattctatttaagtaagttgtatttaagtactgacttagatgtatttgttgggtttagtatccagttctgaaccaagcaatcagtgtttcttgaattaatagattcctcccatttgctgatactccattctatattaacatcacattccacttgcactattgcaatatccatcaaattaatctccagtctcctctaattggccttatatagtacttatacagtacatggttaaagtgttttttttaacctgccagtccccaggtcaaggatgcatgctattaatagttctcatttcttaactgcatcaaatctcaaactatttctgtataacatctaagcaactttgccttatcaccccctcaacaatcaaactaggtttcctcagtgtccccacacatgaacactaacaactctttcagtgctattaatcctcacctgtagtgtgagagcccctcctttctcattgctattcattcataacggtgtatgaatgtgggcctgacagctattgtggcaggagggcattgtgccaggaactctcctcattctgtgtgctaacaatatgatcttggtcaattcagcctcttttatttttatctgtaaagtggaatactgttgatacttcacagcaatgttgtagggatttcattcagtaatccacattaggcatctgtgtagcaccatacctagtgcatggtgagttcagtaaatgctagttgtttttgctcattgttcaagacccagttccagtcttccatctccagaaggctttcagctttttctcagatcctgcctaccaaggcttcagagccttggtatgggggaactaaaggtggttcttgcggagtgttgcaaaaagcttccaaggatttatccttgtgttaacacggtaggtcttaagtgagaaacagcatatagagtttagtggaaagaagatgaaatgggagtcaggagatttgggagttagcccttgctggactcctaactttctgaccctgaccctagtccacgcaaatcactttacccatctggccttcagatttatctgtaaaacgagtacattaaagtgtatagattctaatgattctttctagccctgctaagtactcagtatttaaatgatgatcaaaaaacagtgacaaaaatacagcatgacatggtttctctgggtcttttccttagacacctgaatctgaatactcttaacccttaagtatagagaacaacacaaggttcttaggaaagagatacactaacagccctgcagtgtttcaccatggagtgcaggccagactttaaattattttaagaataaggtttattgtctcttctttcctaatggggctacactttaagccatgtatgcagacttaagatgtattacaagcctttgatttacttggtaaagttatgtgtattctcttggggggataagtagtgagagccatgagttcctgttgcttttgcaaaggactttaatcatcatgtcatctttgtctctaggatccaaaccaagccgatgaagaagcaatgacacagatcatccgagtgtcctaaccccacgccatgtgatggagctgatcaaggtcatgtttctcactgttccaggaaattgatcaactcttccaatgggacattgatgatcacattctgccctttactacaggacagaaaccacttagtttttaataagtggctcagtattacaattgcagcgatgcctggcaaattgaagttgcaagcctttgtcttactctttcagtcaggacctatttcagactgttgatgacattgacatttcatggattcggatgatgcaaggagacacatgccaccccagcagtacacaaagcacttaccttgactggtgaagtcagccagccatctcagcagggaagaacaaccttctcaaccaaaactgcaatcaggaaagcagcagcccactccttcccatggaatctagacagcatttatccctctggtgggggaatctcacactgactaactgaatggacgctttgtattcagagatggcttccaggcaaggaagttctatcttgtgatacggaaacaataaattcctgagatacattcttccaatctgtggtaataataagaattcctctctgcccagatggtaggttgatatttctggactctagccaagaaaaagctaattctggggatagaatgataaaagactcaagcactaaaaatatacattgccgaatctctttttctagctttgaaaagttgtggcctgcttgtccctctgttgactggtcatctggaccatcgtacttgctgtggctacttctaagacaatgtagagggttattaaaccttgaaactgcctttcctaagtagagaacaagactattcaacaacttctttgctgaagcactgaggagatttgtaatactcctaaaggaagggccaaactagagattttcaatcatagactttgtgacagcatttggggaactaaaagattcatgtgtttcagcctagtgggagagagtgggggagaggaagagagagagagagcatgtatacccgtatgttatcatagagcacgattctccagtggatggatacctggaatggatcattaagatgaagagagtaattcacatttactctagaacctttaacaagcactgaaaggaagaagcctgagatttgatccttgacaatttctggaaagcactggtcagtcacactgtcctggacagagtccaagttacccactaaagcttgaggtggatgttggcttcactcctgcagcacaatgctggccctagaaagcgagcattttcattcttcccatggcagctgattctttggtgccagttttcatgttttctccataggccttgtgcagaaaggttttctcattgcatccatactgtgagaataaactgcagactgaaagaaacatgcctgcagggtcaggaactgggccactgttcccagaacgggttgtgcctcagaaatctatttctcttttagatgttgaaccctgagagaactaagatgatatttcagaagagttggctgccttctctggaaacaaggaaaacccaataattccgaggaacattgggggttaaataccaagaataaaaattggttcttctttgacttcagcttaactgtattaagacagaaattaagccctctaaaaacaccacaaagagagatgattgtaatgatagaaatagaggtacagagctatgcaaaggaaacaggaagtgaaatattcctagtcccagggatctggtaatcgctcctggcttccagatgtcaaaggactgatcctttggtaagctcactagaaacttctagctctacaagagtttgggatattaatgttattcagtaagtcccaagtttttcagagaatagattactaacaatgaggaatttatattccttggttaatttaggagtctaagatgcagagttcagaaagaaattactcagacctaactttgagtgcttaagctgccaacagttagaagatgctatttatttgtgtctgtaagtttgtacatagtaatgccagccttgttgctgaattttttatttggggggagatgactttgaattttgtttgaaatgcttcagttgtcattttgtcattgcatttcaaatagctcatgacccttttcttgtggtcactttggcacaccatagtagcccacaaagtgggggcagggtattgacatttggattttttctttgatactagttcttttattcatttttatttgtgactgtagtgataactttacagatggagaaagagtgaatggatgaatgaataattggtttaatgcctagttatgcaacttgagtgcttttttttttttttgcaggataattttaagtgtatatattttaactgcactggtacattgaacatgtcagtgtcgatgccactggaccaacagagcattttgtggctatagggtgcctgataataatgtcttgatttttctttgggattcaactatatcgaaggtttttcccccagcagtatgggggcgtacaggtgatcgatcattaatgtcattgcaattgttattttttaaaataaatttataaaaataaccgaaaagtaatgtgacttttgaggaatctgcaactcctgggttctagtttgtgtttccagtgttgaaattttgatctcccccgacaagacttgtctgcatggacggtgtctctgtaaacagtatcaaacttgtaatgtctgagcctcttagctttatctccccttaatttcttcccttttggcccttccaccctgttgaggagattttttctgtcacctgcaggctgatcatacatttgatgctactactgaaagtgtttatcaaaatgtgatgaagtaattccatgaggaaaattagccgttatcacaaaaacagccttaagtattgtagaatttcaggtagtgaagatgtactatttacgttttgttagattttgttttggcagaagaccaaaacaaaagtacttttctgattgttaaaaatccacagcatgctcaccttgttactgttttaccttacggtcgctgggaatctaagcaacaaagactagaagcctccgatatgccattatcaacacacaagagacaaacagcccgaggaagcactcaatgatgagagcagtagacctgccctggcagatgagagaggagaaactctccacaatgaaggaaaagcactgacagtatttgatagctttagtcaaactgtgcttgagtttggcttagatttatgccagtggaacctgtccttaccaaattcagagatgacccaagattctactctgtggtatgagggaaagacctctcgatatttatctcacaccaacggctttatcgtaggagcgtcttcgcctcccccgtttccagtagaaaagacagctttgctcctttgaaagcgcagaccgccgcacctccagccccttctccccggggaagtaggccccgctaagaatgtgggaaggtggtggggcggcgactgaagtcgcttccgattggcgttgtcccaaggaagcctgcgcggattgatcggcggcaggcctccaatagagcctgctaggcggattggctgctacgcggctgggccctgtttccggtacctaggcgggcagccatggtgaccggcgagcggcatgcgacgccgcctctgtggcctgtggaggcccgcttggcggcgctgcttcccgacctactggtctttcggaagcctcggggatgggaacccgagctcgccacggcccagggcgtcctcctaggcgtccatgtgacgggtgagggcgacggccggcacttgcacttaagtctcctggcctgcgggagaggcggccgttgggtctaagcccctggaggcctcgacggttacaggcctagcctcccgcgagctaaggcacagtttaacttcgtgctgcggcttccttaggaaactttgagtatcttcgttttagcgtgggaggacatcttttgggatgaaccggctcagtccttgagctcaccccaaagatgatgaaattgaaactcagaggaaaggatttttacaggaccacgccccgggctttgaacccgtttttcccaaccccgagcattttctattaagcgttctgtttcaattattttattcgttcagttaattcgttcttggcgtcataagtatatgcccgccgttgttctggccgtagctatctagcagccactccgcgagtcgttcatttaacaaatacttactctgtgtcagggatatgaagatgggtaataccaggtgcctgtcctcactgtgtgagtggttctctagccagacatgaggagggatcctattgtttcccatagctaggcagcctaagagagtaggggaaagagctggctccagatgaaaagggcaccatctccagctcttggaagcagagagggtggtcctttggattcccagtggcagcagcaaccaacctggcccttagtagtttctaagttacaccatgttaatggataaaggaattactcagcttgaagggatctgtttcctttacactggcctgatgtgtggggagaaaggggccaaaaagtttaggatttggagttaacatcgtaatttctgctttgttggtcagggtttacagcattaatggacaggttcaccctgacctacaagtcggaacgtgacatggacaaactggcccatatcttcagttattacattagtgacatcgtggagcgtgagtgatcattgtagggtaacaaggtgtggtgctgggctcctgggggtttataaaagaagggggccagaagtactttaaaacaggtaccaaagggtcattcctttagcatcattcatctttggtttcttcaagttgccactgaaaagctagacctttgcctattatctgctaatctacccagtctcacattctattgactcattgttcaaagggggggcaggaggagctaatttcctttgcacatttgtattttatttcaaaataaagtattctcttctaacaataacgtatctcaagtgtgtattcagacaaaatttataaaacatctttttattattatattttgatcctgtgaggaaggaataggtgttttcttattttctgccatgtattaagcttttagatatttgccagatatccagtatctggaaaaaactcatttatgtagtacccatgttttgagtacctaccctgtgacatggactgtaataggtgcaggcagggcaagaacccactcttgaactttttagttaggcctacccaacagaaattactctgaccttataccttttagtacttacgtaacattctcatcctttactgacagtgccctgtatgcttccgtccatcattctgagattcaccagaataattactttgaggcatctccgttaagaatttgattatttgacttacctcttatccttaaggaacacatggaaggtcgtttgctttttcttataggtttggatgaaggggaagataaacattctatatcgtgtatgtactctaataccagcaacttctgggtactagaactacaggggaaagtaagacagagtaccctcgtggagtttccattttagtgggacagacaataaacacaataattgtagcttatatattctatcaaggaaataaacatagtatagtggtaaaaaaaaaacacaaaaaataattttagggtaggggagtatatgagacagggtggtcataggctcctctgaggaggtattatttaagctgacacttgaaggatgaggggaacagcttgtgaagaactaggggtaaagcatttcagacagaataccaagtgcaaaggtcctgagacaggagaaagctcggcatgctctaggagctaaaagaaggccagtgcaggccaaaacgtagctcgcagggtgaagagtggtttgaggcaaggttgggggatggtagctatgagaccaccacgctctgtagtccatagtgaagagttggaattatatatttctgtataaaggaaaactgtggaaaggtctagcaggggagtaatatgatctgattaacactttaaagctgattttggctaccttgtggagattgaatgctggtggaaagtgaatttaagaatagaagctggaagaggcaattgtcctggaaagatgttggagatttggtctagagcagtggttctcaacctcagctgtggttgcctgaggagctttttaattgttttttcttttttctttttttttttttgtaagagactggggtctcagtatgttgccaagtttgtcttgaactctagagcttaaaagattcttctgcctcaacctctcaaatagctaggactgcaggtaccataccaccttgtctaacaaaaaatcttaatgcctaagcttcaccccaggccatttaaatcggactttcttaaggttggcccaggaataagaccttttaaagtttcataggcaattccaatgtgcggtcaagactgaagattgttggtgtagaggtatggcaggggagctgtgtggggtagattaacctgaaatatattttgcaggttcaacagacaggagttgctaatacgttgaatttcagtgggaagtggtgagaaaaaggactcagttttttggctttcataaatgaattgatcgtgtcatttaccaagacaggaaagactgaacattgagaaagaaaatcaagagttctgttttgagtatgttgagtttgagatgccaataagtcattcaagtggagaatgactccattcaagtggagaatccagctatgattgagcctggagctcagagaagagatccctgttagagatgaaaatgtgagttgatggcataaagtgggacttaaagttaagaaccgattgagttcatgttgggagagcataaataaagagaaagagcctttggctgaggcttgaggaactccaggggaggattatgataagggagaaagaacctgaaaaagagactacaaacagccagtgaggtaggatattgtggtgttcctgaagccaaaggagaggtagtgtctctagaagaaagctgcagctagctgggttgaaaatgacagctgtcaagtacagtgaggtcagagaggtattgaatttagcaagattaatgctgttgatgaccttgataatttgaagtggtggaggtagaagtcagagtggagtaagctgagaaaaagaatgacagagaaaacatttaagaggaagagtaaatgggagatgaggaaaatatatatagccaacttttttgagatttgggggttttgtttgttgtgaatgtagcaggaaaaaaaatggagctaataggcagaagataaggtagaaccaagaatatgtgggttatttttgtgtgttttggttttgttttttaagctattgatgagaatatttcagtagagagattaggaacggtgtgaagttcttgagaaggtaaaaggggataagattcctatcacaaatggggtggctttgaagagagcaggaattcttccattttagaaacgatgtatgtaggtgcagatagatttggggagaaaatgaaaagaaggaagaaggagcctgagtcttggagtgagcaaatggacaagaatgatgtcaggataaactcagtaggccattcttttgaccatatatgattctgccctgatctggtttatatctgattttgactcattttcctctctcttccttacttgatttcagatgttctctgttttggaggggatatcctaaatatcacaggtatttttttagtttttctgaatacttaaaagactgagtgaggaggactatatttaggtggaattcagcatattggtttattcagcattgtttgattaataggtactggaccctggggatacaaagatgaggaagacatagtctgtgcctcaaaggatcccccagtctaatggaaaagctttgcccaaattaaactctcacatgctttgcatttttgtttagattgaaggacagcaaaataagtgccaataaagcgttcttgagaaaactaatgagaaatttggtcattaatagcagaagctaagcatgagatggggaggagttaagcatgtcctatctggagaactcaggatcactaacagctgtatgccccggagttggcctgtcttcttatttaaacataataaaaccagccatcaaattagatatgaacttgaacccacattttatgaatcttttgctagtacctctcctcctctgttagtatactggtggaaggaagattaccaaaaatatccttaggatcatttaaacttctacctagttacgtttttactgaatgattttgaggatctgaagcagtattttaacctagcataatgtatacagccaagaaaccttgcctgataacttacttgatatccacactgggtcaagttgatcttctgcattactgggactttgccctggaccaagtaagtctagatatttggtccccatcagcctatcctgtgtgtctgcagggaacatgctcctggcactctggagagtagaacaaaatcaactgagtgacatcattaccttggtggcaaaatgcagtctggagatacaggagaaatttgggatctatcataccagggaaggccaggacctgcagttaaagataggtagtacctcctaaaagagtgatccagttgggcaagggggaacccactataaaaacctcaaaagataaatgataaactgggaaaaaatgtttgcaattcatatagacaaagggtgaattgctctactagggaaagagcacttagaaatcaagaaaacaatagtactcttaagagaaaaattggacaaaggacatgagtaaattgtatatagacaaggaaatgcatgtcttttaacacgtaaaaagatgatcaacattcataataagaaaaatgccaattggaagtacactgactacctgtcttacctatagataggcaaaacttcagatgctggacaatgtactctttggtgagtctgaggaatgagctttttcttactgtgagtgaacaacggtataaggtgatttggcaatctttatttatttttattgtctattgtattttttatgtcaacaaaaactaaaccatataaaaatatatattaaaaagtcttgttttcacttatataccatctatactatttactcttacaagtgcatttattccttaacctagcaatccttctggacatctataggtatacgttcacacatctgaaatgttgcatgtgcaaggttattgattgtaatatggtttgtaattttaaaacattgaaaactatttataggagactggttaagtaaataatatgtatactcaataagattacctgcaacttaaaaaaaataagatgtcttgatatggcagtatctccaagatacagttaagtgaaaaaaagtaagatacaaaacagcatgtttagtatgctaccatttgtgtaaggaggaaaataagaatttttcttatttgtttatatctttttttttttttgagatggagtcttgctctgtcacccaggctggagtgcagtggcgccatctcagctcactgcaagctccacctcccgggatcacaccattctcctgcctcagcctcctactgagtagctgggactacaggagcctgccaccacgcctggctaatttttttgtatttttagtagagacagggtttcaccgtgttagccaggatgttctcgatctcctgacctcgtgttccgcccgcctcggcctcccaaagtgctggaattacagacttgagccaccgcacctggcctatttgtttatatcttgtataaagaaacactggaaaaaatatataagaaactaataaaattactaatatcaggaaaatagtaaagatggtcatgtaggtagaagcaagattttaaaatacatattctttcatatagtttagtttttgaactatgttattgcttgacagaatcaaaaatataatacaatataataaaaattaaaaagctacatacaggggccaaagtttcaccaatggcagagtcaggattggaggcgaagctcaatatacaaagctccttcacaagggttcagaaaactcctcaagggcaaaagttggctccagctattcttttatgttttgaggagcagtggtaaaggattatattctgtcttatatggcatctcttttgtcctgccgtcttttttgtttcttttggtttttgttgtattaaggataattgatactatacattggcatatttatacacttttgaaaccatcaccacaataaagatagtgaacatacttatcactcaaaaagtctcctcgtgcccctttgtacattcttccactactctccttcaccatctccagacagacaaaatgtccatctccaggtgtattatataagagaaggaaatctgggggaagaattttttttttttttttttgagatggagtctcactctgttgcccaggctggcatgcagtggcacggtcttggctcactgcaacctccgcctccagggttcaagcaattcttctgcctaagcctcctgagtagctgggattataggtgtgcaccaccacgcctggctaatttttttttttttttttgtatttttagtagagacagggtttcaccatgttggtcaggctagtctcgagttcccaacctcaggtcatctgcccgtctcagcctcccaaagtgctgggattacaggcgtgagccaccgtgcctggccgtaaggtattatttttaaaggttagctcacctaagacttccgcagctgagggcagtaacaagataggcatgatgcacagagccatgtggggattccagacccctcctgttgcatagtttcccagttgaatttgactcttctccatttatctcatttttttctggataggtctacctgcaagtcggatttcccaggttattgttggagatgagcggcagcaatacctcttggtgattgggcaggttgtagtgatgtccagttagctcagcgtttggctcaggcgaatgaaattgtcctatcctggaactgctggatgctttgcaagcagtatatgtttgaagtggcaatcatgagggaggatgaagctgtgaaggtaggaggctagcttcctgtactgccattctgaaaaggccttcctagtacacagcgcaatgctctggtagtgttcacatattgcctggccaaaccaatgaccattggaactcaatttaggagggaggctgggaatattctcctatgaagatagatgaggtagaacagtgaggctgaggagataaaaggcaaacaagggcaatagaatcctcagcctttcttgtgtgggggcacagaattaaacagtttcctttctgtagttaagagatatgtggatc

SEQ ID NO: 1520 - DNA, 2237 bp, Homo sapiens
ggcacgaggcaatggtgtgatcttggctctttgcaacctctgcctcctgggctcaagccttcctcccacctgaacctcccaagtagcgggactgcagggtgaaggccatgccgcctcctgggaaagttccccgaaaggagaatctgtggctacagtgtgagtgggggtcctgctcctttgtgtgctcaaccatggaaaagttctttgagcatgtcactcagcacctgcagcagcacctgcatggctctggggaggaggaggaagaggaagaggaggatgacccacttgaggaagaattctcctgcttgtggcaggaatgtggcttttgttctctggacagttctgctgacctcatccgccatgtctacttccactgctaccacaccaagctgaaacagtgggggctgcaggccttgcaaagccaggctgaccttggcccctgcatcctggacttccagagccggaacgtcatccctgatatccctgaccacttcctgtgtctgtgggagcactgtgagaattccttcgacaatcctgagtggttttatcggcatgtggaagcacacagtctgtgctgtgaatacgaagcagtcggcaaggacaacccggtggtgctgtgtggctggaaaggctgtacctgcaccttcaaggaccgcagtaaacttcgagagcacctccgcagccatacccaggagaaagtggtagcctgccccacctgtgggggcatgtttgccaacaataccaagttcttagatcacatccgtcgccagacctcattggatcagcagcacttccagtgttctcactgttccaagagatttgccacagagcggctattgcgggaccacatgcgcaaccatgtgaatcactataagtgccctctgtgtgacatgacctgcccgctgccttcctccctccgcaaccacatgcgctttcgtcacagtgaggaccggccctttaaatgtgactgttgtgactacagctgcaagaatcttattgacctccagaagcacctggatacccacagcgaggagccagcctacaggtgtgattttgagaactgcaccttcagtgcccgatccctctgctctatcaagtcccattaccgcaaagtacatgaaggagactctgagccaaggtacaaatgtcatgtgtgtgacaaatgcttcacacggggcaacaacctcaccgtgcaccttcgcaagaagcaccagttcaagtggccctcagggcatccccgttttcggtacaaggaacatgaagatggctatatgcggctgcagctggttcgctacgagagtgtagagctgacacagcaactgctgcggcaaccacaagagggatcgggcctgggaacgtcgctgaacgagagcagcctgcagggcattattctagaaacagtgccaggggagccaggacgtaaggaagaggaagaggagggcaagggtagcgaagggacagccctctcagcctctcaggacaaccccagttctgtcatccacgtggtgaatcagaccaatgcccaaggccagcaagagattgtctactatgtgctgtctgaagccccaggggagcctcccccagtccctgagccaccttcagggggcatcatggaaaagcttcaaggaatagctgaggagccagagatccagatggtttgaaggccgcagagccagaccatttcttccccaggtcctgaagtttgagccaggcaagtggcagtgcccctagtgggcagccgttgccaatggatgcctttaggagtggtgccgagagcagtgtggtccactctggcctgggtttgcatcattctgcagactctaaagacttcccttttctgccagactacattttgtggggagcctgaggactctggattctttgaggggatcctggatgtgtgtgttcttgttaaagaggctgttatcaggcttaactataaccctcaagatctgcttgacagtgattaaatccttagctcacatccattcccatctttcgggctccttaggcccaaggatggcatgtgactggtccctgcaagggtcctttctttgtcaccagccaaggcattgataaccaagtagccattttcctcttaaggtttcctctacaaccccaaggactttcatgattatcctcagggacaggattggaggcattgagcgtgtttattaacaaattgtttttggtaataaaataaatgcttggactcttaaaaaaaaaaaaaaaaaaaa

SEQ ID NO: 1521 - protein, 517 aa, Homo sapiens
MPPPGKVPRKENLWLQCEWGSCSFVCSTMEKFFEHVTQHLQQHLHGSGEEEEEEEEDDPLEEEFSCLWQECGFCSLDSSADLIRHVYFHCYHTKLKQWGLQALQSQADLGPCILDFQSRNVIPDIPDHFLCLWEHCENSFDNPEWFYRHVEAHSLCCEYEAVGKDNPVVLCGWKGCTCTFKDRSKLREHLRSHTQEKVVACPTCGGMFANNTKFLDHIRRQTSLDQQHFQCSHCSKRFATERLLRDHMRNHVNHYKCPLCDMTCPLPSSLRNHMRFRHSEDRPFKCDCCDYSCKNLIDLQKHLDTHSEEPAYRCDFENCTFSARSLCSIKSHYRKVHEGDSEPRYKCHVCDKCFTRGNNLTVHLRKKHQFKWPSGHPRFRYKEHEDGYMRLQLVRYESVELTQQLLRQPQEGSGLGTSLNESSLQGIILETVPGEPGRKEEEEEGKGSEGTALSASQDNPSSVIHVVNQTNAQGQQEIVYYVLSEAPGEPPPVPEPPSGGIMEKLQGIAEEPEIQMV

SEQ ID NO: 1522 - DNA, 4915 bp, Homo sapiens
gagaatcagagagagagagagagtctgtgtctctgggaaagaagaacatctctgcttcacagtgatttgcgctgggggagaggcatcaattggcttcggacccaagggggagacgagaccaggtcaccccggttaagaccaagtgagcgttgcccctccctctcccaactctctacccgggaatgtctcggcgaaagcagcggaaaccccaacagttaatctcggactgcgaaggtcccagcgcgtctgagaacggtgatgctagcgaggaggatcacccccaagtctgtgccaagtgctgcgcacaattcactgacccaactgaattcctcgcccaccagaacgcatgttctactgaccctcctgtaatggtgataattgggggccaggagaaccccaacaactcttcggcctcctctgaaccccggcctgagggtcacaataatcctcaggtcatggacacagagcatagcaaccccccagattctgggtcctccgtgcccacggatcccacctggggcccagagaggagaggagaggagtcttcagggcatttcctggtcgctgccacaggtacagcggctgggggaggcgggggcctgatcttggccagtcccaagctgggagcaaccccattacctccagaatcgacccctgcaccccctcctcctccaccaccccctccgcccccaggggtaggcagtggccacttgaatatccccctgatcttggaagagctacgggtgctgcagcagcggcagatccatcagatgcagatgactgagcaaatctgcaggcaggtgctgttgcttggctccttaggccagacggtgggtgcccctgccagtccctcagagctacctgggacagggactgcctcttccaccaagcccctactacccctcttcagccccatcaagcctgtccaaaccagcaagacactggcatcttcctcctcctcctcctcttcctcttcaggggcagaaacgcccaagcaggccttcttccacctttaccacccactggggtcacagcatcctttctctgctggaggggttgggcgaagccacaaacccacccctgccccttccccagccttgccaggcagcacagatcagctgattgcctcgcctcatctggcattcccaagcaccacgggactactggcagcacagtgtcttggggcagcccgaggccttgaggccactgcctccccagggctcctgaagccaaagaatggaagtggtgagctgagctacggagaagtgatgggtcccttggagaagcctggtggaaggcacaaatgccgcttctgtgccaaagtatttggcagtgacagtgccctgcagatccaccttcgttcccacacgggtgagaggccctataagtgcaatgtctgtggaaaccgttttaccacccgtggcaacctcaaagtgcatttccaccggcatcgtgagaagtacccacatgtgcagatgaacccacacccagtaccagagcacctagactatgtcattaccagcagtggcttgccttatggtatgtccgtgccaccagagaaggccgaggaggaggcagccactccaggtggaggggttgagcgcaagcctctggtggcctccacaacagcactcagtgccacagagagcctgactctgctctccaccagtgcaggcacagccacggctccaggactccctgctttcaataagtttgtgctcatgaaagcagtggaacccaagaataaagctgatgaaaacacccccccagggagtgagggctcagccatcagtggagtggcagaaagtagcacggcaactctcatgcaactaagtaagttgatgacttcactaccaagctgggcactgcttaccaaccacttcaagtccactggcagcttcccgcttcccctatgtgctagagccttgggggcctcaccctctgagacatcaaagctgcagcaactggtagaaaagattgaccggcaaggagctgtggcggtgacctcagctgcctcaggagcccccaccacctctgcccctgcaccttcatcctcagcctcttctggacctaaccagtgtgtcatctgtctccgagtgcttagctgtcctcgggccctacgccttcattatggccaacatggaggtgagaggcccttcaaatgcaaagtgtgtggcagagccttctccaccaggggtaatctgcgtgcacatttcgtgggccacaaggccagtccagctgcccgggcacagaattcctgccccatctgccagaagaagttcaccaatgctgtcactctgcagcagcatgtccggatgcacctggggggccagatccccaacggtggtactgcactccctgaaggtggaggagctgctcaggagaatggctccgagcaatctacagtctccggagcagggagtttcccccagcagcagtcccagcagccatcaccggaagaggagttgtctgaggaggaggaagaggaggatgaggaagaagaggaagatgtgactgatgaagattccctggcagggagaggctcagagagtggaggtgagaaggcaatatcagtgagaggtgattcagaagaggcatctggggcagaggaggaggtggggacagtggcggcagcagccacagctgggaaggagatggacagtaatgagaaaactactcaacagtcttctttgccaccaccaccaccacctgacagcctggatcagcctcagccaatggagcagggaagcagtggtgttttaggaggcaaggaagaggggggcaaaccggagagaagctcaagtccggcatcagcactcaccccagaaggggaagccaccagcgtgaccttggtagaggagctgagcctgcaggaggcaatgagaaaggagccaggagagagcagcagcagaaaggcctgcgaagtgtgtggccaggcctttccctcccaggcagctctggaggagcatcagaagacccaccccaaggaggggccgctcttcacttgtgttttctgcaggcagggctttcttgagcgggctaccctcaagaagcatatgctcctggcacaccaccaggtacagccctttgccccccatggccctcagaatattgctgctctttctctagtccctggctgttcgccttccatcacctccacagggctctccccctttccccgaaaagatgaccccacgatcccatgagcctgtttttctgtacctgctgctctttgtcccacagagcagaaacagcttcacaaaaggacctcccagagttatgagccctgattttgtctttttctctaagttcttaacatgttatgtccctagtggcttttctgtagtccctgagcttggaaattactgtgcttacaaggggatggccccctaaggaatttttcttccctcctcattctttgtacctgaggaacatagattctctgcagctttctcaaggggaaccctctccagcttccctggtgtgacccttcttccccctcctctctcctctccctttccctttggtaggtgcacctgagcacctacatttggcattgcagcctagccaaaaagggctggcagctgtctctggagggcccagtgccactcctctggggtgacctttctgctcagctggtgggtatgggtcccctatctttctagaaccagtatgtggcattcctgtcaaatgggctgcccatgaagccctggaattccagctccacctccactaccactccaagcctggccccaccagtgctgtttggcctaggaactgtggctgggaaggtgcctccaacaatgggatccagggaagccaaggagaagacagcccccctcctatttcagcctcctgcacccaaggcagtgcctgagaagcccatcatagacaagaagtagcaaactgtacattccttcttcctccccctgctccagaaggtgccggtactgaagatgctccagtaattggtgacccaaccctaggaagtagggagaaatgaaggaagggcataggaaattttcccaggtaaatcccctgatggtcacattaaggtaaaggttttggctggtcagtgtgccaagacctctccagcttctcattcatgatgacctctcaaagttgggaaacaagctgatttcttgccaagaggtctcccaggagatatttgggaaatgtgaagttcgtatctttaaggagcacttttggtcagcatggttgatgaactaatgatgagagagttaaggaatgttgctagaacatagggcttgctggtacctatgtgactaagaaagggacatgatgtaagggaaaaggcctcaaattcttgtgaatgtggacattctcgttaatattcttttgggctaatagtgacatagtgtgcagaggtgtaccagggatcatgggggatttcctagcactagtatgcttctagttttagataactccctcctttattccctggccccttgtattttccttatcttcctctttcaagacccctacccattttgcctatccgtaggctggggcttgtgtctttgtcattgtctggttcttaagagtcccagactttgggagaccagctccaggtggcgtcctccctgcctctccgtcttgtaatgagttgtagtatttactcttaacataggatcatttggaacaggagttctgaggaggagagagtgagggttttgctattgactgacttgaacgatggcttctcctcaagctgtaggctccagagcttcctaacctagtaaaatgtcaagaacagacgggagatattagtgtctttccctctatcattaaaggtgttttaaccaagaaaaaaagaaaaaaaaaaaaaaaaaaaaaaaaaaaaaaaaaaaaaaaaaaaaaaaaaaaaaaaaaaaaaaaaaaaaaaaaaaaaaaa

SEQ ID NO: 1523 - DNA, 1837 bp, Homo sapiens
acaaccgtaacagccaccagacaagcttcagtggccggcccttcacatccagacttgcctgagaggacccacctctgagtgtccagtggtcagttgccccaggatggggaccacagccagagcagccttggtcttgacctatttggctgttgcttctgctgcctctgagggaggcttcacggctacaggacagaggcagctgaggccagagcactttcaagaagttggctacgcagctcccccctccccacccctatcccgaagcctccccatggatcaccctgactcctctcagcatggccctccctttgagggacagagtcaagtgcagccccctccctctcaggaggccacccctctccaacaggaaaagctgctacctgcccaactccctgctgaaaaggaagtgggtccccctctccctcaggaagctgtccccctccaaaaagagctgccctctctccagcaccccaatgaacagaaggaaggaacgccagctccatttggggaccagagccatccagaacctgagtcctggaatgcagcccagcactgccaacaggaccggtcccaagggggctggggccaccggctggatggcttcccccctgggcggccttctccagacaatctgaaccaaatctgccttcctaaccgtcagcatgtggtatatggtccctggaacctaccacagtccagctactcccacctcactcgccagggtgagaccctcaatttcctggagattggatattcccgctgctgccactgccgcagccacacaaaccgcctagagtgtgccaaacttgtgtgggaggaagcaatgagccgattctgtgaggccgagttctcggtcaagacccgaccccactggtgctgcacgcggcagggggaggctcggttctcctgcttccaggaggaagctccccagccacactaccagctccgggcctgccccagccatcagcctgatatttcctcgggtcttgagctgcctttccctcctggggtgcccacattggacaatatcaagaacatctgccacctgaggcgcttccgctctgtgccacgcaacctgccagctactgaccccctacaaagggagctgctggcactgatccagctggagagggagttccagcgctgctgccgccaggggaacaatcacacctgtacatggaaggcctgggaggatacccttgacaaatactgtgaccgggagtatgctgtgaagacccaccaccacttgtgttgccgccaccctcccagccctactcgggatgagtgctttgcccgtcgggctccttaccccaactatgaccgggacatcttgaccattgacatcagtcgagtcacccccaacctcatgggccacctctgtggaaaccaaagagttctcaccaagcataaacatattcctgggctgatccacaacatgactgcccgctgctgtgacctgccatttccagaacaggcctgctgtgcagaggaggagaaattaaccttcatcaatgatctgtgtggtccccgacgtaacatctggcgagaccctgccctctgctgttacctgagtcctggggatgaacaggtcaactgcttcaacatcaattatctgaggaacgtggctctagtgtctggagacactgagaacgccaagggccagggggagcagggctcaactggaggaacaaatatcagctccacctctgagcccaaggaagaatgagtcaccccagagccctagagggtcagatggggggaaccccaccctgccccacccatctgaacactcattacactaaacacctcttggatttggaaaaaaaaaaaaaaaaaa

SEQ ID NO: 1524 - protein, 540 aa, Homo sapiens
MGTTARAALVLTYLAVASAASEGGFTATGQRQLRPEHFQEVGYAAPPSPPLSRSLPMDHPDSSQHGPPFEGQSQVQPPPSQEATPLQQEKLLPAQLPAEKEVGPPLPQEAVPLQKELPSLQHPNEQKEGTPAPFGDQSHPEPESWNAAQHCQQDRSQGGWGHRLDGFPPGRPSPDNLNQICLPNRQHVVYGPWNLPQSSYSHLTRQGETLNFLEIGYSRCCHCRSHTNRLECAKLVWEEAMSRFCEAEFSVKTRPHWCCTRQGEARFSCFQEEAPQPHYQLRACPSHQPDISSGLELPFPPGVPTLDNIKNICHLRRFRSVPRNLPATDPLQRELLALIQLEREFQRCCRQGNNHTCTWKAWEDTLDKYCDREYAVKTHHHLCCRHPPSPTRDECFARRAPYPNYDRDILTIDISRVTPNLMGHLCGNQRVLTKHKHIPGLIHNMTARCCDLPFPEQACCAEEEKLTFINDLCGPRRNIWRDPALCCYLSPGDEQVNCFNINYLRNVALVSGDTENAKGQGEQGSTGGTNISSTSEPKEE

SEQ ID NO: 1525 - DNA, 1462 bp, Homo sapiens
acaaccgtaacagccaccagacaagcttcagtggccggcccttcacatccagacttgcctgagaggacccacctctgagtgtccagtggtcagttgccccaggatggggaccacagccagagcagccttggtcttgacctatttggctgttgcttctgctgcctctgagggaggcttcacggctacaggacagaggcagctgaggccagagcactttcaagaagttggctacgcagctcccccctccccacccctatcccgaagcctccccatggatcaccctgactcctctcagcatggccctccctttgagggacagagtcaagtgcagccccctccctctcaggaggccacccctctccaacaggaaaagctgctacctgcccaactccctgctgaaaaggaagtgggtccccctctccctcaggaagctgtccccctccaaaaagagctgccctctctccagcaccccaatgaacagaaggaaggaacgccagctccatttggggaccagagccatccagaacctgagtcctggaatgcagcccagcactgccaacaggaccggtcccaagggggctggggccaccggctggatggcttcccccctgggcggccttctccagacaatctgaaccaaatctgccttcctaaccgtcagcatgtggtatatggtccctggaacctaccacagtccagctactcccacctcactcgccagggtgagaccctcaatttcctggagattggatattcccgctgctgccactgccgcagccacacaaaccgcctagagtgtgccaaacttgtgtgggaggatacccttgacaaatactgtgaccgggagtatgctgtgaagacccaccaccacttgtgttgccgccaccctcccagccctactcgggatgagtgctttgcccgtcgggctccttaccccaactatgaccgggacatcttgaccattgacatcagtcgagtcacccccaacctcatgggccacctctgtggaaaccaaagagttctcaccaagcataaacatattcctgggctgatccacaacatgactgcccgctgctgtgacctgccatttccagaacaggcctgctgtgcagaggaggagaaattaaccttcatcaatgatctgtgtggtccccgacgtaacatctggcgagaccctgccctctgctgttacctgagtcctggggatgaacaggtcaactgcttcaacatcaattatctgaggaacgtggctctagtgtctggagacactgagaacgccaagggccagggggagcagggctcaactggaggaacaaatatcagctccacctctgagcccaaggaagaatgagtcaccccagagccctagagggtcagatggggggaaccccaccctgccccacccatctgaacactcattacactaaacacctcttggatttggaaaaaaaaaaaaaaaaaa

SEQ ID NO: 1526 - protein, 415 aa, Homo sapiens
MGTTARAALVLTYLAVASAASEGGFTATGQRQLRPEHFQEVGYAAPPSPPLSRSLPMDHPDSSQHGPPFEGQSQVQPPPSQEATPLQQEKLLPAQLPAEKEVGPPLPQEAVPLQKELPSLQHPNEQKEGTPAPFGDQSHPEPESWNAAQHCQQDRSQGGWGHRLDGFPPGRPSPDNLNQICLPNRQHVVYGPWNLPQSSYSHLTRQGETLNFLEIGYSRCCHCRSHTNRLECAKLVWEDTLDKYCDREYAVKTHHHLCCRHPPSPTRDECFARRAPYPNYDRDILTIDISRVTPNLMGHLCGNQRVLTKHKHIPGLIHNMTARCCDLPFPEQACCAEEEKLTFINDLCGPRRNIWRDPALCCYLSPGDEQVNCFNINYLRNVALVSGDTENAKGQGEQGSTGGTNISSTSEPKEE

SEQ ID NO: 1527 - DNA, 1086 bp, Homo sapiens
ccccggcccacaagcccctgcagggagcgggcccgggcggcgcgcgatcgaggtcgggtcgccgtccagcctgcagcatgagcgcccccagcgcgacccccatcttcgcgcccggcgagaactgcagccccgcgtggggggcggcgcccgcggcctacgacgcagcggacacgcacctgcgcatcctgggcaagccggtgatggagcgctgggagaccccctatatgcacgcgctggccgccgccgcctcctccaaagggggccgggtcctggaggtgggctttggcatggccatcgcagcgtcaaaggtgcaggaggcgcccattgatgagcattggatcatcgagtgcaatgacggcgtcttccagcggctccgggactgggccccacggcagacacacaaggtcatccccttgaaaggcctgtgggaggatgtggcacccaccctgcctgacggtcactttgatgggatcctgtacgacacgtacccactctcggaggagacctggcacacacaccagttcaacttcatcaagaaccacgcctttcgcctgctgaagccggggggcgtcctcacctactgcaacctcacctcctggggggagctgatgaagtccaagtactcagacatcaccatcatgtttgaggagacgcaggtgcccgcgctgctggaggccggcttccggagggagaacatccgtacggaggtgatggcgctggtcccaccggccgactgccgctactacgccttcccacagatgatcacgcccctggtgaccaaaggctgagcccccaccccggcccggccacacccatgccctcctccgtgccttcctggccgggagtccagggtgtcgcaccagccctgggctgatcccagctgtgtgtcaccagaagctttcccggcttctctgtgaggggtcccaccagcccagggctgatcccagctgtgtgtcaccagcagctttcccagcttctctgtgagggtcactgctgcccactgcagggtccctgaggtgaagtaaacgccggcgctgggcttggccagtcggcagtgaaaaaaaaaaaaaaaaaaaaaaaaaaaaa

SEQ ID NO: 1528 - protein, 236 aa, Homo sapiens
MSAPSATPIFAPGENCSPAWGAAPAAYDAADTHLRILGKPVMERWETPYMHALAAAASSKGGRVLEVGFGMAIAASKVQEAPIDEHWIIECNDGVFQRLRDWAPRQTHKVIPLKGLWEDVAPTLPDGHFDGILYDTYPLSEETWHTHQFNFIKNHAFRLLKPGGVLTYCNLTSWGELMKSKYSDITIMFEETQVPALLEAGFRRENIRTEVMALVPPADCRYYAFPQMITPLVTKG

SEQ ID NO: 1529 - DNA, 960 bp, Homo sapiens
ccccggcccacaagcccctgcagggagcgggcccgggcggcgcgcgatcgaggtcgggtcgccgtccagcctgcagcatgagcgcccccagcgcgacccccatcttcgcgcccggcgagaactgcagccccgcgtggggggcggcgcccgcggcctacgacgcagcggacacgcacctgcgcatcctgggcaagccggtgatggagcgctgggagaccccctatatgcacgcgctggccgccgccgcctcctccaaagggggccgggtcctggaggtgggctttggcatggccatcgcagcgtcaaaggtgcaggaggcgcccattgatgagcattggatcatcgagtgcaatgacggcgtcttccagcggctccgggactgggccccacggcagacacacaaggtcatccccttgaaaggcctgtgggaggatgtggcacccaccctgcctgacggtcactttgatgggatcctgtacgacacgtacccactctcggaggagacctggcacacacaccagttcaacttcatcaagaaccacgcctttcgcctgctgaagccggggggcgtcctcacctactgcaacctcacctcctggggggagctgatgaagtccaagtactcagacatcaccatcatgtttgaggtgcgcccacctgaagttccccatgggtctccaggaagtgaccttggatgggggtgggaaggggctgctggagccaccttgctacctggggagggtcccttcctgaccccctgggtgggctggactgtgctggttcatttagaaatcaaagtcctttgcctggcgcagtggctgccaggagcagtggctcaggtctataatcccagcactgtggaaggccgaggtgggcagattgcttgagcctaggagttcaagaccagcctgggctacagagcaagacctcatctttcctaaaaaaaaaaaatacaaaaaa

SEQ ID NO: 1530 - protein, 269 aa, Homo sapiens
MSAPSATPIFAPGENCSPAWGAAPAAYDAADTHLRILGKPVMERWETPYMHALAAAASSKGGRVLEVGFGMAIAASKVQEAPIDEHWIIECNDGVFQRLRDWAPRQTHKVIPLKGLWEDVAPTLPDGHFDGILYDTYPLSEETWHTHQFNFIKNHAFRLLKPGGVLTYCNLTSWGELMKSKYSDITIMFEVRPPEVPHGSPGSDLGWGWEGAAGATLLPGEGPFLTPWVGWTVLVHLEIKVLCLAQWLPGAVAQVYNPSTVEGRGGQIA

SEQ ID NO: 1531 - DNA, 3017 bp, Homo sapiens
accgcgggcatttacccgtgctttcccaagcctggaagaactcgtcatgctctttgtagcgtggtgcttctgttgctcacagaggtgcctgcttccccttctgccatgattggaagtttcctgaggcctccccagccatgtggaactgacaacttgcctttgatgattttcaagagagttgtgctatgatgtggcaaaagtatgcaggaagcaggcggtcaatgcctctgggagtaaggatccttttccacggtgtgttctatgccgggggctttgccattgtgtattacctcattcaaaagtttcattccagggctttatattacaagttggcagtggagcagctgcagagccatcccgaggcacaggaagctctgggccctcctctcaacatccattatctcaagctcatcgacagggaaaacttcgtggacattgttgatgccaagttgaagattcctgtctctggatccaaatcagagggccttctctacgtccactcatccagaggtggcccctttcagaggtggcaccttgacgaggtctttttagagctcaaggatggtcagcagattcctgtgttcaagctcagtggggaaaacggtgatgaagtgaaaaaggagtagagacgacccagaagacccagcttgcttctagtccatccttccctcatctctaccatatggccactggggtggtggcccatctcagtgacagacactcctgcaacccagttttccagccaccagtgggatgatggcctccctattccctgagacacaacagtattgaaattgggccaattaataactccacagtggcctctcactaaatgtgagaggtgaggaagctgcaggagaaaatttgaagctagcagtgttcatgagatgtaagtaaagaagccatctccataaaagtacaacgtgacgcagcaagtgctgatggagaagctgtagaagttacacagaagatctagcttggaccatcgatgaaagtggctacactaaacaacagattttaaatgtagataaaacagcattttattgaaaaaaagatgccatctaggactttcatagttagagaaactcaatgcctggcttcaaaggacaagctgactcttgtcaggggctagtgcagctgtgactttcagttaaagccaatgctcattgactattctgaaaatcccagggcccttaagatatgctgtataaacgcaacaacaaagcctggatggcgttgggtctgtttacagcctggtctactgagtaagcccactgttgagacctagtgctcagaaaaaatagatttctttcaaaatatggctgggtgcagtggctcacaccggtaatcccagcactttgggaggctggggcgggtggattgcttgatgccaggagttcaagaccagcctgggcaacatggtgaaaccctgtctcaaaaaacaaatccaaaaaaccaaaatattgctactcattaacaatgcacctggttacccaagagctctgatggagatgtacaaggagatgaatactgttttcatgcctgctaacacagtatccattctgctgctgatagatcaagaagtacttttgactttcaaaacttgttatttaagaaatacattttgtggtttctctgatggttctgggcagtcagttcaaaaccttctggaaaggattcaccattctagatgccatcaagagcattcaattcacgggaggaggtcaaaatatcaacattaattggaatttggaagaaatagattccaatcctcatggaggacttggagggtttcaagacttcagaggaggaaggaactgtagatgggctgaaaatagcaagagaactagaagtggaggggcctagagatgtgaccgaattgctgtaacctcaggatcaaacttgtatggatgagaagttccttctcatggacgagcaaagaaggtgatttcttgaaatggaatctactcctggtgaagatgctatgaacattgttgaaatgacaaaagatttagaatattccataaacttagctgtggccagggtttgagaggattgactcctaattttgaagttctactgtgggtaaatgctgtcaaacagcattgcatgccacagaggaatctctcatgaaagagttaataaatgcagcaaacttcactgttgtcttactttaagaaactgccacagtcactgcaggcttcagcaacttatcttttcctaccctcctctcgcatttaaaagtacttttaaattaatgtatgtacattatttttaggcataacactgctgctcatttaaaaaaactacagtatgaaccatgttatatgcagtggaaaggcaaaaaattcatgtgacttacttgcttgtatttggtttattgcagtggtctggaactgaaagtgatgcgtatttctgagttatgcctgtatttaagaagctgagtgaaacccaaagaagtccatgataggacagacttctgaaaactaaagacagaaaaaagcttgaaagcatcaagaaagaagtgaaatcttaactagagggaaaagtaactcagatgacagtggatttctctctggaaaccatggaggccagaaggaagtgagacaagttcttttagtgccagaagaactatcaacttgtggctgggcacggtggctcacacctgtaatcccagcactttgggagaccaaggtgggcagatcacttgaagtcaggagtttgagaccagcctgaccaacatggcaaaaccctgtctctactaaaaatacaaaaattagccaggcatggtggcacatgcctgtaatctcagctacttgggaggctgaggcacgagaattacttgaacccgggaggtggaggttgcagtgagccaagatcctgccactgcactccagcctgggcaacagagcaagactgcctcaaaacaaaactctgtcaactccaaattcctatttggtgaaatgatccttcaggattgatggggtaataaaaacattctcggttgatagaaaact

SEQ ID NO: 1532 - protein, 146 aa, Homo sapiens
MMWQKYAGSRRSMPLGVRILFHGVFYAGGFAIVYYLIQKFHSRALYYKLAVEQLQSHPEAQEALGPPLNIHYLKLIDRENFVDIVDAKLKIPVSGSKSEGLLYVHSSRGGPFQRWHLDEVFLELKDGQQIPVFKLSGENGDEVKKE

SEQ ID NO: 1533 - DNA, 7248 bp, Homo sapiens
tactcaaaattcacatgataaaataattgatcctgaaaaacgtgttcctactcaaggaatgtttgataaaaatgggataaagggaggtttgaaaagtgtttctttattcacatcaaagttagcaaagccatccactatgtttgtgtcatctacagaggagttaaaccaaaagtctttttctggaccatctaatttgggtaaattcaccaaatgcacattattaggaaggacttcatattcttcgatcaatactccaaaatcacagttgaatggattttatggaaaccgatcagctggtagcatgcaaaaggcctagagcgaactcctgtgccaccagaagcagttctggagaaagcttagctcaatccccagacagtagtaaatctattaattgtgaaaaaatggtaaggtcacaaagtttttcacattccattcagaattcattccttccaccttcatctataaccagtcacattcctttatagagctgtggatcttacaaagccttatcagaaccaacagctatccattagagtgcctctacggtcaagtatgctaacaagaaattcccggcagccagaagtactcaatgggaatgaacatttggggtatggatttaataggccttatgctgctggtggaaagaagttggctttaccaaatggcccaggtgtaacttctactttaggttatagaatggttcatccctctctactgaaatctagccgatctccattttctgggactatgacagttgatggaaataaaaattcacctgctgacacatgtgtagaggaagatgctacagttttggctaaggacagagctgctaataaggaccaagaactgattgaaaatgaaagttatagaacaaaaaacaaccagaccatgaaacatgatgctaaaatgagatacctgagtgatgatgtggatgacatttccttgtcgtctttgtcatcttctgataagaatgatttaagtgaagactttagtgatgattttatagatatagaagactccaacagaactagaataactccagaggaaatgtctctcaaagaagagaaacatgaaaatgggccaccacaggatatgtttgattcccccaaggaaaatgaaaaagccttcagtaaaactgatgaatggatagatataagtgtctctgacaggagtgaatgtacaaaacatacttctgggaataatttggtttcaccagatacagactacagagctggttcttcgtttgaactctctccatctgatagctctgatggaacatacatgtgggatgaagaaggcttggaacccattggaaatgtccatccagttgggagctatgagtcctctgaaatgaacagcatagatattttgaataatcttgaatcatgtgaccttgaggatgatgatcttatgcttgatgtggatctgcctgaggatgcacctcttgaaaatgtggagtgtgacaatatgaaccgctttgaccgaccagacagaaatgttcggcagcctcaggaaggtttttggaaaaggccaccccagaggtggagtggacaggagcattaccacctcagccaccctgaccactatcatcaccatggaaaaagtgacttgagcagaggctctccctatagagaatctcctttgggtcattttgaaagctatggagggatgccctttttccaggctcagaagatgtttgttgatgtaccagaaaatacagtgatactggatgagatgacccttcggcacatggttcaggattgcactgctgtaaaaactcagttactcaaactgaaacgtctcctgcatcagcatgatggaagtggttcattgcatgatattcaactgtcattgccatccagtccagaaccagaagatggtgataaagtatataagaatgaagatttattaaatgaaataaaacaacttaaagacgaaataaagaaaaaagatgaaaagatccaactattagaacttcagcttgcaactcagcatatctgccaccaaaaatgtaaagaggaaaaatgcacttatgctgataaatatacccaaacaccctggagacgaattcctggtgggtattctgctccctccttctctccttggcagggctccttccaggggatcccacggactgttccaccgcaccgcagacagacctcaagtactacagccttccagcagccttcccagacccacagatcacacccagggaaaactaataaagccacaacgtatcgaggcccgcagtgaatgctcaatccaagacatgcatcagggcggtgcacatccggaagaaagctttacacacgtcttgcaccaagaaagcaactatggtttggaagagcagcctttttcatcaggcccacaattaacaatggatgtggctaagagtacaccttctgaagcaaacttaaacattactgtaaatgctcaagagccttatcatttggcaaacaatcaaattagtgacatgcagtttatacccacttctcttcagacacctcccgagtcaagtacagtagaccaggctaagagagttggaagaaatcagtctccgccagtgggttatatgtctcagcccaagtccttgcagcttttaaagccatccatattgagttctttggtaccgcctccagtttctgaatcatctccaagtaggactcccacttgtaaaaagtcaccaataatcacaacatgtaattcagcaaaacttcagccaacatctagtcaaacaaatcttgcaaataatcagaatctgaaagcatctaagctccgccccccctcaggctctttcaaacaaaaacaaacaaacagcccccaactagagcctcaaagcttccaggccaagacaagcatcccaaggccactaacacaacgaaaagaaatcatgcagaatccaaatggcaatttgcattctggggattgtttggcctctaatcgatattctcgtcttcctaaaccaaagatacattaagtacatagccatcacctgccaatttgtttcttaaaaacaatctcttctgtaatagctttatgtgcagcttgcagcttgctactgtggtggaggttccattgaaagcctgcaaatcttaaattaaaatgtggaagcttctactagtttggctccttcattttatatcctggttgaagtacatgccatttgagcataattatctcaggtaaacacgaaagtttgcttacccatttcagaggcctgccaaaggcccaaatcatgttatccatccctctccaggtcagaaaattcataatattttactgagcaggcaagaagtgtgctttgctggtttagtcctattaaggtctgtatttattgtggttgtcagaacctcaccccttttcacttgtctctcctgtgaatatggctactattttaactaaagatatggtgataatggaagatggtagtctgtaagcagagttctggccagtgttttgtatatttaaaaggtctatgcaaaagctttgtgatgaataaaggagattaggcttttaatggaaagtctatgtaagttttatttttccttgccagggtcagtcagctaatgttactgttgattcatttcccaaattccccagactgaaaatgtttcttattacatataaatcagttatatattcctttacatcttgttttacaaacacatgtgcatgcacacacacacatacacacacataccatttatgtttgtatttgttactgggtaaattttggagcgcttgagatacaccttgaaacctgtacctaaagatgtattcatttgtaacatatgttggtgctagagttttgctggtaattcaggtttgaacccttaggcttgtggatccatgatagccattttaaggttccacagcattatgtctttaattgtaatatttatatttattgattttctgctaatatctgaagactgaaataatgaacttgaaacatttgcacaaaactttgatggggtataaatataccatatatagggattgtaaactattttctatagcaaaacaagttaaaatattttgagaaaaataacaaatttaaataagactatcttgagaaagctggagttcataatattctccccctcccccatctccagtctcctaggtttcccttttctgtgttttttgtttttttctgtttgttttttgagacagagtcttgctccattgcccaggctggattacagtggcgcaatctcggctcactgcaacttctgcctcccgggttcaagcgattctcctgcctcagcctcctgagtagctgggactacaggcatgtgccaccatgcctggctaatttttttgtatttttagtagagatgaggtttcaccttgttggtcaggctggtctcgaactcctgacctcaagtgatccacccacctcgtctatggtgtatttttgaaagacaattttttaaaggtagatttgggaaaaaaatagaattgaagatgggaaattttgttttattaaaaaggtgctagaagatgtttcaaagacaatattcttattttaatacgctgtagaaggtaggtgtggaacctccatgctaccatgtgcacaaacctaattatgctttgggtcacttgtcagttcagtaaatctgccttcctcttctcccaaatcatgtcatctttaggttgttcacctgcagctgctttaaatgaattagtatctttcagatagataaccttacaaggagaatgtttgttttgagcagctgaccaaaaatatatcaaacaggattatggccaaaaagtcactcaaatttctagagattcctttaaaagatgtatgttgatgaaattgcccctttataagaaaaacaacagcaagtcttttagtagaaatttgaaagaagtgtttgctaccattttgacccattattcccttacctatcagatgaatttgccattcactggatagaaaccattcttggatttggtaagaggtgagcaagacaaatcttgtaccatactcttatgtaccagcacttctgatggagaagcagtgaagttcagaacgttcttcacatagtccagatactgttagagtcaggcaaatcagcaaagcactttgttatggagatgacccatgatggctgcagttgtaagtgggcatacatgttctatcattttgaaggagaaagaaaaccgttctcacatgtcgcaaatatgtgaatcatactatattcccctaaagtaaaaccagtgacttagtggtttttggtttatttagaagttggtttagacccttatgaaacattatttacgagttggccttatccttaagggaaaagttctaaatttttaaatttatttttaattccctagtctgagggaaatgtctttattgtccattacataaaaatgttgactccagtaatttatttttctctattttttcctccatgtatttactccatttttctctattttttccttccctgatggatttgcagaaatgttaaccaattagctcaacttttctctacctttgttgagtcttaatcttttagaagataggcttaccgtatatttatgaagcataatatattaaaagaaaacaaatctaggatgcttgcatgacataaagtatttgcctgcagttttcattaaaaactgcaagaatatcatgcttgtctgcttcttagtaaatgttaagtctgaaatggaagtgaggatgtaactctactgaataatcaaagatcatcttagatttggcttgatctgtgtttattgcttctattaatgtaaatcaactctgtgccaaatcctcctccacaaaccatttattgtcttagttctagtggtatcaatgaagatagttacagtatatgaattctaagtcctgaggaagaaattttatggggtttgttaagtttcacattcgtgaaagaggaaattagtagagtattcagactttgatatttggctgttaatgggatgcatatcaaatttttaaaagaaggcttggcctaaggagtttattggtacaggtgcagatgattttaaggcattaaaggattatagagttatgtcatttgagactgtttctaataactgagaccatctaacatttttcttttggagtctcatttttatttgtgcaatattttcaggcatataggctactgttcattgtatttatatatatattagaatttactaagtactttaacaagtaaaaatctgaatatgaaagaaaatatcagatttgcactttaaatgagcttaattgcttgaagttgtgcctgaaatatcgaattgcctcctattgggtgtggctttgttgaaataaatttgtaattgttgctgtttgaagatatcagtacagctgttcacagaaatatattcccagcatgtcacttttccattaaagcactaagttttctttgaatgttccattgttccgataagtattttacttttttctcagtacatcagagagagcgtgatccccctacagctgtcacttccaaatgttcctgtagcataaatggtgttacagacactgaggtgcactcttggtttctgagcagagttgtcatactggtttcctggctctagggcactggggatgtactttgaaatcaccgaacaggcttgcaattaagatcaataaggctgcagcaccatttcaatttactttccatcttacccagtagtttttgtgtttttaaattcgtttgggtggttatgtttgcatgcttaagcacacatttgaaaattaattatagctgtactacccgatgtttttccttggggatgatggccttgttcctttttaaattctgatgcttgaattctattttctagtgatttttcacatctccctttaagtttttgctgcagcaatttgagagagtacttttgattaaatgattctgatggtgggcaccaatctacaactatgtcattaactgaagatacatgttttaatcttgttgggaataagcttacccactttctccttggtaaagcgtttacttaacaaaataatacccgagaatgtaaggtctctaagtcattactaacaaagagcaaaaataatatctgcagtattgtttttcccattgattttaagtcagtttagagtacaaactgtatattagaatttgcctgtaaaatgaattctaaaaagcagatgtaaagtctctcctgaaaatgttggcatagtaaataaaaataaagttcataattataaagtaaaaaaaaaaaaaaaaaaaa

SEQ ID NO: 1534 - protein, 566 aa, Homo sapiens
MLTRNSRQPEVLNGNEHLGYGFNRPYAAGGKKLALPNGPGVTSTLGYRMVHPSLLKSSRSPFSGTMTVDGNKNSPADTCVEEDATVLAKDRAANKDQELIENESYRTKNNQTMKHDAKMRYLSDDVDDISLSSLSSSDKNDLSEDFSDDFIDIEDSNRTRITPEEMSLKEEKHENGPPQDMFDSPKENEKAFSKTDEWIDISVSDRSECTKHTSGNNLVSPDTDYRAGSSFELSPSDSSDGTYMWDEEGLEPIGNVHPVGSYESSEMNSIDILNNLESCDLEDDDLMLDVDLPEDAPLENVECDNMNRFDRPDRNVRQPQEGFWKRPPQRWSGQEHYHLSHPDHYHHHGKSDLSRGSPYRESPLGHFESYGGMPFFQAQKMFVDVPENTVILDEMTLRHMVQDCTAVKTQLLKLKRLLHQHDGSGSLHDIQLSLPSSPEPEDGDKVYKNEDLLNEIKQLKDEIKKKDEKIQLLELQLATQHICHQKCKEEKCTYADKYTQTPWRRIPGGYSAPSFSPWQGSFQGIPRTVPPHRRQTSSTTAFQQPSQTHRSHPGKTNKATTYRGPQ

SEQ ID NO: 1535 - DNA, 1363 bp, Homo sapiens
ctttttggtgtaaatctggactctaattctgtaatatatcaaggaatctcgtaaaaccgacactaaaacgtccctgcctacaaatcatccggccaaattatgagttcattgtattatgcgaatgctttattttctaaatatccagcctcaagttcggttttcgctaccggagccttcccagaacaaacttcttgtgcgtttgcttccaacccccagcgcccgggctatggagcgggttcgggcgcttccttcgccgcctcgatgcagggcttgtaccccggcggggggggcatggcgggccagagcgcggccggcgtctacgcggccggctatgggctcgagccgagttccttcaacatgcactgcgcgccctttgagcagaacctctccggggtgtgtcccggcgactccgccaaggcggcgggcgccaaggagcagagggactcggacttggcggccgagagtaacttccggatctacccctggatgcgaagctcaggaactgaccgcaaacgaggccgccagacctacacccgctaccagaccctggagctggagaaagaatttcactacaatcgctacctgacgcggcggcggcgcatcgagatcgcgcacacgctctgcctcacggaaagacagatcaagatttggtttcagaaccggcgcatgaagtggaaaaaggagaacaagaccgcgggcccggggaccaccggccaagacagggctgaagcagaggaggaagaggaagagtgagggatggagaaagggcagaggaagagacatgagaaagggagaggaagagaagcccagctctgggaactgaatcaggaaactcaaatcgaatagggaagtaaaaaaacaaaacaaaaaacaaaaaaaacaaaaaaaaaaccctatttaaatgaaaggagtttaaaaacattttttaaggagggagaaaggagaaattttggtttttcaacactgaaaaaatactacctataggaaagtctgtcaggtttggtttttttgtacaatatgaaaaggatattatctacctgttctgtagctttctggaatttacctccccttttctatgttgctattgtaaggtctttgtaaaatcttgcagttttgtaagccctctttaatgctgtctttgtggactgtgggtctggactaaccctgtggttgcctgccctcctgagcctccgccttcccagcagcggcaccaaggggccttagggagccccaaaacctaccactcgcgtgttccccaagcgcctggctgctgcttcttgcttcccgtcccccagccccatgctcccttttacattctgtgtgtatctaaaggatggaaaaataaaacgcaattaaaaataaa

SEQ ID NO: 1536 - protein, 217 aa, Homo sapiens
MSSLYYANALFSKYPASSSVFATGAFPEQTSCAFASNPQRPGYGAGSGASFAASMQGLYPGGGGMAGQSAAGVYAAGYGLEPSSFNMHCAPFEQNLSGVCPGDSAKAAGAKEQRDSDLAAESNFRIYPWMRSSGTDRKRGRQTYTRYQTLELEKEFHYNRYLTRRRRIEIAHTLCLTERQIKIWFQNRRMKWKKENKTAGPGTTGQDRAEAEEEEEE

SEQ ID NO: 1537 - DNA, 1698 bp, Homo sapiens
aaatagctgggactggcttcctgccggggcggccccagaggctgtcccttgcagacacatgcccctttcacggctccctctcagggttggccagaaggaatttttttttccgctccccctcctggtccctcccatttcctggctcctcctctctgagtcccagccccggcttgtgcctgggagtccagtcatcaggccaggattccagagagcgtgtgtggctgcagcctgcaccgttgctgcccgctgcccaggacgcggggtgggggacaggagccagagtggtgcctcctgcagaccaatctggggccccaaggtggggggccctacagagatgctccgaggcatgtacctcactcgcaacgggaacctgcagaggcgacacacgatgaaggaagccaaggacatgaagaacaagctggggatcttcagacggcggaatgagtcccctggagcccctcccgcgggcaaggcagacaaaatgatgaagtcattcaagcccacctcagaggaagccctcaagtggggcgagtccttggagaagctgctggttcacaaatacgggttagcaatgttccaagccttccttcgcactgagttcagtgaggagaatctggagttctggttggcttgtgaggacttcaagaaggtcaagtcacagtccaagatggcatccaaggccaagaagatctttgctgaatacatcgcgatccaggcatgcaaggaggtcaacctggactcctacacgcgggagcacaccaaggacaacctgcagagcgtcacgcggggctgcttcgacctggcacagaagcgcatcttcgggctcatggaaaaggactcgtaccctcgctttctccgttctgacctctacctggaccttattaaccagaagaagatgagtcccccgctttaggggccactggagtcgagctcagcgttcacaccaggcgggctgggtcccctgcccacctgcctccctgccccctgtgacggagggggcaagcaagcccccagaggccgtgtctctggacagacggatagacatacggaagcgaggcctggaccaagagaggcccaggctactggaggagtagaaggatgggccccgtggggtccccactgccccggtacgagggggcccaagaccctggcaggtcaggggccctggccaagccagatctggagctgctgctccctgctgcggagaccgcggaggcttcgcgttgaccaagttccttaaagaactggctgatggggcaggaggtccaggcctgggctctcgggccctcctagagggccattggagcttgcagctcagacccccactttgagttttatttatttaaatagtagttggatgcttggcacgtcgtcctgtaataggaaacccttgcctcatcagttttcctgatttacaagtgcaatattttagccaatgccttgggagaagctgccatgcaaaggtggacaccattctccagcttcaggggatatgctcgtcccgggcaccggtggcaggcagctggccttctggactaaggcagcctggggggacactgcagtctggctacacacagagatctggcaccccctgggtggagtgtccctcgggggctttgggaaagcatggcaccctcagaccacacagtagccaagttctggagcaaataaaaggcctgtgttatttcttgttcttga

SEQ ID NO: 1538 - protein, 340 aa, Homo sapiens
MVPQVKPGPDGGVLRRASCKSTHDLQSPPNKREKNCTHGVQARPEQRHSCHLVCDSSDGLLLGGWERYTEVAKRGGQHTLPALSRATAPTDPNYIILAPLNPGSQLLRPVYQEDTIPEESGSPSKGKSYTGLGKKSRLMKTVQTMKGHGNYQNCPVVRPHATHSSYGTYVTLAPKVLVFPVFVQPLDLCNPARTLLLSEELLLYEGRNKAAEVTLFAYSDLLLFTKEDEPGRCDVLRNPLYLRSVKLQEGSSEDLKFCVLYLAEKAECLFTLEAHSQEQKKRVCWCLSENIAKQQQLAASPPDSKKLHPFGSLQQEMGPVNSTNATQDRSFTSPGQTLIG

SEQ ID NO: 1539 - DNA, 2867 bp, Homo sapiens
ttctcggctgatctctctgggtaggtgccctctgggggcagtacccctgcctgagtggcacttcccctcctggctttgtttggtttggcctcgatttagaacagggttggcagaggcaggctgacttgcatttctggttttgggtttgttgctgcactttccccaaggggtgggcgggctctgactgacagtcaccactgggacaggcctgggccccaccctcaccacccaggaaaggggaaatgcggcccgctccccactcagtgccactctgtgccactccgtgccaggccctgagggcacccggttgctgcttccttccgtctttccccaaggactatcagagatgccagcgtgacccctgacacgtgtgtgcagcagcctgcagctgccccaagccatggctgaacactgactcccagctgtgggcttcaccattacagactccccagggcttcaaagacttctcagcttcgagcatggcttttggctgtcagggcagctgtacaatagtggatgtttgagacggaggcagatgagaagagggagatggccttggaggaagggaaggggcctggtgccgaggattccccacccagcaaggagccctctcctggccaggagcttcctccaggacaagaccttccacccaacaaggactccccttctgggcaggaacccgctcccagccaagaaccactgtccagcaaagactcagctacctctgaaggatcccctccaggcccagatgctccgcccagcaaggatgtgccaccatgccaggaaccccctccagcccaagacctctcaccctgccaggacctacctgctggtcaagaacccctgcctcaccaggaccctctactcaccaaagacctccctgccatccaggaatcccccacccgggaccttccaccctgtcaagatctgcctcctagccaggtctccctgccagccaaggcccttactgaggacaccatgagctccggggacctactagcagctactggggacccacctgcggcccccaggccagccttcgtgatccctgaggtccggctggatagcacctacagccagaaggcaggggcagagcagggctgctcgggagatgaggaggatgcagaagaggccgaggaggtggaggagggggaggaaggggaggaggacgaggatgaggacaccagcgatgacaactacggagagcgcagtgaggccaagcgcagcagcatgatcgagacgggccagggggctgagggtggcctctcactgcgtgtgcagaactcgctgcggcgccggacgcacagcgagggcagcctgctgcaggagccccgagggccctgctttgcctccgacaccaccttgcactgctcagacggtgagggcgccgcctccacctggggcatgccttcgcccagcaccctcaagaaagagctgggccgcaatggtggctccatgcaccacctttccctcttcttcacaggacacaggaagatgagcggggctgacaccgttggggatgatgacgaagcctcccggaagagaaagagcaaaaacctagccaaggacatgaagaacaagctggggatcttcagacggcggaatgagtcccctggagcccctcccgcgggcaaggcagacaaaatgatgaagtcattcaagcccacctcagaggaagccctcaagtggggcgagtccttggagaagctgctggttcacaaatacgggttagcagtgttccaagccttccttcgcactgagttcagtgaggagaatctggagttctggttggcttgtgaggacttcaagaaggtcaagtcacagtccaagatggcatccaaggccaagaagatctttgctgaatacatcgcgatccaggcatgcaaggaggtcaacctggactcctacacgcgggagcacaccaaggacaacctgcagagcgtcacgcggggctgcttcgacctggcacagaagcgcatcttcgggctcatggaaaaggactcgtaccctcgctttctccgttctgacctctacctggaccttattaaccagaagaagatgagtcccccgctttaggggccactggagtcgagctcagcgttcacaccaggcgggctgggtcccctgcccacctgcctccctgccccctgtgacggagggggcaagcaagcccccagaggccgtgtctctggacagacggatagacatacggaagcgaggcctggaccaagagaggcccaggctactggaggagtagaaggatgggccccgtggggtccccactgccccggtacgagggggcccaagaccctggcaggtcaggggccctggccaagccagatctggagctgctgctccctgctgcggagaccgcggaggcttcgcgttgaccaagttccttaaagaactggctgatggggcaggaggtccaggcctgggctctcgggccctcctagagggccattggagcttgcagctcagacccccactttgagttttatttatttaaatagtagttggatgcttggcacgtcgtcctgtaataggaaacccttgcctcatcagttttcctgatttacaagtgcaatattttagccaatgccttgggagaagctgccatgcaaaggtggacaccattctccagcttcaggggatatgctcgtcccgggcaccggtggcaggcagctggccttctggactaaggcagcctggggggacactgcagtctggctacacacagagatctggcaccccctgggtggagtgtccctcgggggctttgggaaagcatggcaccctcagaccacacagtagccaagttctggagcaaataaaaggcctgtgttatttcttgttcttgaaaaaaa

SEQ ID NO: 1540 - protein, 519 aa, Homo sapiens
MFETEADEKREMALEEGKGPGAEDSPPSKEPSPGQELPPGQDLPPNKDSPSGQEPAPSQEPLSSKDSATSEGSPPGPDAPPSKDVPPCQEPPPAQDLSPCQDLPAGQEPLPHQDPLLTKDLPAIQESPTRDLPPCQDLPPSQVSLPAKALTEDTMSSGDLLAATGDPPAAPRPAFVIPEVRLDSTYSQKAGAEQGCSGDEEDAEEAEEVEEGEEGEEDEDEDTSDDNYGERSEAKRSSMIETGQGAEGGLSLRVQNSLRRRTHSEGSLLQEPRGPCFASDTTLHCSDGEGAASTWGMPSPSTLKKELGRNGGSMHHLSLFFTGHRKMSGADTVGDDDEASRKRKSKNLAKDMKNKLGIFRRRNESPGAPPAGKADKMMKSFKPTSEEALKWGESLEKLLVHKYGLAVFQAFLRTEFSEENLEFWLACEDFKKVKSQSKMASKAKKIFAEYIAIQACKEVNLDSYTREHTKDNLQSVTRGCFDLAQKRIFGLMEKDSYPRFLRSDLYLDLINQKKMSPPL

SEQ ID NO: 1541 - DNA, 3695 bp, Homo sapiens
ttggggaggtgagaggtgatttcctgccattcttctgtggggcgggcttcccagggtgctcatgccaggctgacgggtccagtgcgggctcccgctgctgggggagagctgggttttcatggggcggcagccgaggcaggacccgcagccatgaaccgcttcaatgggctctgcaaggtgtgctcggagcgccgctaccgccagatcaccatcccgaggggaaaggacggctttggcttcaccatctgctgcgactctccagttcgagtccaggccgtggattccgggggtccggcggaacgggcagggctgcagcagctggacacggtgctgcagctgaatgagaggcctgtggagcactggaaatgtgtggagctggcccacgagatccggagctgccccagtgagatcatcctactcgtgtggcgcatggtcccccaggtcaagccaggaccagatggcggggtcctgcggcgggcctcctgcaagtcgacacatgacctccagtcaccccccaacaaacgggagaagaactgcacccatggggtccaggcacggcctgagcagcgccacagctgccacctggtatgtgacagctctgatgggctgctgctcggcggctgggagcgctacaccgaggtggccaagcgcgggggccagcacaccctgcctgcactgtcccgtgccactgtccccaccgaccccaactacatcatcctggccccgctgaatcctgggagccagctgctccggcctgtgtaccaggaggataccatccccgaagaatcagggagtcccagtaaagggaagtcctacacaggcctggggaagaagtcccggctgatgaagacagtgcagaccatgaagggccacgggaactaccaaaactgcccggttgtgaggccgcatgccacgcactcaagctatggcacctacgtcaccctggcccccaaagtcctggtgttccctgtctttgttcagcctctagatctctgtaatcctgcccggaccctcctgctgtcagaggagctgctgctgtatgaagggaggaacaaggctgccgaggtgacactgtttgcctattcggacctgctgctcttcaccaaggaggacgagcctggccgttgcgacgtcctgaggaaccccctctacctccagagtgtgaagctgcaggaaggttcttcagaagacctgaaattctgcgtgctctatctagcagagaaggcagagtgcttattcactttggaagcgcactcgcaggagcagaagaagagagtgtgctggtgcctgtcggagaacatcgccaagcagcaacagctggcagcatcacccccggacagcaagatgtttgagacggaggcagatgagaagagggagatggccttggaggaagggaaggggcctggtgccgaggattccccacccagcaaggagccctctcctggccaggagcttcctccaggacaagaccttccacccaacaaggactccccttctgggcaggaacccgctcccagccaagaaccactgtccagcaaagactcagctacctctgaaggatcccctccaggcccagatgctccgcccagcaaggatgtgccaccatgccaggaaccccctccagcccaagacctctcaccctgccaggacctacctgctggtcaagaacccctgcctcaccaggaccctctactcaccaaagacctccctgccatccaggaatcccccacccgggaccttccaccctgtcaagatctgcctcctagccaggtctccctgccagccaaggcccttactgaggacaccatgagctccggggacctactagcagctactggggacccacctgcggcccccaggccagccttcgtgatccctgaggtccggctggatagcacctacagccagaaggcaggggcagagcagggctgctcgggagatgaggaggatgcagaagaggccgaggaggtggaggagggggaggaaggggaggaggacgaggatgaggacaccagcgatgacaactacggagagcgcagtgaggccaagcgcagcagcatgatcgagacgggccagggggctgagggtggcctctcactgcgtgtgcagaactcgctgcggcgccggacgcacagcgagggcagcctgctgcaggagccccgagggccctgctttgcctccgacaccaccttgcactgctcagacggtgagggcgccgcctccacctggggcatgccttcgcccagcaccctcaagaaagagctgggccgcaatggtggctccatgcaccacctttccctcttcttcacaggacacaggaagatgagcggggctgacaccgttggggatgatgacgaagcctcccggaagagaaagagcaaaaacctagccaaggacatgaagaacaagctggggatcttcagacggcggaatgagtcccctggagcccctcccgcgggcaaggcagacaaaatgatgaagtcattcaagcccacctcagaggaagccctcaagtggggcgagtccttggagaagctgctggttcacaaatacgggttagcagtgttccaagccttccttcgcactgagttcagtgaggagaatctggagttctggttggcttgtgaggacttcaagaaggtcaagtcacagtccaagatggcatccaaggccaagaagatctttgctgaatacatcgcgatccaggcatgcaaggaggtcaacctggactcctacacgcgggagcacaccaaggacaacctgcagagcgtcacgcggggctgcttcgacctggcacagaagcgcatcttcgggctcatggaaaaggactcgtaccctcgctttctccgttctgacctctacctggaccttattaaccagaagaagatgagtcccccgctttaggggccactggagtcgagctcagcgttcacaccaggcgggctgggtcccctgcccacctgcctccctgccccctgtgacggagggggcaagcaagcccccagaggccgtgtctctggacagacggatagacatacggaagcgaggcctggaccaagagaggcccaggctactggaggagtagaaggatgggccccgtggggtccccactgccccggtacgagggggcccaagaccctggcaggtcaggggccctggccaagccagatctggagctgctgctccctgctgcggagaccgcggaggcttcgcgttgaccaagttccttaaagaactggctgatggggcaggaggtccaggcctgggctctcgggccctcctagagggccattggagcttgcagctcagacccccactttgagttttatttatttaaatagtagttggatgcttggcacgtcgtcctgtaataggaaacccttgcctcatcagttttcctgatttacaagtgcaatattttagccaatgccttgggagaagctgccatgcaaaggtggacaccattctccagcttcaggggatatgctcgtcccgggcaccggtggcaggcagctggccttctggactaaggcagcctggggggacactgcagtctggctacacacagagatctggcaccccctgggtggagtgtccctcgggggctttgggaaagcatggcaccctcagaccacacagtagccaagttctggagcaaataaaaggcctgtgttatttcttgttcttgaaaaaaa

SEQ ID NO: 1542 - protein, 917 aa, Homo sapiens
MNRFNGLCKVCSERRYRQITIPRGKDGFGFTICCDSPVRVQAVDSGGPAERAGLQQLDTVLQLNERPVEHWKCVELAHEIRSCPSEIILLVWRMVPQVKPGPDGGVLRRASCKSTHDLQSPPNKREKNCTHGVQARPEQRHSCHLVCDSSDGLLLGGWERYTEVAKRGGQHTLPALSRATVPTDPNYIILAPLNPGSQLLRPVYQEDTIPEESGSPSKGKSYTGLGKKSRLMKTVQTMKGHGNYQNCPVVRPHATHSSYGTYVTLAPKVLVFPVFVQPLDLCNPARTLLLSEELLLYEGRNKAAEVTLFAYSDLLLFTKEDEPGRCDVLRNPLYLQSVKLQEGSSEDLKFCVLYLAEKAECLFTLEAHSQEQKKRVCWCLSENIAKQQQLAASPPDSKMFETEADEKREMALEEGKGPGAEDSPPSKEPSPGQELPPGQDLPPNKDSPSGQEPAPSQEPLSSKDSATSEGSPPGPDAPPSKDVPPCQEPPPAQDLSPCQDLPAGQEPLPHQDPLLTKDLPAIQESPTRDLPPCQDLPPSQVSLPAKALTEDTMSSGDLLAATGDPPAAPRPAFVIPEVRLDSTYSQKAGAEQGCSGDEEDAEEAEEVEEGEEGEEDEDEDTSDDNYGERSEAKRSSMIETGQGAEGGLSLRVQNSLRRRTHSEGSLLQEPRGPCFASDTTLHCSDGEGAASTWGMPSPSTLKKELGRNGGSMHHLSLFFTGHRKMSGADTVGDDDEASRKRKSKNLAKDMKNKLGIFRRRNESPGAPPAGKADKMMKSFKPTSEEALKWGESLEKLLVHKYGLAVFQAFLRTEFSEENLEFWLACEDFKKVKSQSKMASKAKKIFAEYIAIQACKEVNLDSYTREHTKDNLQSVTRGCFDLAQKRIFGLMEKDSYPRFLRSDLYLDLINQKKMSPPL

SEQ ID NO: 1543 - DNA, 1582 bp, Homo sapiens
ggatggacgcctctcccccggagcagcactttggggccagcttgggccctggggatgagccacaggggacccacagcctatgcgtgtgagcatgtaacccgggagccagctgggcccctcgcggggtgggcagaaggacgggctggcccaggaccctcttctttgagacatcccggactccatctcggatgaaagtgctttgagaaaccacagagttttctgtttaatggaagaaagaaatccagcctctctccagagtggcggtggccggctagacaggagccaaggacatgaagaacaagctggggatcttcagacggcggaatgagtcccctggagcccctcccgcgggcaaggcagacaaaatgatgaagtcattcaagcccacctcagaggaagccctcaagtggggcgagtccttggagaagctgctggttcacaaatacgggttagcagtgttccaagccttccttcgcactgagttcagtgaggagaatctggagttctggttggcttgtgaggacttcaagaaggtcaagtcacagtccaagatggcatccaaggccaagaagatctttgctgaatacatcgcgatccaggcatgcaaggaggtcaacctggactcctacacgcgggagcacaccaaggacaacctgcagagcgtcacgcggggctgcttcgacctggcacagaagcgcatcttcgggctcatggaaaaggactcgtaccctcgctttctccgttctgacctctacctggaccttattaaccagaagaagatgagtcccccgctttaggggccactggagtcgagctcagcgttcacaccaggcgggctgggtcccctgcccacctgcctccctgccccctgtgacggagggggcaagcaagcccccagaggctgtgtctctggacagacggatagacatacggaagcgaggcctggaccaagagaggcccaggctactggaggagtagaaggatgggccccgtggggtccccactgccccggtacgagggggcccaagaccctggcaggtcaggggccctggccaagccagatctggagctgctgctccctgctgcggagaccgcggaggcttcgcgttgaccaagttccttaaagaactggctgatggggcaggaggtccaggcctgggctctcgggccctcctagagggccattggagcttgcagctcagacccccactttgagttttatttatttaaatagtagttggatgcttggcacgtcgtcctgtaataggaaacccttgcctcatcagttttcctgatttacaagtgcaatattttagccaatgccttgggagaagctgccatgcaaaggtggacaccattctccagcttcaggggatatgctcgtcccgggcaccggtggcaggcagctggccttctggactaaggcagcctggggggacactgcagtctggctacacacagagatctggcaccccctgggtggagtgtccctcgggggctttgggaaagcatggcaccctcagaccacacagtagccaagttctggagcaaataaaaggcctgtgttatttcttgttcttga

SEQ ID NO: 1544 - protein, 168 aa, Homo sapiens
MKNKLGIFRRRNESPGAPPAGKADKMMKSFKPTSEEALKWGESLEKLLVHKYGLAVFQAFLRTEFSEENLEFWLACEDFKKVKSQSKMASKAKKIFAEYIAIQACKEVNLDSYTREHTKDNLQSVTRGCFDLAQKRIFGLMEKDSYPRFLRSDLYLDLINQKKMSPPL

SEQ ID NO: 1545 - DNA, 2965 bp, Homo sapiens
ttccatcatggcggcgtccatttcgggctacaccttcagtgctgtgtgtttccacagcgccaacagcaacgcggaccacgaaggatttttactgggagaggtaagacaagaggaaacgtttagcatcagtgactcacaaatcagcaacacagaatttctgcaagtaattgaaatccataaccatcagccttgttcaaaactttttagtttttatgactacgcaagcaaagtgaatgaggagagtttggacaggattcttaaagatcggagaaagaaagtcattgggtggtacagattccggcgcaatacgcagcagcagatgtcctacagagagcaggttcttcacaagcagctcacccgcatcctcggcgtgcccgacctcgtctttcttctcttcagcttcatctccactgccaacaattccactcacgctttagaatatgtgctcttcagaccaaatagaaggtataatcagaggatatcactcgctattcccaatctaggaaatactagccagcaagagtacaaagtgtcttcagtgccaaatacttctcagagttatgccaaagtgattaaagaacatggtactgacttttttgacaaggatggagtgatgaaagacatcagggcgatttatcaggtttataatgcacttcaggagaaagttcaggcagtgtgtgcagatgttgaaaagagtgagcgagttgttgaatcttgtcaggcagaagtgaacaaattaagaagacaaatcactcagaggaaaaatgaaaaggaacaagaaagaagattgcagcaggcagtgttaagcagacagatgccgtctgaaagcttggacccagcgttcagtcctcggatgccgtcctctgggtttgcagctgaaggcagaagtacacttggagatgcagaggcctcggatcctcctcccccttactctgattttcacccaaacaatcaagaaagtactttgagccactctcgcatggaaaggagtgtctttatgcctcgacctcaagctgtgggctcttccaattatgcttccaccagtgccggactgaagtatcctggaagtggggctgaccttcctcctccccaaagagcagctggagacagtggtgaggattcagacgacagtgattatgaaaatttgattgaccctacagagccttctaatagtgaatactcacattcaaaggattctcgacccatggcacatcccgacgaggaccccaggaacactcagacctcccagatttaactaaacaaaagaaactctccacctagcactgtttttcttcattgcttactgagagggtttttgagaacttaatctggggggagaactgctttctcagataccttaactcccgagaagagagtccttgtgcacagaacttgtgggagcctccatccgctgctctttacctttggatacagtgtgcaagtttcatgacagaatcattaagataatcaaattgtcctaattctggtgcgattcatggatatactggtaaatttaggcaaagtgaaacttatcagcgtagtttctgttctttaaaataaattggaaattagagactaagcacaattagtctataaatgttctataaatcaaaaacttacctcttgcactatcatgccttgaaatttactttttcaaagggaaacaagtttagcagcagccttcaaagaacttctttctatgatgagccaaattcatctttgccagaaaagaaattttgataattccaagaagcctgattagaacaaatcagatataccttctcttgtctgcatgactttgtgagataaaagagagggcttccaacttttttctactagcttgatatgtattatcacttaaaatggttgcctttaaaaaaaaaaagtagagatactaattaccagtaagtaatcatccaaataaatacgtcataaaataaattaattattttttctttgatggattacagtgactactgtgttgcactggcacatttatggtctctgttctggaatcttggaggacacacagcagtggagaacagaaggagtgagttttataatgaacagattccagacacggtaggtttagctgagttcatacagaggagatataactcatttagatcttctgacaaatcctagtgttagttttatctgtggaggaaagacatttaataataaactgtttgggaatcttggtgaataaagattcattttcaagctgaataaccatacttattttattttaagttgccatttggggaataattgcagtatgtgtagagactctcttgggatgcacttatatttttatttaatgactacttgttttctagttttgcccacaacgtctgaaaccactaagacattcaggagcatgttgagcttctggtttggaaacagcaagacccaccatttatgacaaggacagccatgaggttaatacttggagtttaactgccttccctttgaactagttaaaatctgtaagaataaggaagttgttgaaggcttaaaatctgggttctgaaaaagtagtttcagtttataggatacacatttactcactgagctccagttccaatactaaattagacagtatcatatagacggaaaatgaaatgctagaactgccgttctttggatcgccactctatgggggtctgtcttttaactactctcctggttatgttggccttacaccactgccatttgatttaaaacgctgcagacactttatctgcaaatgtgttccagttgttatcagctacctactacgcagcttcagcgccagtgtgaatttatttttttttaagtgccattaccgtctcctctgttcagattttgacattcaggaaaatatttttattttgatgccatactgaaatctacaatgtatatctgacaaagcagttaaatgtgacaataaaaaacttatttaatcatgaaaaaaaaaaaaaaa

SEQ ID NO: 1546 - protein, 300 aa, Homo sapiens
MTFRERLLHKNLQEHFSNQDLVFLLLTPSIITESCSTHRLEHSLYKPQKGLFHRVPLVVANLGMSEQLGYKTVSGSCMSTGFSRAVQTHSSKFFEEDGSLKEVHKINEMYASLQEELKSICKKVEDSEQAVDKLVKDVNRLKREIEKRRGAQIQAAREKNIQKDPQENIFLCQALRTFFPNSEFLHSCVMSLKNRHVSKSSCNYNHHLDVVDNLTLMVEHTDIPEASPASTPQIIKHKALDLDDRWQFKRSRLLDTQDKRSKADTGSSNQDKASKMSSPETDEEIEKMKGFGEYSRSPTF

SEQ ID NO: 1547 - DNA, 3116 bp, Homo sapiens
agcgctcagatacgcgacgcgtagcaggcggggaccgaacgggtgcctcagtgtccttcccctcccctcgcctggcctcgccgtcctctccccgcagccggaccggaactatgtgatcccggaagttccggggcctttgctgtgtgggataaacagtaatggcggaggctgcaactcccggaacaacagccacaacatcaggagcaggagcggcagcggcgacggcggcagcagcctcccccaccccgatccccacagtcaccgccccgtccctgggggcgggcggagggggcggcggcagcgacggcagcggcggcggctggactaaacaggtcacctgcaggtattttatgcatggggtttgtaaggaaggagacaactgtcgctactcgcatgacctctctgacagtccgtatagtgtagtgtgcaagtattttcagcgagggtactgtatttatggagaccgctgcagatatgaacatagcaaaccattgaaacaggaagaagcaactgctacagagctaactacaaagtcatcccttgctgcttcctcaagtctctcatcgatagttggaccacttgttgaaatgaatacaggcgaagctgagtcaagaaattcaaactttgcaactgtaggagcaggttcagaggactgggtgaatgctattgagtttgttcctgggcaaccctactgtggccgtactgcgccttcctgcactgaagcacccctgcagggctcagtgaccaaggaagaatcagagaaagagcaaaccgccgtggagacaaagaagcagctgtgcccctatgctgcagtgggagagtgccgatacggggagaactgtgtgtatctccacggagattcttgtgacatgtgtgggctgcagctcctgcatccaatggatgctgcccagagatcgcagcatatcaaatcgtgcattgaggcccatgagaaggacatggagctctcatttgccgtgcagcgcagcaaggacatggtgtgtgggatctgcatggaggtggtctatgagaaagccaaccccagtgagcgccgcttcgggatcctctccaactgcaaccacacctactgtctcaagtgcattcgcaagtggaggagtgctaagcaatttgagagcaagatcataaagtcctgcccagaatgccggatcacatctaactttgtcattccaagtgagtactgggtggaggagaaagaagagaagcagaaactcattctgaaatacaaggaggcaatgagcaacaaggcgtgcaggtattttgatgaaggacgtgggagctgcccatttggagggaactgtttttacaagcatgcgtaccctgatggccgtagagaggagccacagagacagaaagtgggaacatcaagcagataccgggcccaacgaaggaaccacttctgggaactcattgaggaaagagagaacagcaacccctttgacaacgatgaagaagaggttgtcacctttgagctgggcgagatgttgcttatgcttttggctgcaggtggggacgacgaactaacagactctgaagatgagtgggacttgtttcatgatgagctggaagatttttatgacttggatctatagcaaccttgcgtggcgtgtgaactggtctgctgacctcagacagcagctgtcccctgtggtggtgtggcagtgcctgtgttctctcctaggcaggcctctcaactccaggtgctgtcctaagaatttttacccagggcctgtcttctcaacccctcacctttccctgaggagtgtgttgttttccctgttgaaaaaagttacaaaaataaatcttaaagttagttttttgtaacacgaatttaactgtcagacagttagtgtaggtgtgttgcgtcatctgttttcaaccagattgcatttatggacttttcacacactcattttgaggaccccaggttcaaaagtaaaagcagtggccctgctttggggtccaagaataggagtgatgggtgaagggacctaagctggccaatagccctctgccccagacatgggatgtggatccttgaggtttctggtgaaatctgcacatctgtgtttttatatctgttccctaccctgtaatccctaccacgtgcacttgttctgtggttttggtctcttgtttaattgcacacaagtaatactactgggtaaccagaatcaggtgtgaatgtgttgagattttttactgttttgcatgataggaaaattgagaaagaatacgtataaaagatagagaggcataacatcaatgcagagttggaagttggctcccaagggctgacatggtgtgagtgtgtgggtgtgtgataagcttctcatccctgcatagatgcagtattcttagccttagtagaaaaacctggtttagtggtttaagccttgtgtggcagatagatcttaaagggcaaagcagtatattggtagttgtcaatatagcagtgctagctctgtctatataaatagagaaatggggttagccatagaggttaaaactacctggttatcccatataataacacaaactgggtcttggatacacagttgtatttaatgttttacgatctagcctttccagtacaggcactttctgagaaacctttgtcctcacttgaggcattttgttgtcgggtttttgtgtttgtttttgtgggtatttgcctcattccacccctgagctttcaggtagacagacgtgattcaaaactctgttctaaggtgtttattgtagtggagtaatgggtttgcagtgataagtcatacttttccaccgaaagggagggcttgggaatccctgagattagctaaagttaagttgttggaagaattccttgattggaaattgtacctttgtgttttgttgctctgtttcctgaaaataactcggggatgctcctggtttgtccatctactgctttgattccttggatcccacccattctttcactttaagaaaaaacaaataattgttgcagaggtctctgtattttgcagctgcccttttgtaagaagcacttttcccaaataaaacaattaaaaaaaaaaaaaaaaaaaaaaaaaaaaaaaaaaaaaaaaaaaaaaaaaaaa

SEQ ID NO: 1548 - protein, 482 aa, Homo sapiens
MAEAATPGTTATTSGAGAAAATAAAASPTPIPTVTAPSLGAGGGGGGSDGSGGGWTKQVTCRYFMHGVCKEGDNCRYSHDLSDSPYSVVCKYFQRGYCIYGDRCRYEHSKPLKQEEATATELTTKSSLAASSSLSSIVGPLVEMNTGEAESRNSNFATVGAGSEDWVNAIEFVPGQPYCGRTAPSCTEAPLQGSVTKEESEKEQTAVETKKQLCPYAAVGECRYGENCVYLHGDSCDMCGLQLLHPMDAAQRSQHIKSCIEAHEKDMELSFAVQRSKDMVCGICMEVVYEKANPSERRFGILSNCNHTYCLKCIRKWRSAKQFESKIIKSCPECRITSNFVIPSEYWVEEKEEKQKLILKYKEAMSNKACRYFDEGRGSCPFGGNCFYKHAYPDGRREEPQRQKVGTSSRYRAQRRNHFWELIEERENSNPFDNDEEEVVTFELGEMLLMLLAAGGDDELTDSEDEWDLFHDELEDFYDLDL

SEQ ID NO: 1549 - DNA, 1449 bp, Homo sapiens
atggtggagaagggccccgaggtctcagggaagcggagagggaggaacaacgcggccgcctccgcctccgccgccgccgcctccgccgccgcctcggccgcctgcgcctcgccagccgccactgccgcctcgggcgccgccgcctcctcagcctcggccgccgccgcctcagccgccgccgcccccaataatggccagaataaaagtttggcggcggcggcgcccaatggcaacagcagcagcaactcctgggaggaaggcagctcgggctcgtccagcgacgaggagcacggtggcggtggcatgagggtcggaccccagtaccaggcggtggtgcccgacttcgaccccgccaaactggcaagacgcagtcaagaacgggacaatcttggcatgttggtctggtcacccaatcaaaatctgtcagaagcaaagttggatgaatacattgccattgccaaagaaaagcatgggtacaacatggaacaggctcttgggatgctcttctggcataaacataatatcgaaaagtcattggctgatttgcccaactttacccctttcccagatgagtggactgtggaagataaagtcttatttgagcaagcctttagttttcatgggaaaacttttcatagaatccaacaaatgcttccagataaatctatagcaagtctggtgaaattttactattcttggaagaagacgaggactaaaactagtgtgatggatcgccatgcccggaaacaaaaacgggagcgggaggagagcgaggatgaactggaagaggcaaatggaaacaatcccattgacattgaggttgatcaaaacaaggaaagcaaaaaggaggttccccctactgagacagttcctcaggtcaaaaaagaaaaacatagcacacaagctaaaaatagagcaaaaaggaaacctccaaaaggaatgtttctttctcaagaagatgtggaggctgtttctgccaatgccactgctgctaccacggtgctgagacaactagacatggaattggtttcagtcaaacgacagatccagaatattaaacagacaaacagtgctctcaaagaaaaacttgatggtggaatagaaccatatcgacttccagaggtcattcagaaatgtaatgcacgttggactacagaagagcagcttctcgccgtacaagccatcaggaaatatggccgagattttcaggcaatctcagacgtgattgggaacaaatcagtggtacaagtgaaaaacttttttgtaaattatcgacgccgcttcaacatagatgaagttttacaagaatgggaggcagaacatggtaaagaagagaccaatgggcccagtaaccagaagcctgtgaagtccccagataattccattaagatgcccgaagaggaagacgaggctcctgttctggatgtcagatatgcatctgcctcctga

SEQ ID NO: 1550 - protein, 482 aa, Homo sapiens
MVEKGPEVSGKRRGRNNAAASASAAAASAAASAACASPAATAASGAAASSASAAAASAAAAPNNGQNKSLAAAAPNGNSSSNSWEEGSSGSSSDEEHGGGGMRVGPQYQAVVPDFDPAKLARRSQERDNLGMLVWSPNQNLSEAKLDEYIAIAKEKHGYNMEQALGMLFWHKHNIEKSLADLPNFTPFPDEWTVEDKVLFEQAFSFHGKTFHRIQQMLPDKSIASLVKFYYSWKKTRTKTSVMDRHARKQKREREESEDELEEANGNNPIDIEVDQNKESKKEVPPTETVPQVKKEKHSTQAKNRAKRKPPKGMFLSQEDVEAVSANATAATTVLRQLDMELVSVKRQIQNIKQTNSALKEKLDGGIEPYRLPEVIQKCNARWTTEEQLLAVQAIRKYGRDFQAISDVIGNKSVVQVKNFFVNYRRRFNIDEVLQEWEAEHGKEETNGPSNQKPVKSPDNSIKMPEEEDEAPVLDVRYASAS

SEQ ID NO: 1551 - DNA, 4398 bp, Homo sapiens
ggccaaaggtcaagatacttctctgggaaatgttgctgctgatgctgctttacaaagtcatacaatgagtgtttggtttaagaaagattttcatacttaaaagattttcatcttggaaatacatcaagtgaaaattaaattcttttgggaaacattttccttctgatatattatacttgtaatgggcgacatggcaaacaactcagttgcttacagtggtgtgaaaaactctttgaaggaagctaatcatgatggagactttggaattacgctcgcagagctgcgggctctcatggagctcaggtccacagatgcattacgaaaaatacaggaaagctatggagatgtctatggaatttgcaccaaattgaaaacatctcccaatgaaggtttaagtggaaaccctgcagatttagaaagaagagaagcagtgtttggaaagaattttatacctcctaaaaagccaaaaacctttcttcaattagtatgggaagcattacaagatgtcactttaattatattagaaattgcagccatagtatcattgggcctttctttttatcagcctccagaaggggataatgcactttgtggagaagtttctgttggggaggaagaaggtgaaggtgaaactgggtggattgaaggagctgcaatcctcttgtctgtagtgtgtgtggtgttagtaacagctttcaatgactggagtaaggagaaacagtttagaggtttgcagagccgaattgaacaagaacagaagttcactgtcatcaggggtggtcaggtcattcagatacctgtagctgacattactgttggagatattgctcaagtgaaatatggtgatcttcttccagctgacggcatacttattcaaggcaacgatcttaaaattgatgaaagctcattgactggtgaatcagatcatgttaaaaagtctttagataaggatcccttacttctatcaggtactcatgtaagggaaggctctggaagaatggtagttacagctgtaggtgtaaattctcaaactggaattatctttaccttacttggagctggaggtgaagaggaagagaagaaagatgagaagaaaaaggaaaagaaaaataagaaacaagatggagctattgagaatcgcaacaaagcaaaagcccaggatggtgcagccatggaaatgcagccattgaagagtgaagaaggtggagatggtgatgaaaaagataaaaagaaagcaaatttgccaaaaaaggaaaaatctgttttacaagggaaacttacaaaactggctgttcagattggcaaagcaggtctgttgatgtctgccatcacagttatcattctagtattatattttgtcattgacaccttctgggttcagaaaagaccatggcttgctgagtgcacaccaatttatatacaatactttgtgaagttcttcattattggagttacagttttagtggtcgcagtgccagaaggtcttccacttgcagtcacgatctcactggcttattcagtcaaaaaaatgatgaaagataataacttagtaaggcatctggatgcttgtgaaaccatgggaaatgctacagctatttgttcagataaaacaggaactttgacaatgaacagaatgacagtcgttcaagcttacataaatgaaaaacattataaaaaggttcctgaaccagaagctattccaccaaatattttgtcctatcttgtaacaggaatttctgtgaattgtgcttatacatcaaaaatattgccaccagagaaagagggtggattacctcgtcacgttggtaataaaactgaatgtgccttgttgggacttcttttggatttaaaacgggattatcaggatgttagaaatgaaataccagaagaagcactgtacaaagtctacaccttcaattctgttaggaagtccatgagtactgtcctgaaaaattcagatggaagttatcgaatattcagcaagggtgcatctgagataattctgaaaaagtgtttcaaaatcttgagtgctaatggtgaggcaaaagtattcagaccaagggaccgtgatgatattgtaaaaactgtgattgaaccgatggcatcagaaggcttgagaaccatatgtcttgcattcagagattttccagcaggagaaccagaaccagagtgggataatgaaaatgatattgtcaccggccttacatgcattgctgttgtggggattgaagatcctgtgagacctgaggtgccagatgcaattaaaaagtgtcagagggctggaattactgtgcggatggtcactggtgataatattaatactgctcgggccattgctaccaaatgtggtattttacatcctggggaagattttctgtgcctagaaggtaaagattttaacagaagaatacgaaatgaaaaaggagagattgagcaagagaggatagacaagatttggccaaaacttcgagtacttgcaagatcatctcctactgataagcatacactggttaaaggtataattgacagcactgtctcagaccaacgccaggttgtagctgtaactggtgatggtacaaatgatggcccagcactaaagaaagcagatgttggatttgcaatgggtattgctggaactgatgtagctaaagaagcatccgatattattctcacagatgacaactttacaagcattgttaaagcagttatgtggggacgaaatgtctatgacagcatctcaaaattccttcagttccaacttactgttaatgtagtagcagtgattgttgcttttacgggcgcctgcattactcaagactcaccgcttaaggctgtgcagatgctgtgggtaaacctcataatggatacactcgcttccctggctctggcaacggaaccacccactgagtctctcttgcttcggaaaccttatggtagaaataagcctctcatctcacgtacaatgatgaagaatattttgggtcatgcattctatcaacttgtagtagtctttacactcttatttgctggagaaaagttttttgacattgatagtggaagaaatgctcctttgcatgctcctccttcagaacattatactattgtttttaatacctttgtgctgatgcaacttttcaacgaaataaatgcccggaaaattcatggtgaaagaaatgtattcgaaggaatctttaacaatgccatcttctgcacaattgttttaggcacttttgtggtacagataataattgtgcagtttggtggaaaacctttcagttgttcagaactttcaatagaacagtggctatggtcaatattcctaggaatgggaacattactctggggccagcttatttcaacaattccaactagccgtttaaaattcctcaaagaagctggtcatggaacacaaaaggaagaaatacctgaggaggaattagcagaggatgttgaagagattgatcacgctgaaagggagttgcggcgtggccaaatcttgtggtttagaggtctgaacagaatccaaacacagattcgagtggtgaatgcatttcgtagttctttatatgaagggttagaaaaaccggaatcaagaagttcgattcacaactttatgacacatcctgagtttaggatagaagattcagagcctcatatcccccttattgatgacactgatgccgaagatgatgctcctacaaaacgtaactccagtcctccaccctctcccaacaaaaataacaatgctgttgacagtggaattcaccttacaatagaaatgaacaagtctgctacctcttcatccccaggaagcccactacatagtttggaaacatcactctgattgtaagctgaatgttaacacactagctgcattgtaaagaaacaaattgaaactgggtcttttcacatattgtgatggacaagctagtattcttgtctttggacttcaacagaagacacacttgtacgaatgtagatttatttttttaaaaaaaaaaaagcaaagctttctgccagactgagggtgctttttggggggtgggagaaatgaactgacagataaacagtaactcagcgtaagtgacctgtggatcatcagtagtacccaagcatggtcctgaacagtgtattagcagagctttagtttatctcagtcctggatgggagagagagggaggagtaaaactgggcaagacaaagagccctggatcgttgaattgatagtttaatttctgctgttggctgttaataatttggattatttatgtttataaatgatacagatctgtttacaaggtttgtagatactttttttgttcctgttcatagatgggaagcttccttataactgatgcagagaaaaattagtccttcaaatactgctgtattttcagg

SEQ ID NO: 1552 - protein, 1220 aa, Homo sapiens
MGDMANNSVAYSGVKNSLKEANHDGDFGITLAELRALMELRSTDALRKIQESYGDVYGICTKLKTSPNEGLSGNPADLERREAVFGKNFIPPKKPKTFLQLVWEALQDVTLIILEIAAIVSLGLSFYQPPEGDNALCGEVSVGEEEGEGETGWIEGAAILLSVVCVVLVTAFNDWSKEKQFRGLQSRIEQEQKFTVIRGGQVIQIPVADITVGDIAQVKYGDLLPADGILIQGNDLKIDESSLTGESDHVKKSLDKDPLLLSGTHVREGSGRMVVTAVGVNSQTGIIFTLLGAGGEEEEKKDEKKKEKKNKKQDGAIENRNKAKAQDGAAMEMQPLKSEEGGDGDEKDKKKANLPKKEKSVLQGKLTKLAVQIGKAGLLMSAITVIILVLYFVIDTFWVQKRPWLAECTPIYIQYFVKFFIIGVTVLVVAVPEGLPLAVTISLAYSVKKMMKDNNLVRHLDACETMGNATAICSDKTGTLTMNRMTVVQAYINEKHYKKVPEPEAIPPNILSYLVTGISVNCAYTSKILPPEKEGGLPRHVGNKTECALLGLLLDLKRDYQDVRNEIPEEALYKVYTFNSVRKSMSTVLKNSDGSYRIFSKGASEIILKKCFKILSANGEAKVFRPRDRDDIVKTVIEPMASEGLRTICLAFRDFPAGEPEPEWDNENDIVTGLTCIAVVGIEDPVRPEVPDAIKKCQRAGITVRMVTGDNINTARAIATKCGILHPGEDFLCLEGKDFNRRIRNEKGEIEQERIDKIWPKLRVLARSSPTDKHTLVKGIIDSTVSDQRQVVAVTGDGTNDGPALKKADVGFAMGIAGTDVAKEASDIILTDDNFTSIVKAVMWGRNVYDSISKFLQFQLTVNVVAVIVAFTGACITQDSPLKAVQMLWVNLIMDTLASLALATEPPTESLLLRKPYGRNKPLISRTMMKNILGHAFYQLVVVFTLLFAGEKFFDIDSGRNAPLHAPPSEHYTIVFNTFVLMQLFNEINARKIHGERNVFEGIFNNAIFCTIVLGTFVVQIIIVQFGGKPFSCSELSIEQWLWSIFLGMGTLLWGQLISTIPTSRLKFLKEAGHGTQKEEIPEEELAEDVEEIDHAERELRRGQILWFRGLNRIQTQIRVVNAFRSSLYEGLEKPESRSSIHNFMTHPEFRIEDSEPHIPLIDDTDAEDDAPTKRNSSPPPSPNKNNNAVDSGIHLTIEMNKSATSSSPGSPLHSLETSL

SEQ ID NO: 1553 - DNA, 2430 bp, Homo sapiens
accggcagcgaggcgccgctcccgccgcctcagcccggccttcctcggctccggcgctccggtcgcggggcccgggttcctcggcacaccccgctccagccgcccccagagcctgtccccagcccttcggaagccccggcgccagcccgggccctcggcagggaggatgacggagctgcagtcggcactgctactgcgaagacagctggcagaactcaacaaaaatccagtggaaggcttttctgcaggtttaatagatgacaatgatctctaccgatgggaagtccttattattggccctccagatacactttatgaaggtggtgtttttaaggctcatcttactttcccaaaagattatcccctccgacctcctaaaatgaaattcattacagaaatctggcacccaaatgttgataaaaatggtgatgtgtgcatttctattcttcatgagcctggggaagataagtatggttatgaaaagccagaggaacgctggctccctatccacactgtggaaaccatcatgattagtgtcatttctatgctggcagaccctaatggagactcacctgctaatgttgatgctgcgaaagaatggagggaagatagaaatggagaatttaaaagaaaagttgcccgctgtgtaagaaaaagccaagagactgcttttgagtgacatttatttagcagctagtaacttcacttatttcagggtctccaattgagaaacatggcactgtttttcctgcactctacccacctattgctggacttctgttgtacaagttggcaaacactggctggaactgggctgcaataaaacatgccagttatcaatgctgacaagagcctaacaagtgccaacttacagatgattacgcattttgaattctaatgaactgttttaaccttcaggaagaattgtaaagacctgtacatagcacaacatgatccggataatatatatactgttcatgtacatccacaaatacaccttgtaccaaataatgctttcttgtagtagaataagaatcgtgtaaattctaagagattttagcaggttttctttcctattcattgtttcttatcagtttaaaaggattcctttaagcatgtcagatgaaaagcaattaggattaaaagtttccatttaatttcccttaaacccttgaggcttcattaaactcttttcacttactaaacttttgtatcttctttgttttgacacactcccctttgcttttatctcttacctgccagaatgttctcaaatgatttagttcaaatactgaaatacttaatgagcaattacttgatttttaatgatgacttcgaaggagtcatcactaggtgctttgtcctttttgtattctagttgcacccacctcttggattggatatagcaataacatttattggccgttgtgagctcttgatcccagtcattacccctgagaactaaaaatagatggttcttaattcaacttactgaaaatttccccaaacaatagcaaatctgacttttccctcttcagttgcctggtattaaggttggataaatgaagcatgcacagctacaggctttctacttaacttctgggtttgctattacaaatcctatttactctcatacccttctccttagtccttcatatttctctgcctctattcttctatactgcagatttttctcacctattgtacaaagaaattgcgatgtatattttcatgtaatttgattttggaattctgtcaccttatgtagtgagttcttccaaaatataattttttttcaataattgtcaagttgttggcttttattgtattgaatgaaggctataatactgagtgccagagaagtggtttaggaaaatctcaggttgattccttatgcaaatgaacttttaatacttgaaaatcacatggccatggcagtatatgtatttggttctatctagattcttctgtgaatctaaaagcattacaggggtaaatgctttgctatttgacgtatagatcccgtcactaacaatagtacacttggatgtgattaatgtttgagcttcaatatatttcatatcatacagttttctaaaacaacttcagcaaatggtaaaatgaacatgtgcagtgttaaaggcaggccttaggctccttcatgtttgttgtgaggttgtgtgtgggaagtagtctttggcttataagggatagaacttgagacagtagcagatgggacatggtgtttgattgtgagaatcagtgagaattcgtgcatctctgctctgtggggtttggagaaatgctttggcagaagagtgaaagaactcctgccaagagcccagacctctacaaacgttgtatgtccttttttaagcagaaataaaatggttgaggacgaaaaaaaaaaaaaaaaaaaaaaaaaaaaaa

SEQ ID NO: 1554 - protein, 170 aa, Homo sapiens
MTELQSALLLRRQLAELNKNPVEGFSAGLIDDNDLYRWEVLIIGPPDTLYEGGVFKAHLTFPKDYPLRPPKMKFITEIWHPNVDKNGDVCISILHEPGEDKYGYEKPEERWLPIHTVETIMISVISMLADPNGDSPANVDAAKEWREDRNGEFKRKVARCVRKSQETAFE

SEQ ID NO: 1555 - DNA, 4022 bp, Homo sapiens
gtacgtgcgcgtctccctgccgccgccgccgcccgccgcgggccgccccggggccgccgtcgccgacgacgcgcgggaggaggaggaggaggccgccccgccgccgccgccgccgccgccgccccggctcgccgccgcccgcccgccgggctcgcagccccggcccccggccgcaggcgaggcccaggccgcggccgacatgaaccaccagcagcagcagcagcagcagaaagcgggcgagcagcagttgagcgagcccgaggacatggagatggaagcgggagatacagatgacccaccaagaattactcagaaccctgtgatcaatgggaatgtggccctgagtgatggacacaacaccgcggaggaggacatggaggatgacaccagttggcgctccgaggcaacctttcagttcactgtggagcgcttcagcagactgagtgagtcggtccttagccctccgtgttttgtgcgaaatctgccatggaagattatggtgatgccacgcttttatccagacagaccacaccaaaaaagcgtaggattctttctccagtgcaatgctgaatctgattccacgtcatggtcttgccatgcacaagcagtgctgaagataataaattacagagatgatgaaaagtcgttcagtcgtcgtattagtcatttgttcttccataaagaaaatgattggggattttccaattttatggcctggagtgaagtgaccgatcctgagaaaggatttatagatgatgacaaagttacctttgaagtctttgtacaggcggatgctccccatggagttgcgtgggattcaaagaagcacacaggctacgtcggcttaaagaatcagggagcgacttgttacatgaacagcctgctacagacgttatttttcacgaatcagctacgaaaggctgtgtacatgatgccaaccgagggggatgattcgtctaaaagcgtccctttagcattacaaagagtgttctatgaattacagcatagtgataaacctgtaggaacaaaaaagttaacaaagtcatttgggtgggaaactttagatagcttcatgcaacatgatgttcaggagctttgtcgagtgttgctcgataatgtggaaaataagatgaaaggcacctgtgtagagggcaccatacccaaattattccgcggcaaaatggtgtcctatatccagtgtaaagaagtagactatcggtctgatagaagagaagattattatgatatccagctaagtatcaaaggaaagaaaaatatatttgaatcatttgtggattatgtggcagtagaacagctcgatggggacaataaatacgacgctggggaacatggcttacaggaagcagagaaaggtgtgaaattcctaacattgccaccagtgttacatctacaactgatgagatttatgtatgaccctcagacggaccaaaatatcaagatcaatgataggtttgaattcccagagcagttaccacttgatgaatttttgcaaaaaacagatcctaaggaccctgcaaattatattcttcatgcagtcctggttcatagtggagataatcatggtggacattatgtggtttatctaaaccccaaaggggatggcaaatggtgtaaatttgatgacgacgtggtgtcaaggtgtactaaagaggaagcaattgagcacaattatgggggtcacgatgacgacctgtctgttcgacactgcactaatgcttacatgttagtctacatcagggaatcaaaactgagtgaagttttacaggcggtcaccgaccatgatattcctcagcagttggtggagcgattacaagaagagaaaaggatcgaggctcagaagcggaaggagcggcaggaagcccatctctatatgcaagtgcagatagtcgcagaggaccagttttgtggccaccaagggaatgacatgtacgatgaagaaaaagtgaaatacactgtgttcaaagtattgaagaactcctcgcttgctgagtttgttcagagcctctctcagaccatgggatttccacaagatcaaattcgattgtggcccatgcaagcaaggagtaatggaacaaaacgaccagcaatgttagataatgaagccgacggcaataaaacaatgattgagctcagtgataatgaaaacccttggacaatattcctggaaacagttgatcccgagctggctgctagtggagcgaccttacccaagtttgataaagatcatgatgtaatgttatttttgaagatgtatgatcccaaaacgcggagcttgaattactgtgggcatatctacacaccaatatcctgtaaaatacgtgacttgctcccagttatgtgtgacagagcaggatttattcaagatactagccttatcctctatgaggaagttaaaccgaatttaacagagagaattcaggactatgacgtgtctcttgataaagcccttgatgaactaatggatggtgacatcatagtatttcagaaggatgaccctgaaaatgataacagtgaattacccaccgcaaaggagtatttccgagatctctaccaccgcgttgatgtcattttctgtgataaaacaatccctaatgatcctggatttgtggttacgttatcaaatagaatgaattattttcaggttgcaaagacagttgcacagaggctcaacacagatccaatgttgctgcagtttttcaagtctcaaggttatagggatggcccaggtaatcctcttagacataattatgaaggtactttaagagatcttctacagttcttcaagcctagacaacctaagaaactttactatcagcagcttaagatgaaaatcacagactttgagaacaggcgaagttttaaatgtatatggttaaacagccaatttagggaagaggaaataacactatatccagacaagcatgggtgtgtccgggacctgttagaagaatgtaaaaaggccgtggagcttggggagaaagcatcagggaaacttaggctgctagaaattgtaagctacaaaatcattggtgttcatcaagaagatgaactattagaatgtttatctcctgcaacgagccggacgtttcgaatagaggaaatccctttggaccaggtggacatagacaaagagaatgagatgcttgtcacagtggcgcatttccacaaagaggtcttcggaacgttcggaatcccgtttttgctgaggatacaccagggcgagcattttcgagaagtgatgaagcgaatccagagcctgctggacatccaggagaaggagtttgagaagtttaaatttgcaattgtaatgacgggccgacaccagtacataaatgaagacgagtatgaagtaaatttgaaagactttgagccacagcccggtaatatgtctcatcctcggccttggctagggctcgaccacttcaacaaagccccaaagaggagtcgctacacttaccttgaaaaggccattaaaatccataactgatttccaagctggtgtgttcaaggcgaggacggtgtgtgggtggccccttaacagcctagaactttggtgcacgtgccctctagccgaagtcttcagcaagaggattcgctgctggtgttaattttattttattgaggctgttcagtttggcttctctgtatctattgactgccctttttgagcaaaatgaagatgtttttataaagcttggatgccaatgagagttattttatggtaaccacagtgcaaggcaactgtcagcgcaatgggggagaagaggttagtggatcgggggtccctggctcaaggtctctgggctgtccctagtgggcacgagtggctcggctgccttcctggggtcccgtgcaccagccctgcagctagcaagtcttgtgtttaggctcgtctgacctatttccttcagttatactttcaatgaccttttgtgcatctgttaaggcaaaacagagaaactcacaacctaataaatagcgctcttcccttcaaaaaaaaa

SEQ ID NO: 1556 - protein, 1102 aa, Homo sapiens
MNHQQQQQQQKAGEQQLSEPEDMEMEAGDTDDPPRITQNPVINGNVALSDGHNTAEEDMEDDTSWRSEATFQFTVERFSRLSESVLSPPCFVRNLPWKIMVMPRFYPDRPHQKSVGFFLQCNAESDSTSWSCHAQAVLKIINYRDDEKSFSRRISHLFFHKENDWGFSNFMAWSEVTDPEKGFIDDDKVTFEVFVQADAPHGVAWDSKKHTGYVGLKNQGATCYMNSLLQTLFFTNQLRKAVYMMPTEGDDSSKSVPLALQRVFYELQHSDKPVGTKKLTKSFGWETLDSFMQHDVQELCRVLLDNVENKMKGTCVEGTIPKLFRGKMVSYIQCKEVDYRSDRREDYYDIQLSIKGKKNIFESFVDYVAVEQLDGDNKYDAGEHGLQEAEKGVKFLTLPPVLHLQLMRFMYDPQTDQNIKINDRFEFPEQLPLDEFLQKTDPKDPANYILHAVLVHSGDNHGGHYVVYLNPKGDGKWCKFDDDVVSRCTKEEAIEHNYGGHDDDLSVRHCTNAYMLVYIRESKLSEVLQAVTDHDIPQQLVERLQEEKRIEAQKRKERQEAHLYMQVQIVAEDQFCGHQGNDMYDEEKVKYTVFKVLKNSSLAEFVQSLSQTMGFPQDQIRLWPMQARSNGTKRPAMLDNEADGNKTMIELSDNENPWTIFLETVDPELAASGATLPKFDKDHDVMLFLKMYDPKTRSLNYCGHIYTPISCKIRDLLPVMCDRAGFIQDTSLILYEEVKPNLTERIQDYDVSLDKALDELMDGDIIVFQKDDPENDNSELPTAKEYFRDLYHRVDVIFCDKTIPNDPGFVVTLSNRMNYFQVAKTVAQRLNTDPMLLQFFKSQGYRDGPGNPLRHNYEGTLRDLLQFFKPRQPKKLYYQQLKMKITDFENRRSFKCIWLNSQFREEEITLYPDKHGCVRDLLEECKKAVELGEKASGKLRLLEIVSYKIIGVHQEDELLECLSPATSRTFRIEEIPLDQVDIDKENEMLVTVAHFHKEVFGTFGIPFLLRIHQGEHFREVMKRIQSLLDIQEKEFEKFKFAIVMTGRHQYINEDEYEVNLKDFEPQPGNMSHPRPWLGLDHFNKAPKRSRYTYLEKAIKIHN

SEQ ID NO: 1557 - DNA, 2373 bp, Homo sapiens
ggcacgaggagcgtttcgtttggacttctcgacttgagtgcccgcctccttcgccgccgcctctgcagtcctcagcgcagttatgcccagttcttcccgctgtggggacacgaccacggaggaatccttgcttcagggactcgggaccctgctggaccccttcctcgggtttaggggatgtggggaccaggagaaagtcaggatccctaagagtcttccctgcctggatggatgagtggcttcttctccacctagattctttccacaggagccagcatacttcctgaacatggagagtgttgttcgccgctgcccattcttatcccgagtcccccaggcctttctgcagaaagcaggcaaatctctgttgttctatgcccaaaactgccccaagatgatggaagttggggccaagccagcccctcgggcattgtccactgcagcagtacactaccaacagatcaaagaaacccctccggccagtgagaaagacaaaactgctaaggccaaggtccaacagactcctgatggatcccagcagagtccagatggcacacagcttccgtctggacaccccttgcctgccacaagccagggcactgcaagcaaatgccctttcctggcagcacagatgaatcagagaggcagcagtgtcttctgcaaagccagtcttgagcttcaggaggatgtgcaggaaatgaatgccgtgaggaaagaggttgctgaaacctcagcaggccccagtgtggttagtgtgaaaaccgatggaggggatcccagtggactgctgaagaacttccaggacattatgcaaaagcaaagaccagaaagagtgtctcatcttcttcaagataacttgccaaaatctgtttccacttttcagtatgatcgtttctttgagaaaaaaattgatgagaaaaagaatgaccacacctatcgagtttttaaaactgtgaaccggcgagcacacatcttccccatggcagatgactattcagactccctcatcaccaaaaagcaagtgtcagtctggtgcagtaatgactacctaggaatgagtcgccacccacgggtgtgtggggcagttatggacactttgaaacaacatggtgctggggcaggtggtactagaaatatttctggaactagtaaattccatgtggacttagagcgggagctggcagacctccatgggaaagatgccgcactcttgttttcctcgtgctttgtggccaatgactcaaccctcttcaccctggctaagatgatgccaggctgtgagatttactctgattctgggaaccatgcctccatgatccaagggattcgaaacagccgagtgccaaagtacatcttccgccacaatgatgtcagccacctcagagaactgctgcaaagatctgacccctcagtccccaagattgtggcatttgaaactgtccattcaatggatggggcggtgtgcccactggaagagctgtgtgatgtggcccatgagtttggagcaatcaccttcgtggatgaggtccacgcagtggggctttatggggctcgaggcggagggattggggatcgggatggagtcatgccaaaaatggacatcatttctggaacacttggcaaagcctttggttgtgttggagggtacatcgccagcacgagttctctgattgacaccgtacggtcctatgctgctggcttcatcttcaccacctctctgccacccatgctgctggctggagccctggagtctgtgcggatcctgaagagcgctgagggacgggtgcttcgccgccagcaccagcgcaacgtcaaactcatgagacagatgctaatggatgccggcctccctgttgtccactgccccagccacatcatccctgtgcgggttgcagatgctgctaaaaacacagaagtctgtgatgaactaatgagcagacataacatctacgtgcaagcaatcaattaccctacggtgccccggggagaagagctcctacggattgcccccacccctcaccacacaccccagatgatgaactacttccttgagaatctgctagtcacatggaagcaagtggggctggaactgaagcctcattcctcagctgagtgcaacttctgcaggaggccactgcattttgaagtgatgagtgaaagagagaagtcctatttctcaggcttgagcaagttggtatctgctcaggcctgagcatgacctcaattatttcacttaaccccaggccattatcatatccagatggtcttcagagttgtctttatatgtgaattaagttatattaaattttaatctatagtaaaaacatagtcctggaaataaaaaaaaaaaaaaaaaaaaaaaaaaaaaaaaaa

SEQ ID NO: 1558 - protein, 640 aa, Homo sapiens
MESVVRRCPFLSRVPQAFLQKAGKSLLFYAQNCPKMMEVGAKPAPRALSTAAVHYQQIKETPPASEKDKTAKAKVQQTPDGSQQSPDGTQLPSGHPLPATSQGTASKCPFLAAQMNQRGSSVFCKASLELQEDVQEMNAVRKEVAETSAGPSVVSVKTDGGDPSGLLKNFQDIMQKQRPERVSHLLQDNLPKSVSTFQYDRFFEKKIDEKKNDHTYRVFKTVNRRAHIFPMADDYSDSLITKKQVSVWCSNDYLGMSRHPRVCGAVMDTLKQHGAGAGGTRNISGTSKFHVDLERELADLHGKDAALLFSSCFVANDSTLFTLAKMMPGCEIYSDSGNHASMIQGIRNSRVPKYIFRHNDVSHLRELLQRSDPSVPKIVAFETVHSMDGAVCPLEELCDVAHEFGAITFVDEVHAVGLYGARGGGIGDRDGVMPKMDIISGTLGKAFGCVGGYIASTSSLIDTVRSYAAGFIFTTSLPPMLLAGALESVRILKSAEGRVLRRQHQRNVKLMRQMLMDAGLPVVHCPSHIIPVRVADAAKNTEVCDELMSRHNIYVQAINYPTVPRGEELLRIAPTPHHTPQMMNYFLENLLVTWKQVGLELKPHSSAECNFCRRPLHFEVMSEREKSYFSGLSKLVSAQA

SEQ ID NO: 1559 - DNA, 3009 bp, Homo sapiens
gcgcaggcgcggcggccgatgcgagtgtgtatgtgcgggcgagaagatggcggcggcgggggaagcagcgtgagcagccggaggatcgcggagtcccaatgaaacgggcagccatggccctccacagcccgcagtatatttttggagattttagccctgatgaattcaatcaattctttgtgactcctcgatcttcagttgagcttcctccatacagtggaacagttctgtgtggcacacaggctgtggataaactacctgatggacaagaatatcagagaattgagtttggtgtcgatgaagtcattgaacccagtgacactttgccgagaacccccagctacagtatttcaagcacactgaaccctcaggcccctgaatttattctcggttgtacagcttccaaaataacccctgatggtatcactaaagaagcaagctatggctccatcgactgccagtacccaggctctgccctcgctttggatggaagttctaatgtggaggcggaagttttggaaaatgatggtgtctcaggtggtcttggacaaagggagcgtaaaaagaagaaaaagcggccacctggatattacagctatttgaaagatggtggcgatgatagtatctccacagaagccctggtcaatggccatgccaattcagcagtcccgaacagtgtcagtgcagaggatgcagaatttatgggtgacatgcctccgccacttacgcccaggacttgtaacagcccccagaactccacagactctgtcagtgacattgtgcctgacagtcctttccccggagcactcggcagtgacaccaggactgcagggcagccagaggggggccccggggctgattttggtcagtcctgcttccctgcagaggctggcagagacaccctgtcaaggacagctggggctcagccctgcgttggtaccgatactactgaaaaccttggagttgctaatggacaaatacttgaatcctcgggtgagggcacagctaccaacggggtggagttgcacaccacggaaagcatagacttggacccaaccaaacccgagagtgcatcacctcctgctgacggcacgggctctgcatcaggcacccttcctgtcagccagcccaagtcctgggccagcctctttcatgattctaagccctcttcctcctcgccggtggcctatgtggaaactaagtattcccctcccgccatatctcccctggtttctgaaaagcaggttgaagtcaaagaagggcttgttccggtttcagaggatcctgtagccataaagattgcagagttgctggagaatgtaaccctaatccataaaccagtgtcgttgcaaccccgtgggctgatcaataaagggaactggtgctacattaatgctacactgcaggcattggttgcttgcccgccgatgtaccacctgatgaagttcattcctctgtattccaaagtgcaaaggccttgtacgtcaacacccatgatagacagctttgttcggctaatgaatgagttcactaatatgccagtacctccaaaaccccgacaagctcttggagataaaatcgtgagggatattcgccctggagctgcctttgagcccacatatatttacagactcctgacagttaacaagtcaagcctgtctgaaaagggtcgacaagaagatgctgaggaatacttaggcttcattctaaatggacttcatgaggaaatgttgaacctaaagaagcttctctcaccaagtaatgaaaaacttacgatttccaacggccccaaaaaccactcggtcaatgaagaagagcaggaagaacaaggtgaaggaagcgaggatgaatgggaacaagtgggcccccggaacaagacttccgtcacccgccaggcggattttgttcagactccaatcaccggcatttttggtggacacatcaggtctgtggtttaccagcagagttcaaaagaatctgccactttgcagccatttttcacgttgcagttggatatccagtcagacaagatacgcacagtccaggatgcactggagagcttggtggcaagagaatctgtccaaggttataccacaaaaaccaaacaagaggttgagataagtcgaagagtgactctggaaaaactccctcctgtcctcgtgctgcacctgaaacgattcgtttatgagaagactggtgggtgccagaagcttatcaaaaatattgaatatcctgtggacttggaaattagtaaagaactgctttctccaggggttaaaaataagaattttaaatgccaccgaacctatcggctctttgcagtggtctaccatcacggcaacagtgcgacgggcggccattacactacagacgtcttccagatcggtctgaatggctggctgcgcatcgatgaccagacagtcaaggtgatcaaccagtaccaggtggtgaaaccaactgctgaacgcacagcctacctcctgtattaccgccgagtggacctgctgtaaaccctgtgtgcgctgtgtgtgcgcccagtgcccgcttcgtaggacaccacctcacactcacttcccgcctctctttagtggctctttagagagaaactctttctccctttgcaaaaatgggctagaatgaaaaggagatgccttggggttcgtgcacaacacagcttctgttgactctaacttccaaatcaaaatcatttggttgaaacagactgttgcttgattttagaaaatacacaaaaacccatatttctgaaataatgctgattcctgagataagaaagtggatttgatccccagtctcattgcttagtagaataaatcctgcaccagcaacaacacttgtaaatttgtgaaaatgaattttatctttccttaaaaaagaaattttttaatccatcacacttttcttccctaccctttagtttttgataaatgataaaaatgagccagttatcaaagaagaactagttcttacttcaaaaaaaaaaaaaaaaaa

SEQ ID NO: 1560 - protein, 798 aa, Homo sapiens
MALHSPQYIFGDFSPDEFNQFFVTPRSSVELPPYSGTVLCGTQAVDKLPDGQEYQRIEFGVDEVIEPSDTLPRTPSYSISSTLNPQAPEFILGCTASKITPDGITKEASYGSIDCQYPGSALALDGSSNVEAEVLENDGVSGGLGQRERKKKKKRPPGYYSYLKDGGDDSISTEALVNGHANSAVPNSVSAEDAEFMGDMPPPLTPRTCNSPQNSTDSVSDIVPDSPFPGALGSDTRTAGQPEGGPGADFGQSCFPAEAGRDTLSRTAGAQPCVGTDTTENLGVANGQILESSGEGTATNGVELHTTESIDLDPTKPESASPPADGTGSASGTLPVSQPKSWASLFHDSKPSSSSPVAYVETKYSPPAISPLVSEKQVEVKEGLVPVSEDPVAIKIAELLENVTLIHKPVSLQPRGLINKGNWCYINATLQALVACPPMYHLMKFIPLYSKVQRPCTSTPMIDSFVRLMNEFTNMPVPPKPRQALGDKIVRDIRPGAAFEPTYIYRLLTVNKSSLSEKGRQEDAEEYLGFILNGLHEEMLNLKKLLSPSNEKLTISNGPKNHSVNEEEQEEQGEGSEDEWEQVGPRNKTSVTRQADFVQTPITGIFGGHIRSVVYQQSSKESATLQPFFTLQLDIQSDKIRTVQDALESLVARESVQGYTTKTKQEVEISRRVTLEKLPPVLVLHLKRFVYEKTGGCQKLIKNIEYPVDLEISKELLSPGVKNKNFKCHRTYRLFAVVYHHGNSATGGHYTTDVFQIGLNGWLRIDDQTVKVINQYQVVKPTAERTAYLLYYRRVDLL

SEQ ID NO: 1561 - DNA, 2081 bp, Homo sapiens
tcgggaagccatagggcgcctcccagcccgtctccccgctccagtttagaacctaattcccaattcccggaccgggcccagccctgggctcttactgtccgcttttgctgggacctgttccacaaatgggcgtcttctgccttgggccgtgggggttgggccggaagctgcggacgcctgggaaggggccgctgcagctcttgagccgcctctgcggggaccacttgcaggccatcccagccaagaaggccccggctgggcaggaggagcctgggacgccgccctcctcgccgctgagtgccgagcagttggaccggatccagaggaacaaggccgcggccctgctcagactcgcggcccgcaacgtgcccgtgggctttggagagagctggaagaagcacctcagcggggagttcgggaaaccgtattttatcaagctaatgggatttgttgcagaagaaagaaagcattacactgtttatccacccccacaccaagtcttcacctggacccagatgtgtgacataaaagatgtgaaggttgtcatcctgggacaggatccatatcatggacctaatcaagctcacgggctctgctttagtgttcaaaggcctgttccgcctccgcccagtttggagaacatttataaagagttgtctacagacatagaggattttgttcatcctggccatggagatttatctgggtgggccaagcaaggtgttctccttctcaacgctgtcctcacggttcgtgcccatcaagccaactctcataaggagcgaggctgggagcagttcactgatgcagttgtgtcctggctaaatcagaactcgaatggccttgttttcttgctctggggctcttatgctcagaagaagggcagtgccattgataggaagcggcaccatgtactacagacggctcatccctcccctttgtcagtgtatagagggttctttggatgtagacacttttcaaagaccaatgagctgctgcagaagtctggcaagaagcccattgactggaaggagctgtgatcatcagctgaggggtggcctttgagaagctgctgttaacgtatttgccagttacgaagttccactgaaaattttcctattaattcttaagtactctgcataagggggaaaagcttccagaaagcagccatgaaccaggctgtccaggaatggcagctgtatccaaccacaaacaacaaaggctaccctttgaccaaatgtctttctctgcaacatggcttcggcctaaaatatgcagaagacagatgaggtcaaatactcagttggctctctttatctcccttgcctttatggtgaaacaggggagatgtgcacctttcaggcacagccctagtttggcgcctgctgctccttggttttgcctggttagactttcagtgacagatgttggggtgtttttgcttagaaaggtccccttgtctcagccttgcagggcaggcatgccagtctctgccagttccactgcccccttgatctttgaaggagtcctcaggcccctcgcagcataaggatgttttgcaactttccagaatctggcccagaaattagggctcaatttcctgattgtagtagaggttaagattgctgtgagctttatcagataagagaccgagagaagtaagctgggtcttgttattccttgggtgttggtggaataagcagtggaatttgaacaaggaagaggagaaaagggaattttgtctttatggggtggggtgattttctcctagggttatgtccagttggggtttttaaggcagcacagactgccaagtactgttttttttaaccgactgaaatcactttgggatattttttcctgcaacactggaaagttttagttttttaagaagtactcatgcagatatatatatatatatttttcccagtcctttttttaagagacggtctttattgggtctgcacctccatccttgatcttgttagcaatgctgtttttgctgttagtcgggttagagttggctctacgcgaggtttgttaataaaagtttgttaaaagtttaaaaaaaaaaaaaaaaa

SEQ ID NO: 1562 - protein, 304 aa, Homo sapiens
MGVFCLGPWGLGRKLRTPGKGPLQLLSRLCGDHLQAIPAKKAPAGQEEPGTPPSSPLSAEQLDRIQRNKAAALLRLAARNVPVGFGESWKKHLSGEFGKPYFIKLMGFVAEERKHYTVYPPPHQVFTWTQMCDIKDVKVVILGQDPYHGPNQAHGLCFSVQRPVPPPPSLENIYKELSTDIEDFVHPGHGDLSGWAKQGVLLLNAVLTVRAHQANSHKERGWEQFTDAVVSWLNQNSNGLVFLLWGSYAQKKGSAIDRKRHHVLQTAHPSPLSVYRGFFGCRHFSKTNELLQKSGKKPIDWKEL

SEQ ID NO: 1563 - DNA, 2053 bp, Homo sapiens
cacagccacagccagggctagcctcgccggttcccgggtggcgcgcgttcgctgcctcctcagctccaggatgatcggccagaagacgctctactcctttttctcccccagccccgccaggaagcgacacgcccccagccccgagccggccgtccaggggaccggcgtggctggggtgcctgaggaaagcggagatgcggcggccatcccagccaagaaggccccggctgggcaggaggagcctgggacgccgccctcctcgccgctgagtgccgagcagttggaccggatccagaggaacaaggccgcggccctgctcagactcgcggcccgcaacgtgcccgtgggctttggagagagctggaagaagcacctcagcggggagttcgggaaaccgtattttatcaagctaatgggatttgttgcagaagaaagaaagcattacactgtttatccacccccacaccaagtcttcacctggacccagatgtgtgacataaaagatgtgaaggttgtcatcctgggacaggatccatatcatggacctaatcaagctcacgggctctgctttagtgttcaaaggcctgttccgcctccgcccagtttggagaacatttataaagagttgtctacagacatagaggattttgttcatcctggccatggagatttatctgggtgggccaagcaaggtgttctccttctcaacgctgtcctcacggttcgtgcccatcaagccaactctcataaggagcgaggctgggagcagttcactgatgcagttgtgtcctggctaaatcagaactcgaatggccttgttttcttgctctggggctcttatgctcagaagaagggcagtgccattgataggaagcggcaccatgtactacagacggctcatccctcccctttgtcagtgtatagagggttctttggatgtagacacttttcaaagaccaatgagctgctgcagaagtctggcaagaagcccattgactggaaggagctgtgatcatcagctgaggggtggcctttgagaagctgctgttaacgtatttgccagttacgaagttccactgaaaattttcctattaattcttaagtactctgcataagggggaaaagcttccagaaagcagccatgaaccaggctgtccaggaatggcagctgtatccaaccacaaacaacaaaggctaccctttgaccaaatgtctttctctgcaacatggcttcggcctaaaatatgcagaagacagatgaggtcaaatactcagttggctctctttatctcccttgcctttatggtgaaacaggggagatgtgcacctttcaggcacagccctagtttggcgcctgctgctccttggttttgcctggttagactttcagtgacagatgttggggtgtttttgcttagaaaggtccccttgtctcagccttgcagggcaggcatgccagtctctgccagttccactgcccccttgatctttgaaggagtcctcaggcccctcgcagcataaggatgttttgcaactttccagaatctggcccagaaattagggctcaatttcctgattgtagtagaggttaagattgctgtgagctttatcagataagagaccgagagaagtaagctgggtcttgttattccttgggtgttggtggaataagcagtggaatttgaacaaggaagaggagaaaagggaattttgtctttatggggtggggtgattttctcctagggttatgtccagttggggtttttaaggcagcacagactgccaagtactgttttttttaaccgactgaaatcactttgggatattttttcctgcaacactggaaagttttagttttttaagaagtactcatgcagatatatatatatatatttttcccagtcctttttttaagagacggtctttattgggtctgcacctccatccttgatcttgttagcaatgctgtttttgctgttagtcgggttagagttggctctacgcgaggtttgttaataaaagtttgttaaaagtttaaaaaaaaaaaaaaaaa

SEQ ID NO: 1564 - protein, 313 aa, Homo sapiens
MIGQKTLYSFFSPSPARKRHAPSPEPAVQGTGVAGVPEESGDAAAIPAKKAPAGQEEPGTPPSSPLSAEQLDRIQRNKAAALLRLAARNVPVGFGESWKKHLSGEFGKPYFIKLMGFVAEERKHYTVYPPPHQVFTWTQMCDIKDVKVVILGQDPYHGPNQAHGLCFSVQRPVPPPPSLENIYKELSTDIEDFVHPGHGDLSGWAKQGVLLLNAVLTVRAHQANSHKERGWEQFTDAVVSWLNQNSNGLVFLLWGSYAQKKGSAIDRKRHHVLQTAHPSPLSVYRGFFGCRHFSKTNELLQKSGKKPIDWKEL

SEQ ID NO: 1565 - DNA, 6948 bp, Homo sapiens
ggggctgaaagacacacagaagtcttcatggatatagttgatacatttaatcatttaattcctactgaacacttagatgatgccctatttctaggatccaacctggagaatgaagtctgtgaggattttagtgcaagtcaaaatgtcttagaggactcgctgaagaacatgctcagcgataaggatcctatgctaggatctgcaagtaaccagttctgtttgcctgttttggatagcaatgatcccaatttccagatgccttgttcaacagttgttggtcttgacgatattatggatgaaggagttgttaaagaaagtggcaatgataccattgatgaagaagaactgattttacctaacaggaacttaagggacaaggtagaagaaaattcagtgagatctccaagaaaatcacctcgtttaatggcacaagaacaagtaagaagtttgcgacagagcactattgccaagcgttcaaatgcagcaccattaagtaacacaaaaaaagcatctgggaagactgtatctactgctaaagcaggagtgaaacaaccagaaaggagtcaggttaaagaagaagtatgtatgtcactgaaacctgagtaccataaggagaatagaaggtgcagccgaaatagcggacaaattgaagtggtacctgaagtatcagtgtcttcaagtcattcttcagtgtcatcttgtcttgaaatgaaggatgaagatggattagattctaagcataagtgtaataatccgggagaaatagatgtgccatctcatgaattaaattgttcacttctttcagagacttgtgttactattggagaaaagaaaaatgaagctttgatggaatgtaaagccaagcctgttggtagtccattgtttaagttttcagataaagaagaacatgaacaaaatgattccatttcaggtaaaacgggtgagactgttgttgaagaaatgatagcaacaagaaaagttgaacaagattcaaaggagacagtaaaattatcccatgaagatgaccatattcttgaggacgctggatcttctgatatttctagtgatgctgcttgtacaaatccaaataagacagaaaacagccttgtaggtttgcctagttgtgtagatgaagtgactgaatgtaatttggaattgaaggataccatgggtattgctgataaaactgagaacacccttgaaagaaataaaattgaaccgttgggttattgtgaagatgcggagtctaataggcagttggagagcactgagtttaataaatcaaacttagaggtggttgatactagtacttttggaccggaaagtaatatcttggaaaatgctatttgtgatgtgcctgaccaaaattcaaaacagttgaatgctatagaaagtactaaaatagagtcccatgaaacagcaaaccttcaggatgacagaaacagccagtcaagtagcgtttcttacttagagtcaaaaagtgtaaaatccaaacatacaaaacctgtaattcattctaagcaaaacatgaccacagatgctccgaagaaaattgttgcagcaaagtatgaagtaatacatagcaaaactaaagttaatgtcaaaagtgtgaaacgaaatactgatgtaccagaatctcagcaaaattttcataggccagtcaaagtcagaaaaaaacaaattgataaggagccaaagattcagagttgcaattctggggttaaatctgtgaaaaaccaagctcattctgtactgaaaaaaacattacaggatcaaactttagtacaaattttcaagcccttaactcattctttgagtgataagtcacacgctcatcctggttgcttgaaagaacctcatcatcctgcacaaactggacatgtatcacattctagccagaaacagtgtcataagcctcagcaacaggccccagcaatgaaaaccaatagtcacgtgaaggaagagcttgaacacccaggcgttgagcattttaaggaagaggataaactgaaactgaaaaaacctgagaagaacctacaaccccgccaaagaagaagcagcaaaagtttttctttagatgagccaccattgttcattccagataacatagctaccataagaagagaaggctctgatcatagctcctcatttgaaagcaaatatatgtggactcccagcaagcagtgtgggttttgcaaaaaaccacatggcaacaggtttatggttggctgtgggagatgtgatgactggtttcatggtgattgtgttgggttaagtctttctcaagcacagcagatgggcgaggaagacaaagaatatgtctgtgtaaaatgttgtgctgaagaagacaaaaagactgaaatactagatccagatactttggaaaaccaagctacagttgaattccatagtggagataaaacaatggagtgtgaaaagcttggattatcaaaacacacaacaaatgatagaaccaaatatatagatgatacagtgaagcacaaggtcaaaattttaaaacgggagtctggtgaaggcagaaattcatcagactgtagagataatgaaattaaaaaatggcagctagctcctcttcgtaagatgggacaaccagttttacctcggagatcctcagaagaaaaaagtgaaaaaataccgaaagagtctacaactgttacttgcacaggagaaaaagcttcaaaaccaggtactcatgagaagcaagagatgaaaaagaagaaagttgaaaaaggagtgcttaatgtacatcctgctgcttctgcttccaagccttctgcagatcagatcaggcaaagtgtcagacattctctcaaagacattcttatgaagagacttacagactcaaatttgaaggtaccagaggaaaaggcagcaaaagttgccacaaaaattgagaaagagcttttctctttttttcgggacacagatgctaaatataagaacaaatatagaagtttgatgtttaatttgaaagatcctaaaaacaatatattatttaaaaaagtactgaaaggagaagtaactcctgatcatcttatcagaatgagtccagaagaactagcttctaaagagttagctgcttggagacgaagagaaaacagacataccatagaaatgattgagaaagagcagagagaagtggaacgacggccaatcaccaaaataactcataaaggtgaaatagaaattgagagtgatgccccaatgaaagaacaggaagcagccatggagattcaggaaccagccgccaataagtcattggagaagccagaaggatctgaaaaacaaaaagaggaggttgactctatgtctaaagataccactagtcaacacagacagcatctttttgatctcaactgcaaaatctgcataggtcgaatggcaccacctgtagatgatctttctccaaaaaaagtaaaagttgttgtaggagtagctcgcaaacattcagacaatgaagcagaaagtatagcagatgcattatcttcaacctcaaatattttggcttctgaattctttgaggaggagaaacaggagtctccaaagtcaacgttctctcctgctccacgtccagagatgcctggaactgttgaagttgagtctacctttctggctcgattgaacttcatctggaaaggttttatcaacatgccttctgtggcaaaatttgttaccaaagcctatccagtatctggctccccagaatacctgacagaggacctaccagatagtattcaagtaggtggcaggatatcacctcagacagtttgggattatgtggaaaaaataaaagcatcaggaaccaaggaaatttgtgtggttcgcttcacaccagtaactgaagaagatcaaatttcttatactttgctctttgcatacttcagtagcagaaagcgctatggagtagctgctaacaacatgaagcaggttaaagatatgtaccttattcctttgggtgccacagataaaattccacaccctcttgtgccttttgatggacctgggcttgaactgcatagacctaatctattgttgggcttaattattcgtcagaaactgaagcgacagcacagtgcctgtgctagtactagtcatatagctgagactcctgaaagtgcaccaccaatagcattgccacctgataaaaaaagtaaaatagaagtttctacagaagaagcaccagaggaagaaaatgacttttttaattcttttacaactgtattacacaagcagagaaataaacctcagcagaatcttcaggaagaccttccaacagcagttgaacctttaatggaagtcaccaaacaggagccaccaaaacctttaagatttcttcctggcgtgttgattggctgggagaatcaacctactactctggaattagcaaataaacctcttcctgtggatgatatacttcaaagccttttgggcaccactggtcaagtatatgaccaggcccagtcagtgatggaacaaaacactgttaaagaaattccatttttaaatgagcagaccaactcaaaaatagagaaaacagataatgtggaagtaactgatggtgaaaacaaggagataaaagttaaagtagataatatttcagaatctacagataagtcagcagaaatagaaacatcagtagtagggtcctcttccatttctgcagggtctttgacgagtcttagtctcagaggtaagccaccagatgtttctacagaagcatttttaacaaatttatcaattcagtcaaaacaagaggaaactgtggagagtaaagagaaaacattaaaaagacagcttcaggaagatcaagagaataatttgcaagataaccagacttcaaatagttctccatgcagatctaatgtaggaaaaggaaacatagatggtaatgtgagctgtagtgaaaaccttgttgctaatacagcgaggtctccacagtttatcaacctgaaaagggatcctaggcaagcagcaggacgaagtcagcctgtaactacttcagaaagcaaagatggagatagttgccggaatggagaaaaacacatgctgcctggcctgtcacacaacaaggagcacttaacagaacaaatcaatgtagaggaaaagttgtgttctgcagagaaaaactcgtgtgttcagcagagtgacaatttaaaagttgcacaaaactcaccatcagtagaaaacatacagacttctcaagcagaacaagcaaaacccttacaggaggatattttaatgcaaaatattgaaactgtgcacccatttcgaagaggatcagcagtagcgacatctcattttgaagttggaaacacatgtccatcagaatttccttctaaaagcatcacctttacttccagaagcaccagccccagaacaagtacaaacttttcacccatgaggccacagcagcccaaccttcagcatctcaagtctagcccacctggatttccatttccagggcctcctaattttcccccacaaagcatgtttggatttccaccacatttgccacctccattacttccccctccaggctttggctttgctcaaaatcccatggttccctggccacctgttgttcatctcccaggtcagccacagcgtatgatgggtcctctctcacaagcatcaaggtatataggcccgcagaatttttaccaggttaaagacattcggaggccagaaaggcgccatagtgacccttggggtaggcaagaccaacagcaactggataggccatttaataggggtaaaggggaccgccagagattttatagtgattcacaccatttgaaaagagagcgacatgaaaaggaatgggagcaagaatctgaaaggcatagacgcagagacagaagccaagacaaggacagagacagaaaaagcagggaggaagggcacaaagataaagagagggcacggttatcacatggtgatcgaggaacagatggaaaagcaagcagagatagtaggaatgtagacaagaagccagataaacctaaaagtgaagactatgagaaggacaaagaacgagagaaaagtaaacacagagaaggagaaaaggacagggataggtaccacaaagatagggaccacactgacagaactaaaagcaaaaggtaaaatttgcaggctgcttcaggattacatttaaataactgttaaaatgttgtatcttgtaaacaaaagaaagattgcctgctaggattgtgccatctttaaaatttttactattggtcatttgcagaacagtaaattctgtgtgttggtacagagtgctctgtaccagtgctcatcatcccttcttcataccaacggtccctagttataggaatttaatatttttaaaagttttacattgctgtatattcaaagatttgttttattaatatgcaataaaggcttagaaattttagttttattccttaattggtaaatatggttaactatggaatatatttacttcctctagtgaatgtcctttatataatgactaatttgggagtaatgtgtgctctgtaagtttgttttaaattgcactgtttttaaagaaactgtagaggagcaacaaaaatccaagcaacttcataatcagattatgctaatcatttagttgagcagtttttgaccaagaatcagaagcccaaggggtacatttattgctttaatctgcactcattgaagtcatttattaccatatactacagctttgtggtaggccattattttcattttcatttttggctcttcagaaacttgaatacttaagcttgtacatgatcttgtgttttgctatcctttttactgtaaaatgtaaatattttaagggatattttgattctaaatatgataaaataatttctcacctattttgtgtgtgtgacttgaaattcagtagtaaaagaatttcttctttaaagcttt

SEQ ID NO: 1566 - protein, 2039 aa, Homo sapiens
MDIVDTFNHLIPTEHLDDALFLGSNLENEVCEDFSASQNVLEDSLKNMLSDKDPMLGSASNQFCLPVLDSNDPNFQMPCSTVVGLDDIMDEGVVKESGNDTIDEEELILPNRNLRDKVEENSVRSPRKSPRLMAQEQVRSLRQSTIAKRSNAAPLSNTKKASGKTVSTAKAGVKQPERSQVKEEVCMSLKPEYHKENRRCSRNSGQIEVVPEVSVSSSHSSVSSCLEMKDEDGLDSKHKCNNPGEIDVPSHELNCSLLSETCVTIGEKKNEALMECKAKPVGSPLFKFSDKEEHEQNDSISGKTGETVVEEMIATRKVEQDSKETVKLSHEDDHILEDAGSSDISSDAACTNPNKTENSLVGLPSCVDEVTECNLELKDTMGIADKTENTLERNKIEPLGYCEDAESNRQLESTEFNKSNLEVVDTSTFGPESNILENAICDVPDQNSKQLNAIESTKIESHETANLQDDRNSQSSSVSYLESKSVKSKHTKPVIHSKQNMTTDAPKKIVAAKYEVIHSKTKVNVKSVKRNTDVPESQQNFHRPVKVRKKQIDKEPKIQSCNSGVKSVKNQAHSVLKKTLQDQTLVQIFKPLTHSLSDKSHAHPGCLKEPHHPAQTGHVSHSSQKQCHKPQQQAPAMKTNSHVKEELEHPGVEHFKEEDKLKLKKPEKNLQPRQRRSSKSFSLDEPPLFIPDNIATIRREGSDHSSSFESKYMWTPSKQCGFCKKPHGNRFMVGCGRCDDWFHGDCVGLSLSQAQQMGEEDKEYVCVKCCAEEDKKTEILDPDTLENQATVEFHSGDKTMECEKLGLSKHTTNDRTKYIDDTVKHKVKILKRESGEGRNSSDCRDNEIKKWQLAPLRKMGQPVLPRRSSEEKSEKIPKESTTVTCTGEKASKPGTHEKQEMKKKKVEKGVLNVHPAASASKPSADQIRQSVRHSLKDILMKRLTDSNLKVPEEKAAKVATKIEKELFSFFRDTDAKYKNKYRSLMFNLKDPKNNILFKKVLKGEVTPDHLIRMSPEELASKELAAWRRRENRHTIEMIEKEQREVERRPITKITHKGEIEIESDAPMKEQEAAMEIQEPAANKSLEKPEGSEKQKEEVDSMSKDTTSQHRQHLFDLNCKICIGRMAPPVDDLSPKKVKVVVGVARKHSDNEAESIADALSSTSNILASEFFEEEKQESPKSTFSPAPRPEMPGTVEVESTFLARLNFIWKGFINMPSVAKFVTKAYPVSGSPEYLTEDLPDSIQVGGRISPQTVWDYVEKIKASGTKEICVVRFTPVTEEDQISYTLLFAYFSSRKRYGVAANNMKQVKDMYLIPLGATDKIPHPLVPFDGPGLELHRPNLLLGLIIRQKLKRQHSACASTSHIAETPESAPPIALPPDKKSKIEVSTEEAPEEENDFFNSFTTVLHKQRNKPQQNLQEDLPTAVEPLMEVTKQEPPKPLRFLPGVLIGWENQPTTLELANKPLPVDDILQSLLGTTGQVYDQAQSVMEQNTVKEIPFLNEQTNSKIEKTDNVEVTDGENKEIKVKVDNISESTDKSAEIETSVVGSSSISAGSLTSLSLRGKPPDVSTEAFLTNLSIQSKQEETVESKEKTLKRQLQEDQENNLQDNQTSNSSPCRSNVGKGNIDGNVSCSENLVANTARSPQFINLKRDPRQAAGRSQPVTTSESKDGDSCRNGEKHMLPGLSHNKEHLTEQINVEEKLCSAEKNSCVQQSDNLKVAQNSPSVENIQTSQAEQAKPLQEDILMQNIETVHPFRRGSAVATSHFEVGNTCPSEFPSKSITFTSRSTSPRTSTNFSPMRPQQPNLQHLKSSPPGFPFPGPPNFPPQSMFGFPPHLPPPLLPPPGFGFAQNPMVPWPPVVHLPGQPQRMMGPLSQASRYIGPQNFYQVKDIRRPERRHSDPWGRQDQQQLDRPFNRGKGDRQRFYSDSHHLKRERHEKEWEQESERHRRRDRSQDKDRDRKSREEGHKDKERARLSHGDRGTDGKASRDSRNVDKKPDKPKSEDYEKDKEREKSKHREGEKDRDRYHKDRDHTDRTKSKR

SEQ ID NO: 1567 - DNA, 3799 bp, Homo sapiens
ctgtgttccacccgcctgggctagcacgtgggggagctgcggaagcgcggcgctgcgggccgggccgcggggcacagccgggggccggcggcggcgcgcggactccgcatcccgcaccccgatggtagccgaggagctggtgtaattacttcaagcctccaggatggcaatccagttccgttcgctcttccccttggcattgcctgggatgctggcgctcctcggctggtggtggtttttctctcgtaaaaaaggccatgtcagcagccatgatgagcagcaggtggaggctggtgctgtgcagctgagggctgaccctgccatcaaggaacctctccccgtggaagacgtctgtcccaaagtagtgtccacaccccccagtgtcacagagcctccagaaaaggaactgtccaccgtgagcaagctgcctgcagagcccccagcattgctccagacacacccaccttgccgaagatcagagtcctcgggcattcttcctaacaccacagacatgagattgcgaccaggaacacgcagagatgacagtacaaagctggagctagccctgacaggtggtgaagccaaatcgattcctctagagtgccccctttcatccccaaagggtgtactattctccagcaaatcagctgaggtgtgtaagcaagattcccccttcagcagggtgccaaggaaggtccagccaggctaccccgtagtccccgcagagaagcgtagctctggggagagggcaagagagacaggtggggccgaagggactggtgatgccgtgttgggggaaaaggtgcttgaagaagctctgttgtctcgggagcatgtcttggaattggagaacagcaagggccccagcctggcctctttagagggggaagaagataaggggaagagcagctcatcccaggtggtggggccagtgcaggaggaagagtatgtagcagagaagttgccaagtaggttcatcgagtcggctcacacagagctggcaaaggacgatgcggcgccagcacccccagtcgcagacgccaaagcccaggatagaggtgtcgagggagaactgggcaatgaggagagcttggatagaaatgaggagggcttggatagaaatgaggagggcttggatagaaatgaggagagcttggatagaaatgaggagggcttggatagaaatgaggagattaagcgggctgccttccagataatctcccaagtgatctcagaagcaaccgaacaggtgctggccaccacggttggcaaggttgcaggtcgtgtgtgtcaggccagtcagctccaagggcagaaggaagagagctgtgtcccagttcaccagaaaactgtcttgggcccagacactgcggagcctgccacagcagaggcagctgttgccccgccggatgctggcctccccttgccaggcctaccagcagagggctcaccaccaccaaagacctacgtgagctgcctgaagagccttctgtccagccccaccaaggacagtaagccaaatatctctgcacaccacatctccctggcctcctgcctggcactgaccacccccagtgaagagttgccggaccgggcaggcatcctggtggaagatgccacctgtgtcacctgcatgtcagacagcagccaaagtgtccctttggtggcttctccaggacactgctcagattctttcagcacttcagggcttgaagactcttgcacagagaccagctcgagccccagggacaaggccatcaccccgccactgccagaaagtactgtgcccttcagcaatggggtgctgaagggggagttgtcagacttgggggctgaggatggatggaccatggatgcggaagcagatcattcaggaggttctgacaggaacagcatggattccgtggatagctgttgcagtctcaagaagactgagagcttccaaaatgcccaggcaggctccaaccctaagaaggtcgacctcatcatctgggagatcgaggtgccaaagcacttagtcggtcggctaattggcaagcaggggcgctatgtgagttttctgaagcaaacatctggtgccaagatctacatttcaaccctgccttacacccagagcgtccagatctgccacatagaaggctctcaacatcatgtagacaaagcgctgaacttgattgggaagaagttcaaagagctgaacctcaccaatatctacgctcccccattgccttcactggcactgccttctctgccgatgacatcctggctcatgctgcctgatggcatcaccgtggaggtcattgtggtcaaccaggtcaatgccgggcacctgttcgtgcagcagcacacacaccctaccttccacgcgctgcgcagcctcgaccagcagatgtacctctgttactctcagcctggaatccccaccttgcccaccccagtggaaataacggtcatctgtgccgcccctggtgcggacggggcctggtggcgagcccaagtggttgcctcctacgaggagaccaacgaagtggagattcgatacgtggactacggcggatataagagggtgaaagtagacgtgctccggcaaatcaggtctgactttgtcaccctgccgtttcagggagcagaagtccttctggacagtgtgatgcccctgtcagacgatgaccagttttcaccggaagcagatgccgccatgagcgagatgacggggaatacagcactgcttgctcaggtgacaagttacagtccaactggtcttcctctgattcagctgtggagtgtggttggagatgaagtggtgttgataaaccggtccctggtggagcgaggccttgcccagtgggtagacagctactacacaagcctttgacccccatgctgcttcctgagagtctttttttgcactgttgaaattgggcttggcactcaagtcaaagatgaacatcggaataacaaacattgtcctctccagaaagtcctttctttatccatactgtagtcctattgagaagacatttcgtctctgagaaaaaaggatggaactatgggttctcttcgcaaagccaaaggatagtgtttaacaagccagctggcttatcctggttctcagctgtttaaaaaaaaaaaaaaaaaggaatagaaacagtttcaaccagattgtcctattccccctgttccattcccctcttcttccttctatctccttccccggcaaaaaccaaacaaactggcagacaggccagggatgtatgttgcttgcttgagagggtttcttttacttcaaaatctttcttcagggagcaagacatgaactgactaattggtatccactacttgtacagcttacataaatgagttgatgatatttaaccagtttttataaacttcatttaggtctctaaacacagactttttaaattgcaactgtaaatatgaaatggtcatcacatctgaccttggtcagtggggaggggaactggtatcctgccaagcctggttgtaatttgtaaccattttctatttgtgcaaactctgtaaatatgtgtttaaacaaatgtaatattttgtacaagatacactggagaacaaagggaactcaagattcttccagccacatgtcacctgtaggtagaagtaaactctgcagtgcagcttctgctcttggcccctctggccagggcccctgtggcttcctgcacactggacaggtgactgtatggtagagactgtgatctgggaactttttgctgtacaaatctgtttaaaaaaaaaaaaaagtaactcattgaattaa

SEQ ID NO: 1568 - protein, 903 aa, Homo sapiens
MAIQFRSLFPLALPGMLALLGWWWFFSRKKGHVSSHDEQQVEAGAVQLRADPAIKEPLPVEDVCPKVVSTPPSVTEPPEKELSTVSKLPAEPPALLQTHPPCRRSESSGILPNTTDMRLRPGTRRDDSTKLELALTGGEAKSIPLECPLSSPKGVLFSSKSAEVCKQDSPFSRVPRKVQPGYPVVPAEKRSSGERARETGGAEGTGDAVLGEKVLEEALLSREHVLELENSKGPSLASLEGEEDKGKSSSSQVVGPVQEEEYVAEKLPSRFIESAHTELAKDDAAPAPPVADAKAQDRGVEGELGNEESLDRNEEGLDRNEEGLDRNEESLDRNEEGLDRNEEIKRAAFQIISQVISEATEQVLATTVGKVAGRVCQASQLQGQKEESCVPVHQKTVLGPDTAEPATAEAAVAPPDAGLPLPGLPAEGSPPPKTYVSCLKSLLSSPTKDSKPNISAHHISLASCLALTTPSEELPDRAGILVEDATCVTCMSDSSQSVPLVASPGHCSDSFSTSGLEDSCTETSSSPRDKAITPPLPESTVPFSNGVLKGELSDLGAEDGWTMDAEADHSGGSDRNSMDSVDSCCSLKKTESFQNAQAGSNPKKVDLIIWEIEVPKHLVGRLIGKQGRYVSFLKQTSGAKIYISTLPYTQSVQICHIEGSQHHVDKALNLIGKKFKELNLTNIYAPPLPSLALPSLPMTSWLMLPDGITVEVIVVNQVNAGHLFVQQHTHPTFHALRSLDQQMYLCYSQPGIPTLPTPVEITVICAAPGADGAWWRAQVVASYEETNEVEIRYVDYGGYKRVKVDVLRQIRSDFVTLPFQGAEVLLDSVMPLSDDDQFSPEADAAMSEMTGNTALLAQVTSYSPTGLPLIQLWSVVGDEVVLINRSLVERGLAQWVDSYYTSL

SEQ ID NO: 1569 - DNA, 3801 bp, Homo sapiens
cccacccttggtggcagaaccgagcactacccagcaaggtgtaattacttcaagcctccaggatggcaatccagttccgttcgctcttccccttggcattgcctgggatgctggcgctcctcggctggtggtggtttttctctcgtaaaaaaggccatgtcagcagccatgatgagcagcaggtggaggctggtgctgtgcagctgagggctgaccctgccatcaaggaacctctccccgtggaagacgtctgtcccaaagtagtgtccacaccccccagtgtcacagagcctccagaaaaggaactgtccaccgtgagcaagctgcctgcagagcccccagcattgctccagacacacccaccttgccgaagatcagagtcctcgggcattcttcctaacaccacagacatgagattgcgaccaggaacacgcagagatgacagtacaaagctggagctagccctgacaggtggtgaagccaaatcgattcctctagagtgccccctttcatccccaaagggtgtactattctccagcaaatcagctgaggtgtgtaagcaagattcccccttcagcagggtgccaaggaaggtccagccaggctaccccgtagtccccgcagagaagcgtagctctggggagagggcaagagagacaggtggggccgaagggactggtgatgccgtgttgggggaaaaggtgcttgaagaagctctgttgtctcgggagcatgtcttggaattggagaacagcaagggccccagcctggcctctttagagggggaagaagataaggggaagagcagctcatcccaggtggtggggccagtgcaggaggaagagtatgtagcagagaagttgccaagtaggttcatcgagtcggctcacacagagctggcaaaggacgatgcggcgccagcacccccagtcgcagacgccaaagcccaggatagaggtgtcgagggagaactgggcaatgaggagagcttggatagaaatgaggagggcttggatagaaatgaggagggcttggatagaaatgaggagagcttggatagaaatgaggagggcttggatagaaatgaggagattaagcgggctgccttccagataatctcccaagtgatctcagaagcaaccgaacaggtgctggccaccacggttggcaaggttgcaggtcgtgtgtgtcaggccagtcagctccaagggcagaaggaagagagctgtgtcccagttcaccagaaaactgtcttgggcccagacactgcggagcctgccacagcagaggcagctgttgccccgccggatgctggcctccccttgccaggcctaccagcagagggctcaccaccaccaaagacctacgtgagctgcctgaagagccttctgtccagccccaccaaggacagtaagccaaatatctctgcacaccacatctccctggcctcctgcctggcactgaccacccccagtgaagagttgccggaccgggcaggcatcctggtggaagatgccacctgtgtcacctgcatgtcagacagcagccaaagtgtccctttggtggcttctccaggacactgctcagattctttcagcacttcagggcttgaagactcttgcacagagaccagctcgagccccagggacaaggccatcaccccgccactgccagaaagtactgtgcccttcagcaatggggtgctgaagggggagttgtcagacttgggggctgaggatggatggaccatggatgcggaagcagatcattcaggagttgcagctccacccccgggaaagcggggcactttgataacgaggtgtcctgggtttttcgagtgctgaccccagcgtagacagttcagaccgctaacttacaggttctgacaggaacagcatggattccgtggatagctgttgcagtctcaagaagactgagagcttccaaaatgcccaggcaggctccaaccctaagaaggtcgacctcatcatctgggagatcgaggtgccaaagcacttagtcggtcggctaattggcaagcaggggcgctatgtgagttttctgaagcaaacatctggtgccaagatctacatttcaaccctgccttacacccagagcgtccagatctgccacatagaaggctctcaacatcatgtagacaaagcgctgaacttgattgggaagaagttcaaagagctgaacctcaccaatatctacgctcccccattgccttcactggcactgccttctctgccgatgacatcctggctcatgctgcctgatggcatcaccgtggaggtcattgtggtcaaccaggtcaatgccgggcacctgttcgtgcagcagcacacacaccctaccttccacgcgctgcgcagcctcgaccagcagatgtacctctgttactctcagcctggaatccccaccttgcccaccccagtggaaataacggtcatctgtgccgcccctggtgcggacggggcctggtggcgagcccaagtggttgcctcctacgaggagaccaacgaagtggagattcgatacgtggactacggcggatataagagggtgaaagtagacgtgctccggcaaatcaggtctgactttgtcaccctgccgtttcagggagcagaagtccttctggacagtgtgatgcccctgtcagacgatgaccagttttcaccggaagcagatgccgccatgagcgagatgacggggaatacagcactgcttgctcaggtgacaagttacagtccaactggtcttcctctgattcagctgtggagtgtggttggagatgaagtggtgttgataaaccggtccctggtggagcgaggccttgcccagtgggtagacagctactacacaagcctttgacccccatgctgcttcctgagagtctttttttgcactgttgaaattgggcttggcactcaagtcaaagatgaacatcggaataacaaacattgtcctctccagaaagtcctttctttatccatactgtagtcctattgagaagacatttcgtctctgagaaaaaaggatggaactatgggttctcttcgcaaagccaaaggatagtgtttaacaagccagctggcttatcctggttctcagctgtttaaaaaaaaaaaaaaaaaggaatagaaacagtttcaaccagattgtcctattccccctgttccattcccctcttcttccttctatctccttccccggcaaaaaccaaacaaactggcagacaggccagggatgtatgttgcttgcttgagagggtttcttttacttcaaaatctttcttcagggagcaagacatgaactgactaattggtatccactacttgtacagcttacataaatgagttgatgatatttaaccagtttttataaacttcatttaggtctctaaacacagactttttaaattgcaactgtaaatatgaaatggtcatcacatctgaccttggtcagtggggaggggaactggtatcctgccaagcctggttgtaatttgtaaccattttctatttgtgcaaactctgtaaatatgtgtttaaacaaatgtaatattttgtacaagatacactggagaacaaagggaactcaagattcttccagccacatgtcacctgtaggtagaagtaaactctgcagtgcagcttctgctcttggcccctctggccagggcccctgtggcttcctgcacactggacaggtgactgtatggtagagactgtgatctgggaactttttgctgtacaaatctgtttaaaaaaaaaaaaaagtaactcattgaattaa

SEQ ID NO: 1570 - protein, 593 aa, Homo sapiens
MAIQFRSLFPLALPGMLALLGWWWFFSRKKGHVSSHDEQQVEAGAVQLRADPAIKEPLPVEDVCPKVVSTPPSVTEPPEKELSTVSKLPAEPPALLQTHPPCRRSESSGILPNTTDMRLRPGTRRDDSTKLELALTGGEAKSIPLECPLSSPKGVLFSSKSAEVCKQDSPFSRVPRKVQPGYPVVPAEKRSSGERARETGGAEGTGDAVLGEKVLEEALLSREHVLELENSKGPSLASLEGEEDKGKSSSSQVVGPVQEEEYVAEKLPSRFIESAHTELAKDDAAPAPPVADAKAQDRGVEGELGNEESLDRNEEGLDRNEEGLDRNEESLDRNEEGLDRNEEIKRAAFQIISQVISEATEQVLATTVGKVAGRVCQASQLQGQKEESCVPVHQKTVLGPDTAEPATAEAAVAPPDAGLPLPGLPAEGSPPPKTYVSCLKSLLSSPTKDSKPNISAHHISLASCLALTTPSEELPDRAGILVEDATCVTCMSDSSQSVPLVASPGHCSDSFSTSGLEDSCTETSSSPRDKAITPPLPESTVPFSNGVLKGELSDLGAEDGWTMDAEADHSGVAAPPPGKRGTLITRCPGFFEC

SEQ ID NO: 1571 - DNA, 1526 bp, Homo sapiens
gcatctgcgcaggcgcccggctcctaagtctacccaggaactgaccctgctctctcctttccctgttagacatgggcactccacagaaggatgttattatcaagtcagatgcaccggacactttgttattggagaaacatgcagattatatcgcatcctatggctcaaagaaagatgattatgaatactgtatgtctgagtatttgagaatgagtggcatctattggggtctgacagtaatggatctcatgggacaacttcatcgcatgaatagagaagagattctggcatttattaagtcttgccaacatgaatgtggtggaataagtgctagtatcggacatgatcctcatcttttatacactcttagtgctgtccagattcttacgctgtatgacagtattaatgttattgacgtaaataaagttgtggaatatgttaaaggtctacagaaagaagatggttcttttgctggagatatttggggagaaattgacacaagattctctttttgtgcggtggcaactttggctttgttggggaagcttgatgctattaatgtggaaaaggcaatcgaatttgttttatcctgtatgaactttgacggtggatttggttgcagaccaggttctgaatcccatgctgggcagatctattgttgcacaggatttctggctattacaagtcagttgcatcaagtaaattctgatttacttggctggtggctttgtgaacgacaattaccctcaggcgggctcaatggaaggccggagaagttaccagatgtatgctactcatggtgggtcctggcttccctaaagataattggaagacttcattggattgatagagagaaactgcgtaatttcattttagcatgtcaagatgaagaaacggggggatttgcagacaggccaggagatatggtggatccttttcataccttatttggaattgctggattgtcacttttgggagaagaacagattaaacctgttaatcctgtcttttgcatgcctgaagaagtgcttcagagagtgaatgttcagcctgagctagtgagctagattcattgaattgaaagttgcatagtatagttttgccattttaacatttctgtatttgaagtgcttatcgaatctaaaagtgactactgttaatattttgtatattgtgttaaattaattttaataaattatataattatacatattgtaaaataaagaccggtattttattttctgctttttattctgaagtcctgttattctgactacagttctttgtgtatacttctgtgtctgttatgttcaataactgagctaacataaaataactctaggtttctacttgatttttcccccatgtatacctttcatctgttctatagcaagttgatgtaaattggtttgtcaacaagaatgttaactgatgaaagtggatagaacccatacatgaattaaatgatgcacaaaataaatggctgttgaaatttgaaaaaaaaaaaaaaaaaaaaaaaaaaaaaa

SEQ ID NO: 1572 - protein, 331 aa, Homo sapiens
MGTPQKDVIIKSDAPDTLLLEKHADYIASYGSKKDDYEYCMSEYLRMSGIYWGLTVMDLMGQLHRMNREEILAFIKSCQHECGGISASIGHDPHLLYTLSAVQILTLYDSINVIDVNKVVEYVKGLQKEDGSFAGDIWGEIDTRFSFCAVATLALLGKLDAINVEKAIEFVLSCMNSDGGFGCRPGSESHAGQIYCCTGFLAITSQLHQVTSDLLGWWLCERQLPSGGLNGRPEKLPDVCYSWWVLASLKIIGRLHWIDREKLRNFILACQDEETGGFADRPGDMVDPFHTLFGIAGLSLLGEEQIKPVNPVFCMPEEVLQRVNVQPELVS

SEQ ID NO: 1573 - DNA, 2590 bp, Homo sapiens
cttccagtttcccggcgtgcttagggcgcgccaaatgggagggggagacgcaagatggcggcagccgcgaactccggctctagcctcccgctgttcgactgcccaacctggtgagtggcggggcggccagggctagagtggcccggccggagctagcctgggctggaagggcggctctttttttacttttctgctgcgagccgaacggctcagaaaccccggaatggttgaggaaaaactgtttgctgcaccgggccgggcgacgtgttgaagaaccgagagcctggagcccaggcccaggaactgaagaaacccggggttgggggctcaaaggcgctcacttaggcagcccctttgagcgattagccagtcgccggagcgcttcgaggccttggcccgaacttacgcccaactcttgactgagtgcctggtgctctcgtggagcatcgcatctggccccttcctgtacgtcccgagcgcgctcgagccagccccggccccaaccctacctccaagccccgcatccctctgtggttgctgcatccctcgtgcggcacttgtctgtctgccacagagaatacgaggggcaggtaagccccctcccggtttacatctggatgtagtcaaaggagacaaactaattgagaaactgattattgatgagaagaagtattacttatttgggagaaaccctgatttgtgtgactttaccattgaccaccagtcttgctctcgggtccatgctgcacttgtctaccacaagcatctgaagagagttttcctgatagatctcaacagtaaacctgacagagttcaacactgcccacaacaagcggatttctacccttaccattgaggagggaaatctggacattcaaagaccaaagaggaagaggaagaactcacgggtgacattcagtgaggatgatgagatcatcaacccagaggatgtggatccctcagttggtcgattcaggaacatggtgcaaactgcagtggtcccagtcaagaagaagcgtgtggagggccctggctccctgggcctggaggaatcagggagcaggcgcatgcagaactttgccttcagcggaggactctacgggggcctgccccccacacacagtgaagcaggctcccagccacatggcatccatgggacagcactcatcggtggcttgcccatgccatacccaaaccttgcccctgatgtggacttgactcctgttgtgccgtcagcagtgaacatgaaccctgcaccaaaccctgcagtctataaccctgaagctgtaaatgaacccaagaagaagaaatatgcaaaagaggcttggccaggcaagaagcccacaccttccttgctgatttgatatttttggtcatggagaagggtgggattgggtgggaatggggtggaagggtgatggggagctaatgaactagggagaaaaactttccatgtgtgcggtatcgtctttcagaatgtctcctggcatcctaaccatgtaatatgacaattgggggtggggttgaaatagcccataaagacctgtcttcacaacacttgcattgtagagaaaggcttcttatatccttttcaatagactgccctggctctttcctaggccttccactacctcctttctttctcccactttctaggatcatttttatgtaaagtcacatatcccaggccctcaggttgaatccagagctgtagaggttacagtagcatcaccagccttgggggtccagagcctaatttatattcactatccttccaagtcccgggtagcagaagggttgccatagatctcagtttgatcaaaaagaaggcttagaattctgcagttaagctgaggtttaaactaaaaaatgtttccttgggtcagtggttttgaggtccagtagctaggcttttctcttttgtccttcctgttggaatgaaaacatttcgattttccttcatctgtgactggtgccatagacacaggtttatagttttaacttacagtattgtttgaaatttacctgtttttcttgtcaaacctgagcactcctcctgctgaagtttcttatttaattccagagtactgtcctctactctaaggcattacttttaagtgtattatgaaggcagttttcaaaggatatgaccagttggggtaattcaaattaaaaaggaaaagatttgtttggaagtaactggtgtctctaagaggaatttttagatgtcagtttggaggctctttcccccctcaattgagagctcttgttattcagagctccaagactagacctggctaacaaacataggagacaaagttaggaaacattgatacaagctttgtacagagatttgtacatttgtgtaataggccttttcatgctttatgtgtagctttttacctgtaacctttattacattgtaaattaaacgtaacttttgtcatttgggtgcaggctgtgaatttgtctctcagtcactgattgccactgccatctggaaatgtttgctaaaggcacagtcactgggcttgggaggcaatgctccatccccattatattacaaataaagatgccctaaatgagtgtg

SEQ ID NO: 1574 - protein, 127 aa, Homo sapiens
MVQTAVVPVKKKRVEGPGSLGLEESGSRRMQNFAFSGGLYGGLPPTHSEAGSQPHGIHGTALIGGLPMPYPNLAPDVDLTPVVPSAVNMNPAPNPAVYNPEAVNEPKKKKYAKEAWPGKKPTPSLLI

SEQ ID NO: 1575 - DNA, 2336 bp, Homo sapiens
cttccagtttcccggcgtgcttagggcgcgccaaatgggagggggagacgcaagatggcggcagccgcgaactccggctctagcctcccgctgttcgactgcccaacctgggcaggtaagccccctcccggtttacatctggatgtagtcaaaggagacaaactaattgagaaactgattattgatgagaagaagtattacttatttgggagaaaccctgatttgtgtgactttaccattgaccaccagtcttgctctcgggtccatgctgcacttgtctaccacaagcatctgaagagagttttcctgatagatctcaacagtacacacggcactttcttgggtcacattcggttggaacctcacaagcctcagcaaattcccatcgattccacggtctcatttggcgcatccacaagggcatacactctgcgcgagaagcctcagacattgccatcggctgtgaaaggagatgagaagatgggtggagaggatgatgaactcaagggcttactggggcttccagaggaggaaactgagcttgataacctgacagagttcaacactgcccacaacaagcggatttctacccttaccattgaggagggaaatctggacattcaaagaccaaagaggaagaggaagaactcacgggtgacattcagtgaggatgatgagatcatcaacccagaggatgtggatccctcagttggtcgattcaggaacatggtgcaaactgcagtggtcccagtcaagaagaagcgtgtggagggccctggctccctgggcctggaggaatcagggagcaggcgcatgcagaactttgccttcagcggaggactctacgggggcctgccccccacacacagtgaagcaggctcccagccacatggcatccatgggacagcactcatcggtggcttgcccatgccatacccaaaccttgcccctgatgtggacttgactcctgttgtgccgtcagcagtgaacatgaaccctgcaccaaaccctgcagtctataaccctgaagctgtaaatgaacccaagaagaagaaatatgcaaaagaggcttggccaggcaagaagcccacaccttccttgctgatttgatatttttggtcatggagaagggtgggattgggtgggaatggggtggaagggtgatggggagctaatgaactagggagaaaaactttccatgtgtgcggtatcgtctttcagaatgtctcctggcatcctaaccatgtaatatgacaattgggggtggggttgaaatagcccataaagacctgtcttcacaacacttgcattgtagagaaaggcttcttatatccttttcaatagactgccctggctctttcctaggccttccactacctcctttctttctcccactttctaggatcatttttatgtaaagtcacatatcccaggccctcaggttgaatccagagctgtagaggttacagtagcatcaccagccttgggggtccagagcctaatttatattcactatccttccaagtcccgggtagcagaagggttgccatagatctcagtttgatcaaaaagaaggcttagaattctgcagttaagctgaggtttaaactaaaaaatgtttccttgggtcagtggttttgaggtccagtagctaggcttttctcttttgtccttcctgttggaatgaaaacatttcgattttccttcatctgtgactggtgccatagacacaggtttatagttttaacttacagtattgtttgaaatttacctgtttttcttgtcaaacctgagcactcctcctgctgaagtttcttatttaattccagagtactgtcctctactctaaggcattacttttaagtgtattatgaaggcagttttcaaaggatatgaccagttggggtaattcaaattaaaaaggaaaagatttgtttggaagtaactggtgtctctaagaggaatttttagatgtcagtttggaggctctttcccccctcaattgagagctcttgttattcagagctccaagactagacctggctaacaaacataggagacaaagttaggaaacattgatacaagctttgtacagagatttgtacatttgtgtaataggccttttcatgctttatgtgtagctttttacctgtaacctttattacattgtaaattaaacgtaacttttgtcatttgggtgcaggctgtgaatttgtctctcagtcactgattgccactgccatctggaaatgtttgctaaaggcacagtcactgggcttgggaggcaatgctccatccccattatattacaaataaagatgccctaaatgagtgtg

SEQ ID NO: 1576 - protein, 351 aa, Homo sapiens
MAAAANSGSSLPLFDCPTWAGKPPPGLHLDVVKGDKLIEKLIIDEKKYYLFGRNPDLCDFTIDHQSCSRVHAALVYHKHLKRVFLIDLNSTHGTFLGHIRLEPHKPQQIPIDSTVSFGASTRAYTLREKPQTLPSAVKGDEKMGGEDDELKGLLGLPEEETELDNLTEFNTAHNKRISTLTIEEGNLDIQRPKRKRKNSRVTFSEDDEIINPEDVDPSVGRFRNMVQTAVVPVKKKRVEGPGSLGLEESGSRRMQNFAFSGGLYGGLPPTHSEAGSQPHGIHGTALIGGLPMPYPNLAPDVDLTPVVPSAVNMNPAPNPAVYNPEAVNEPKKKKYAKEAWPGKKPTPSLLI

SEQ ID NO: 1577 - DNA, 2691 bp, Homo sapiens
cttccagtttcccggcgtgcttagggcgcgccaaatgggagggggagacgcaagatggcggcagccgcgaactccggctctagcctcccgctgttcgactgcccaacctggtgagtggcggggcggccagggctagagtggcccggccggagctagcctgggctggaagggcggctctttttttacttttctgctgcgagccgaacggctcagaaaccccggaatggttgaggaaaaactgtttgctgcaccgggccgggcgacgtgttgaagaaccgagagcctggagcccaggcccaggaactgaagaaacccggggttgggggctcaaaggcgctcacttaggcagcccctttgagcgattagccagtcgccggagcgcttcgaggccttggcccgaacttacgcccaactcttgactgagtgcctggtgctctcgtggagcatcgcatctggccccttcctggcaggtaagccccctcccggtttacatctggatgtagtcaaaggagacaaactaattgagaaactgattattgatgagaagaagtattacttatttgggagaaaccctgatttgtgtgactttaccattgaccaccagtcttgctctcgggtccatgctgcacttgtctaccacaagcatctgaagagagttttcctgatagatctcaacagtacacacggcactttcttgggtcacattcggttggaacctcacaagcctcagcaaattcccatcgattccacggtctcatttggcgcatccacaagggcatacactctgcgcgagaagcctcagacattgccatcggctgtgaaaggagatgagaagatgggtggagaggatgatgaactcaagggcttactggggcttccagaggaggaaactgagcttgataacctgacagagttcaacactgcccacaacaagcggatttctacccttaccattgaggagggaaatctggacattcaaagaccaaagaggaagaggaagaactcacgggtgacattcagtgaggatgatgagatcatcaacccagaggatgtggatccctcagttggtcgattcaggaacatggtgcaaactgcagtggtcccagtcaagaagaagcgtgtggagggccctggctccctgggcctggaggaatcagggagcaggcgcatgcagaactttgccttcagcggaggactctacgggggcctgccccccacacacagtgaagcaggctcccagccacatggcatccatgggacagcactcatcggtggcttgcccatgccatacccaaaccttgcccctgatgtggacttgactcctgttgtgccgtcagcagtgaacatgaaccctgcaccaaaccctgcagtctataaccctgaagctgtaaatgaacccaagaagaagaaatatgcaaaagaggcttggccaggcaagaagcccacaccttccttgctgatttgatatttttggtcatggagaagggtgggattgggtgggaatggggtggaagggtgatggggagctaatgaactagggagaaaaactttccatgtgtgcggtatcgtctttcagaatgtctcctggcatcctaaccatgtaatatgacaattgggggtggggttgaaatagcccataaagacctgtcttcacaacacttgcattgtagagaaaggcttcttatatccttttcaatagactgccctggctctttcctaggccttccactacctcctttctttctcccactttctaggatcatttttatgtaaagtcacatatcccaggccctcaggttgaatccagagctgtagaggttacagtagcatcaccagccttgggggtccagagcctaatttatattcactatccttccaagtcccgggtagcagaagggttgccatagatctcagtttgatcaaaaagaaggcttagaattctgcagttaagctgaggtttaaactaaaaaatgtttccttgggtcagtggttttgaggtccagtagctaggcttttctcttttgtccttcctgttggaatgaaaacatttcgattttccttcatctgtgactggtgccatagacacaggtttatagttttaacttacagtattgtttgaaatttacctgtttttcttgtcaaacctgagcactcctcctgctgaagtttcttatttaattccagagtactgtcctctactctaaggcattacttttaagtgtattatgaaggcagttttcaaaggatatgaccagttggggtaattcaaattaaaaaggaaaagatttgtttggaagtaactggtgtctctaagaggaatttttagatgtcagtttggaggctctttcccccctcaattgagagctcttgttattcagagctccaagactagacctggctaacaaacataggagacaaagttaggaaacattgatacaagctttgtacagagatttgtacatttgtgtaataggccttttcatgctttatgtgtagctttttacctgtaacctttattacattgtaaattaaacgtaacttttgtcatttgggtgcaggctgtgaatttgtctctcagtcactgattgccactgccatctggaaatgtttgctaaaggcacagtcactgggcttgggaggcaatgctccatccccattatattacaaataaagatgccctaaatgagtgtg

SEQ ID NO: 1578 - protein, 209 aa, Homo sapiens
MGGEDDELKGLLGLPEEETELDNLTEFNTAHNKRISTLTIEEGNLDIQRPKRKRKNSRVTFSEDDEIINPEDVDPSVGRFRNMVQTAVVPVKKKRVEGPGSLGLEESGSRRMQNFAFSGGLYGGLPPTHSEAGSQPHGIHGTALIGGLPMPYPNLAPDVDLTPVVPSAVNMNPAPNPAVYNPEAVNEPKKKKYAKEAWPGKKPTPSLLI

SEQ ID NO: 1579 - DNA, 2044 bp, Homo sapiens
ccggtcggatgccggaccgggggcaccgctgaggcggtgggtccccgacctgcgagacaggtttggaagcccccgctgcgcccagtccgtgcggaccgcgaggccgcgggcgggtggaggcgcgtctccggcacgatgaaggatttgggggcagagcacttggcaggtcatgaaggggtccaacttctcgggttgttgaacgtctacctggaacaagaagagagattccaacctcgagaaaaagggctgagtttgattgaggctaccccggagaatgataacactttgtgtccaggattgagaaatgccaaagttgaagatttaaggagtttagccaacttttttggatcttgcactgaaacttttgtcctggctgtcaatattttggacaggttcttggctcttatgaaggtgaaacctaaacatttgtcttgcattggagtctgttcttttttgctggctgctagaatagttgaagaagactgcaatattccatccactcatgatgtgatccggattagtcagtgtaaatgtactgcttctgacataaaacggatggaaaaaataatttcagaaaaattgcactatgaattggaagctactactgccttaaactttttgcacttataccatactattatactttgtcatacttcagaaaggaaagaaatactgagccttgataaactagaagctcagctgaaagcttgcaactgccgactcatcttttcaaaagcaaaaccatctgtattagccttgtgccttctcaatttggaagtggaaactttgaaatctgttgaattactggaaattctcttgctagttaaaaaacattccaagattaatgacactgagttcttctactggagagagttggtttctaaatgcctagccgagtattcttctcctgaatgttgcaaaccagatcttaagaagttggtttggatcgtttcaaggcgcacagcccagaacctccacaacagctactatagtgttcctgagctgccaacgatacctgaggggggttgttttgatgaaagtgaaagtgaggactcttgtgaagatatgagttgtggagaggagagtctcagcagctctcctcccagtgatcaagagtgcaccttctttttcaacttcaaagtggcacaaacactgtgctttccatcttagaaatctgattgttctgtcagaatttatatttacagggtttcaaagcaataaatgggggaataggtagtttcctggtttagcccccatctagtcaggaattaatatactggaatacctaccttctatttgttattcagatcagatctggcctattttcatatttatcctaagccatcaaatggggtagtgcctcttaaaccattaacagtactttagacattggcactttatttttctcgtagatctttagctactttggggaggagggaaggtgctgataccttcaatttgttacttttcaagatttttaaaaataactagtgtagcttatcttaaacattttataaaaccttcagatgtctttaagcagattggaagtatgcaagtgcttccttagcagggacagtggataatccttaatggtttatcatagatttcaccctccccccttctcagaagagtgagtatgctcttaaatgtcaaacacatttttgttgttttgttttttaaatgatcagtgtctatttgatgtgatgcagatcttataaatttgggaattataatattgacatttctgtgatttttatatatgtaatgtcttaattgagatttgtgttaaggcagaaataattaggctagggctcttagttttcattcctattgccccaagtattgtcaaactatggtattattttaatgttactttaaaaatccataatctgctagttttgcatgtacttatatgaaaacagtgcagtaagttgaaaactcagtatctatggaattgataaatgttgatctggtgtagtatattttatccgcattttcttatattaaaaaatgttctgcatgattacattttatttgcctttgt

SEQ ID NO: 1580 - protein, 344 aa, Homo sapiens
MKDLGAEHLAGHEGVQLLGLLNVYLEQEERFQPREKGLSLIEATPENDNTLCPGLRNAKVEDLRSLANFFGSCTETFVLAVNILDRFLALMKVKPKHLSCIGVCSFLLAARIVEEDCNIPSTHDVIRISQCKCTASDIKRMEKIISEKLHYELEATTALNFLHLYHTIILCHTSERKEILSLDKLEAQLKACNCRLIFSKAKPSVLALCLLNLEVETLKSVELLEILLLVKKHSKINDTEFFYWRELVSKCLAEYSSPECCKPDLKKLVWIVSRRTAQNLHNSYYSVPELPTIPEGGCFDESESEDSCEDMSCGEESLSSSPPSDQECTFFFNFKVAQTLCFPS

SEQ ID NO: 1581 - DNA, 2344 bp, Homo sapiens
agcggagtctcgtccggagactggcagcggcggcggcggcggcggccggagctcgagccccagcggctgagggcgggcgggcgggcgcgggggagggaggggggccggtccgcgacgactccccggacggcgtttctcctccgagcggcgccggtttcggcttggggggggcggggtacagcccatccatgaccatgggcgacaagaagagcccgaccaggccaaaaagacaagcgaaacctgccacagacgaagggttttgggattgtagcgtctgcaccttcagaaacagtgctgaagcctttaaatgcagcatctgcgatgtgaggaaaggcacctccaccagaaaacctcggatcaattctcagctggtggcacaacaagtggcacaacagtatgccaccccaccaccccctaaaaaggagaagaaggagaaagttgaaaagcaggacaaagagaaacctgagaaagacaaggaaattagtcctagtgttaccaagaaaaataccaacaagaaaaccaaaccaaagtctgacattctgaaagatcctcctagtgaagcaaacagcatacagtctgcaaatgctacaacaaagaccagcgaaacaaatcacacctcaaggccccggctgaaaaacgtggacaggagcactgcacagcagttggcagtaactgtgggcaacgtcaccgtcattatcacagactttaaggaaaagactcgctcctcatcgacatcctcatccacagtgacctccagtgcagggtcagaacagcagaaccagagcagctcggggtcagagagcacagacaagggctcctcccgttcctccacgccaaagggcgacatgtcagcagtcaatgatgaatctttctgaaattgcacatggaattgtgaaaactatgaatcagggtatgaaattcaaaacctccacctgcccatgctgcttgcatccctggagaatcttctgtggacatcgacctcttagtgatgctgccaggataatttctgcttgccatgggcatctggccaccaaggaatttcgcaccctgacgattactcttgacacttttatgtattccattgttttatatgattttcctaacaatcatttataattggatgtgctcctgaatctactttttataaaaaaaaaaaaaaaatctgctgtgcacaattttccatgtacattacaactggttttttgtttttgttttgttgccggtggggagggctgggagggggagggaacttttatttattgtgttcacaaactccatcctttcagcatatccttttaagtttagttctttcttccagttatactatgtactatcagttttgatataactatatatatataaatataaaattatatataaagggttatttgaaaccaatccatggcaacgctggtgcttgatacactgtgaagtgaatacaacattgaacagttacagatctgggacagtcccttctatgaaagtgctgaaatttaattaaaatcagtcttacatgaagtatgttccaatccatgtgggaacttgactctctcatctgtctaaagagtactggacgatataaaaatatatattttttaaacaatgtgatctcaaatttaaagactgctccagatagcctgcatttgcaatggaataactgacaaatcacaagtggtttagttgggcagggctttgatcattcaaaagtaactaaagtagctccagaatgccaagtattcgtgtaaattacggttacatgttatcatttgctgttcttacataagcactcatgaaaatatggtattctgtaacttgaattccatccattttccagacgtctactcatgtctgaggtaaatctagaaattgtcttagttttaggattgaaacagtctataaactgtatttttggtccatccaggaagctagtcccttgtttctcctttctacatgacattgcagtggtggtttctgtaattaaaatttgtttgcctcatgtccctttgtctgataaaccttcactctaccgattcagttgtgagcattctttttttccttctcaaaacctactatgatttgttttactgaacaaaggttatcaaccacacatccagtcctgacatggagcttttcagtgtttggagacatttctcaatcccctgctgtggtaggaactccagtggtgaacggcttgcgcgcctgcagccagagttgcagggaaagctcgtacttactgcgagcagcatgtaatcttttttcttcctggacataaagatagcttgagtaaactgttctatttcattctcttcactctttttactgtcttgcaaaaaaaaaaaaaaaa

SEQ ID NO: 1582 - protein, 228 aa, Homo sapiens
MTMGDKKSPTRPKRQAKPAADEGFWDCSVCTFRNSAEAFKCSICDVRKGTSTRKPRINSQLVAQQVAQQYATPPPPKKEKKEKVEKQDKEKPEKDKEISPSVTKKNTNKKTKPKSDILKDPPSEANSIQSANATTKTSETNHTSRPRLKNVDRSTAQQLAVTVGNVTVIITDFKEKTRSSSTSSSTVTSSAGSEQQNQSSSGSESTDKGSSRSSTPKGDMSAVNDESF

SEQ ID NO: 1583 - DNA, 3757 bp, Homo sapiens
ggaaccgcgaccactggagccttagcgggcgcagcagctggaacgggagtactgcgacgcagcccggagtcggccttgtaggggcgaaggtgcagggagatcgcggcgggcgcagtcttgagcgccggagcgcgtccctgcccttagcggggcttgccccagtcgcaggggcacatccagccgctgcggctgacagcagccgcgcgcgcgggagtctgcggggtcgcggcagccgcacctgcgcgggcgaccagcgcaaggtccccgcccggctgggcgggcagcaagggccggggagagggtgcgggtgcaggcgggggccccacagggccaccttcttgcccggcggctgccgctggaaaatgtctcaggagaggcccacgttctaccggcaggagctgaacaagacaatctgggaggtgcccgagcgttaccagaacctgtctccagtgggctctggcgcctatggctctgtgtgtgctgcttttgacacaaaaacggggttacgtgtggcagtgaagaagctctccagaccatttcagtccatcattcatgcgaaaagaacctacagagaactgcggttacttaaacatatgaaacatgaaaatgtgattggtctgttggacgtttttacacctgcaaggtctctggaggaattcaatgatgtgtatctggtgacccatctcatgggggcagatctgaacaacattgtgaaatgtcagaagcttacagatgaccatgttcagttccttatctaccaaattctccgaggtctaaagtatatacattcagctgacataattcacagggacctaaaacctagtaatctagctgtgaatgaagactgtgagctgaagattctggattttggactggctcggcacacagatgatgaaatgacaggctacgtggccactaggtggtacagggctcctgagatcatgctgaactggatgcattacaaccagacagttgatatttggtcagtgggatgcataatggccgagctgttgactggaagaacattgtttcctggtacagaccatattaaccagcttcagcagattatgcgtctgacaggaacaccccccgcttatctcattaacaggatgccaagccatgaggcaagaaactatattcagtctttgactcagatgccgaagatgaactttgcgaatgtatttattggtgccaatcccctggctgtcgacttgctggagaagatgcttgtattggactcagataagagaattacagcggcccaagcccttgcacatgcctactttgctcagtaccacgatcctgatgatgaaccagtggccgatccttatgatcagtcctttgaaagcagggacctccttatagatgagtggaaaagcctgacctatgatgaagtcatcagctttgtgccaccaccccttgaccaagaagagatggagtcctgagcacctggtttctgttctgttgatcccacttcactgtgaggggaaggccttttcacgggaactctccaaatattattcaagtgcctcttgttgcagagatttcctccatggtggaagggggtgtgcgtgcgtgtgcgtgcgtgttagtgtgtgtgcatgtgtgtgtctgtctttgtgggagggtaagacaatatgaacaaactatgatcacagtgactttacaggaggttgtggatgctccagggcagcctccaccttgctcttctttctgagagttggctcaggcagacaagagctgctgtccttttaggaatatgttcaatgcaaagtaaaaaaatatgaattgtccccaatcccggtcatgcttttgccactttggcttctcctgtgaccccaccttgacggtggggcgtagacttgacaacatcccacagtggcacggagagaaggcccataccttctggttgcttcagacctgacaccgtccctcagtgatacgtacagccaaaaaggaccaactggcttctgtgcactagcctgtgattaacttgcttagtatggttctcagatcttgacagtatatttgaaactgtaaatatgtttgtgccttaaaaggagagaagaaagtgtagatagttaaaagactgcagctgctgaagttctgagccgggcaagtcgagagggctgttggacagctgcttgtgggcccggagtaatcaggcagccttcataggcggtcatgtgtgcatgtgagcacatgcgtatatgtgcgtctctctttctccctcacccccaggtgttgccatttctctgcttacccttcacctttggtgcagaggtttcttgaatatctgccccagtagtcagaagcaggttcttgatgtcatgtacttcctgtgtactctttatttctagcagagtgaggatgtgttttgcacgtcttgctatttgagcatgcacagctgcttgtcctgctctcttcaggaggccctggtgtcaggcaggtttgccagtgaagacttcttgggtagtttagatcccatgtcacctcagctgatattatggcaagtgatatcacctctcttcagcccctagtgctattctgtgttgaacacaattgatacttcaggtgcttttgatgtgaaaatcatgaaaagaggaacaggtggatgtatagcatttttattcatgccatctgttttcaaccaactatttttgaggaattatcatgggaaaagaccagggcttttcccaggaatatcccaaacttcggaaacaagttattctcttcactcccaataactaatgctaagaaatgctgaaaatcaaagtaaaaaattaaagcccataaggccagaaactccttttgctgtctttctctaaatatgattactttaaaataaaaaagtaacaaggtgtcttttccactcctatggaaaagggtcttcttggcagcttaacattgacttcttggtttggggagaaataaattttgtttcagaattttgtatattgtaggaatccctttgagaatgtgattccttttgatggggagaaagggcaaattattttaatattttgtattttcaactttataaagataaaatatcctcaggggtggagaagtgtcgttttcataacttgctgaatttcaggcattttgttctacatgaggactcatatatttaagccttttgtgtaataagaaagtataaagtcacttccagtgttggctgtgtgacagaatcttgtatttgggccaaggtgtttccatttctcaatcagtgcagtgatacatgtactccagagggacagggtggaccccctgagtcaactggagcaagaaggaaggaggcagactgatggcgattccctctcacccgggactctccccctttcaaggaaagtgaacctttaaagtaaaggcctcatctcctttattgcagttcaaatcctcaccatccacagcaagatgaattttatcagccatgtttggttgtaaatgctcgtgtgatttcctacagaaatactgctctgaatattttgtaataaaggtctttgcacatgtgaccacatacgtgttaggaggctgcatgctctggaagcctggactctaagctggagctcttggaagagctcttcggtttctgagcataatgctcccatctcctgatttctctgaacagaaaacaaaagagagaatgagggaaattgctattttatttgtattcatgaacttggctgtaatcagttatgccgtataggatgtcagacaataccactggttaaaataaagcctatttttcaaattt

SEQ ID NO: 1584 - protein, 360 aa, Homo sapiens
MSQERPTFYRQELNKTIWEVPERYQNLSPVGSGAYGSVCAAFDTKTGLRVAVKKLSRPFQSIIHAKRTYRELRLLKHMKHENVIGLLDVFTPARSLEEFNDVYLVTHLMGADLNNIVKCQKLTDDHVQFLIYQILRGLKYIHSADIIHRDLKPSNLAVNEDCELKILDFGLARHTDDEMTGYVATRWYRAPEIMLNWMHYNQTVDIWSVGCIMAELLTGRTLFPGTDHINQLQQIMRLTGTPPAYLINRMPSHEARNYIQSLTQMPKMNFANVFIGANPLAVDLLEKMLVLDSDKRITAAQALAHAYFAQYHDPDDEPVADPYDQSFESRDLLIDEWKSLTYDEVISFVPPPLDQEEMES

SEQ ID NO: 1585 - DNA, 3757 bp, Homo sapiens
ggaaccgcgaccactggagccttagcgggcgcagcagctggaacgggagtactgcgacgcagcccggagtcggccttgtaggggcgaaggtgcagggagatcgcggcgggcgcagtcttgagcgccggagcgcgtccctgcccttagcggggcttgccccagtcgcaggggcacatccagccgctgcggctgacagcagccgcgcgcgcgggagtctgcggggtcgcggcagccgcacctgcgcgggcgaccagcgcaaggtccccgcccggctgggcgggcagcaagggccggggagagggtgcgggtgcaggcgggggccccacagggccaccttcttgcccggcggctgccgctggaaaatgtctcaggagaggcccacgttctaccggcaggagctgaacaagacaatctgggaggtgcccgagcgttaccagaacctgtctccagtgggctctggcgcctatggctctgtgtgtgctgcttttgacacaaaaacggggttacgtgtggcagtgaagaagctctccagaccatttcagtccatcattcatgcgaaaagaacctacagagaactgcggttacttaaacatatgaaacatgaaaatgtgattggtctgttggacgtttttacacctgcaaggtctctggaggaattcaatgatgtgtatctggtgacccatctcatgggggcagatctgaacaacattgtgaaatgtcagaagcttacagatgaccatgttcagttccttatctaccaaattctccgaggtctaaagtatatacattcagctgacataattcacagggacctaaaacctagtaatctagctgtgaatgaagactgtgagctgaagattctggattttggactggctcggcacacagatgatgaaatgacaggctacgtggccactaggtggtacagggctcctgagatcatgctgaactggatgcattacaaccagacagttgatatttggtcagtgggatgcataatggccgagctgttgactggaagaacattgtttcctggtacagaccatattgatcagttgaagctcattttaagactcgttggaaccccaggggctgagcttttgaagaaaatctcctcagagtctgcaagaaactatattcagtctttgactcagatgccgaagatgaactttgcgaatgtatttattggtgccaatcccctggctgtcgacttgctggagaagatgcttgtattggactcagataagagaattacagcggcccaagcccttgcacatgcctactttgctcagtaccacgatcctgatgatgaaccagtggccgatccttatgatcagtcctttgaaagcagggacctccttatagatgagtggaaaagcctgacctatgatgaagtcatcagctttgtgccaccaccccttgaccaagaagagatggagtcctgagcacctggtttctgttctgttgatcccacttcactgtgaggggaaggccttttcacgggaactctccaaatattattcaagtgcctcttgttgcagagatttcctccatggtggaagggggtgtgcgtgcgtgtgcgtgcgtgttagtgtgtgtgcatgtgtgtgtctgtctttgtgggagggtaagacaatatgaacaaactatgatcacagtgactttacaggaggttgtggatgctccagggcagcctccaccttgctcttctttctgagagttggctcaggcagacaagagctgctgtccttttaggaatatgttcaatgcaaagtaaaaaaatatgaattgtccccaatcccggtcatgcttttgccactttggcttctcctgtgaccccaccttgacggtggggcgtagacttgacaacatcccacagtggcacggagagaaggcccataccttctggttgcttcagacctgacaccgtccctcagtgatacgtacagccaaaaaggaccaactggcttctgtgcactagcctgtgattaacttgcttagtatggttctcagatcttgacagtatatttgaaactgtaaatatgtttgtgccttaaaaggagagaagaaagtgtagatagttaaaagactgcagctgctgaagttctgagccgggcaagtcgagagggctgttggacagctgcttgtgggcccggagtaatcaggcagccttcataggcggtcatgtgtgcatgtgagcacatgcgtatatgtgcgtctctctttctccctcacccccaggtgttgccatttctctgcttacccttcacctttggtgcagaggtttcttgaatatctgccccagtagtcagaagcaggttcttgatgtcatgtacttcctgtgtactctttatttctagcagagtgaggatgtgttttgcacgtcttgctatttgagcatgcacagctgcttgtcctgctctcttcaggaggccctggtgtcaggcaggtttgccagtgaagacttcttgggtagtttagatcccatgtcacctcagctgatattatggcaagtgatatcacctctcttcagcccctagtgctattctgtgttgaacacaattgatacttcaggtgcttttgatgtgaaaatcatgaaaagaggaacaggtggatgtatagcatttttattcatgccatctgttttcaaccaactatttttgaggaattatcatgggaaaagaccagggcttttcccaggaatatcccaaacttcggaaacaagttattctcttcactcccaataactaatgctaagaaatgctgaaaatcaaagtaaaaaattaaagcccataaggccagaaactccttttgctgtctttctctaaatatgattactttaaaataaaaaagtaacaaggtgtcttttccactcctatggaaaagggtcttcttggcagcttaacattgacttcttggtttggggagaaataaattttgtttcagaattttgtatattgtaggaatccctttgagaatgtgattccttttgatggggagaaagggcaaattattttaatattttgtattttcaactttataaagataaaatatcctcaggggtggagaagtgtcgttttcataacttgctgaatttcaggcattttgttctacatgaggactcatatatttaagccttttgtgtaataagaaagtataaagtcacttccagtgttggctgtgtgacagaatcttgtatttgggccaaggtgtttccatttctcaatcagtgcagtgatacatgtactccagagggacagggtggaccccctgagtcaactggagcaagaaggaaggaggcagactgatggcgattccctctcacccgggactctccccctttcaaggaaagtgaacctttaaagtaaaggcctcatctcctttattgcagttcaaatcctcaccatccacagcaagatgaattttatcagccatgtttggttgtaaatgctcgtgtgatttcctacagaaatactgctctgaatattttgtaataaaggtctttgcacatgtgaccacatacgtgttaggaggctgcatgctctggaagcctggactctaagctggagctcttggaagagctcttcggtttctgagcataatgctcccatctcctgatttctctgaacagaaaacaaaagagagaatgagggaaattgctattttatttgtattcatgaacttggctgtaatcagttatgccgtataggatgtcagacaataccactggttaaaataaagcctatttttcaaattt

SEQ ID NO: 1586 - protein, 360 aa, Homo sapiens
MSQERPTFYRQELNKTIWEVPERYQNLSPVGSGAYGSVCAAFDTKTGLRVAVKKLSRPFQSIIHAKRTYRELRLLKHMKHENVIGLLDVFTPARSLEEFNDVYLVTHLMGADLNNIVKCQKLTDDHVQFLIYQILRGLKYIHSADIIHRDLKPSNLAVNEDCELKILDFGLARHTDDEMTGYVATRWYRAPEIMLNWMHYNQTVDIWSVGCIMAELLTGRTLFPGTDHIDQLKLILRLVGTPGAELLKKISSESARNYIQSLTQMPKMNFANVFIGANPLAVDLLEKMLVLDSDKRITAAQALAHAYFAQYHDPDDEPVADPYDQSFESRDLLIDEWKSLTYDEVISFVPPPLDQEEMES

SEQ ID NO: 1587 - DNA, 1312 bp, Homo sapiens
ggaaccgcgaccactggagccttagcgggcgcagcagctggaacgggagtactgcgacgcagcccggagtcggccttgtaggggcgaaggtgcagggagatcgcggcgggcgcagtcttgagcgccggagcgcgtccctgcccttagcggggcttgccccagtcgcaggggcacatccagccgctgcggctgacagcagccgcgcgcgcgggagtctgcggggtcgcggcagccgcacctgcgcgggcgaccagcgcaaggtccccgcccggctgggcgggcagcaagggccggggagagggtgcgggtgcaggcgggggccccacagggccaccttcttgcccggcggctgccgctggaaaatgtctcaggagaggcccacgttctaccggcaggagctgaacaagacaatctgggaggtgcccgagcgttaccagaacctgtctccagtgggctctggcgcctatggctctgtgtgtgctgcttttgacacaaaaacggggttacgtgtggcagtgaagaagctctccagaccatttcagtccatcattcatgcgaaaagaacctacagagaactgcggttacttaaacatatgaaacatgaaaatgtgattggtctgttggacgtttttacacctgcaaggtctctggaggaattcaatgatgtgtatctggtgacccatctcatgggggcagatctgaacaacattgtgaaatgtcagaagcttacagatgaccatgttcagttccttatctaccaaattctccgaggtctaaagtatatacattcagctgacataattcacagggacctaaaacctagtaatctagctgtgaatgaagactgtgagctgaagattctggattttggactggctcggcacacagatgatgaaatgacaggctacgtggccactaggtggtacagggctcctgagatcatgctgaactggatgcattacaaccagacagttgatatttggtcagtgggatgcataatggccgagctgttgactggaagaacattgtttcctggtacagaccatattgatcagttgaagctcattttaagactcgttggaaccccaggggctgagcttttgaagaaaatctcctcagagtctgcaagaaactatattcagtctttgactcagatgccgaagatgaactttgcgaatgtatttattggtgccaatcccctgggtaagttgaccatatatcctcacctcatggatattgaattggttatgatataaattggggatttgaagaagagtttctccttttgaccaaataaagtaccattagttga

SEQ ID NO: 1588 - protein, 297 aa, Homo sapiens
MSQERPTFYRQELNKTIWEVPERYQNLSPVGSGAYGSVCAAFDTKTGLRVAVKKLSRPFQSIIHAKRTYRELRLLKHMKHENVIGLLDVFTPARSLEEFNDVYLVTHLMGADLNNIVKCQKLTDDHVQFLIYQILRGLKYIHSADIIHRDLKPSNLAVNEDCELKILDFGLARHTDDEMTGYVATRWYRAPEIMLNWMHYNQTVDIWSVGCIMAELLTGRTLFPGTDHIDQLKLILRLVGTPGAELLKKISSESARNYIQSLTQMPKMNFANVFIGANPLGKLTIYPHLMDIELVMI

SEQ ID NO: 1589 - DNA, 3679 bp, Homo sapiens
ggaaccgcgaccactggagccttagcgggcgcagcagctggaacgggagtactgcgacgcagcccggagtcggccttgtaggggcgaaggtgcagggagatcgcggcgggcgcagtcttgagcgccggagcgcgtccctgcccttagcggggcttgccccagtcgcaggggcacatccagccgctgcggctgacagcagccgcgcgcgcgggagtctgcggggtcgcggcagccgcacctgcgcgggcgaccagcgcaaggtccccgcccggctgggcgggcagcaagggccggggagagggtgcgggtgcaggcgggggccccacagggccaccttcttgcccggcggctgccgctggaaaatgtctcaggagaggcccacgttctaccggcaggagctgaacaagacaatctgggaggtgcccgagcgttaccagaacctgtctccagtgggctctggcgcctatggctctgtgtgtgctgcttttgacacaaaaacggggttacgtgtggcagtgaagaagctctccagaccatttcagtccatcattcatgcgaaaagaacctacagagaactgcggttacttaaacatatgaaacatgaaaatgtgattggtctgttggacgtttttacacctgcaaggtctctggaggaattcaatgatgtgtatctggtgacccatctcatgggggcagatctgaacaacattgtgaaatgtcagaagcttacagatgaccatgttcagttccttatctaccaaattctccgaggtctaaagtatatacattcagctgacataattcacagggacctaaaacctagtaatctagctgtgaatgaagactgtgagctgaagattctggattttggactggctcggcacacagatgatgaaatgacaggctacgtggccactaggtggtacagggctcctgagatcatgctgaactggatgcattacaaccagacagttgatatttggtcagtgggatgcataatggccgagctgttgactggaagaacattgtttcctggtacagaccatattgatcagttgaagctcattttaagactcgttggaaccccaggggctgagcttttgaagaaaatctcctcagagtctctgtcgacttgctggagaagatgcttgtattggactcagataagagaattacagcggcccaagcccttgcacatgcctactttgctcagtaccacgatcctgatgatgaaccagtggccgatccttatgatcagtcctttgaaagcagggacctccttatagatgagtggaaaagcctgacctatgatgaagtcatcagctttgtgccaccaccccttgaccaagaagagatggagtcctgagcacctggtttctgttctgttgatcccacttcactgtgaggggaaggccttttcacgggaacctctccaaatattattcaagtgcctcttgttgcagagatttcctccatggtggaagggggtgtgcgtgcgtgtgcgtgcgtgttagtgtgtgtgcatgtgtgtgtctgtctttgtgggagggtaagacaatatgaacaaactatgatcacagtgactttacaggaggttgtggatgctccagggcagcctccaccttgctcttctttctgagagttggctcaggcagacaagagctgctgtccttttaggaatatgttcaatgcaaagtaaaaaaatatgaattgtccccaatcccggtcatgcttttgccactttggcttctcctgtgaccccaccttgacggtggggcgtagacttgacaacatcccacagtggcacggagagaaggcccataccttctggttgcttcagacctgacaccgtccctcagtgatacgtacagccaaaaaggaccaactggcttctgtgcactagcctgtgattaacttgcttagtatggttctcagatcttgacagtatatttgaaactgtaaatatgtttgtgccttaaaaggagagaagaaagtgtagatagttaaaagactgcagctgctgaagttctgagccgggcaagtcgagagggctgttggacagctgcttgtgggcccggagtaatcaggcagccttcataggcggtcatgtgtgcatgtgagcacatgcgtatatgtgcgtctctctttctccctcacccccaggtgttgccatttctctgcttacccttcacctttggtgcagaggtttcttgaatatctgccccagtagtcagaagcaggttcttgatgtcatgtacttcctgtgtactctttatttctagcagagtgaggatgtgttttgcacgtcttgctatttgagcatgcacagctgcttgtcctgctctcttcaggaggccctggtgtcaggcaggtttgccagtgaagacttcttgggtagtttagatcccatgtcacctcagctgatattatggcaagtgatatcacctctcttcagcccctagtgctattctgtgttgaacacaattgatacttcaggtgcttttgatgtgaaaatcatgaaaagaggaacaggtggatgtatagcatttttattcatgccatctgttttcaaccaactatttttgaggaattatcatgggaaaagaccagggcttttcccaggaatatcccaaacttcggaaacaagttattctcttcactcccaataactaatgctaagaaatgctgaaaatcaaagtaaaaaattaaagcccataaggccagaaactccttttgctgtctttctctaaatatgattactttaaaataaaaaagtaacaaggtgtcttttccactcctatggaaaagggtcttcttggcagcttaacattgacttcttggtttggggagaaataaattttgtttcagaattttgtatattgtaggaatccctttgagaatgtgattccttttgatggggagaaagggcaaattattttaatattttgtattttcaactttataaagataaaatatcctcaggggtggagaagtgtcgttttcataacttgctgaatttcaggcattttgttctacatgaggactcatatatttaagccttttgtgtaataagaaagtataaagtcacttccagtgttggctgtgtgacagaatcttgtatttgggccaaggtgtttccatttctcaatcagtgcagtgatacatgtactccagagggacagggtggaccccctgagtcaactggagcaagaaggaaggaggcagactgatggcgattccctctcacccgggactctccccctttcaaggaaagtgaacctttaaagtaaaggcctcatctcctttattgcagttcaaatcctcaccatccacagcaagatgaattttatcagccatgtttggttgtaaatgctcgtgtgatttcctacagaaatactgctctgaatattttgtaataaaggtctttgcacatgtgaccacatacgtgttaggaggctgcatgctctggaagcctggactctaagctggagctcttggaagagctcttcggtttctgagcataatgctcccatctcctgatttctctgaacagaaaacaaaagagagaatgagggaaattgctattttatttgtattcatgaacttggctgtaatcagttatgccgtataggatgtcagacaataccactggttaaaataaagcctatttttcaaattt

SEQ ID NO: 1590 - protein, 307 aa, Homo sapiens
MSQERPTFYRQELNKTIWEVPERYQNLSPVGSGAYGSVCAAFDTKTGLRVAVKKLSRPFQSIIHAKRTYRELRLLKHMKHENVIGLLDVFTPARSLEEFNDVYLVTHLMGADLNNIVKCQKLTDDHVQFLIYQILRGLKYIHSADIIHRDLKPSNLAVNEDCELKILDFGLARHTDDEMTGYVATRWYRAPEIMLNWMHYNQTVDIWSVGCIMAELLTGRTLFPGTDHIDQLKLILRLVGTPGAELLKKISSESLSTCWRRCLYWTQIRELQRPKPLHMPTLLSTTILMMNQWPILMISPLKAGTSL

SEQ ID NO: 1591 - DNA, 4857 bp, Homo sapiens
cagactcacgcagctccagcccatcttgctgacctaattcagaaaagaagtgctacagctctgtgcctgtcatctttgcagtgtagcattttcaggtgatctaggaaacagttatttttatgagcaaataagagaaacaggaatcatgatggggatatatttaacagacccagtactggataaaacttaaagccagtttctattcaacatagtgaaaaggtcaccttgcctggctgagaaaagcagcaaaatatcagctttgttggtttcagttaacctcttagcccgggctaatctcttttccttgatgttcaaaccaatttgggatatctaactctaaagagagacacactgtactcatggtagatgacaaggaaaagaacatgaaatgtctcaccttcttcttgatgcttccagagacggtaaagaacaggtccaagaaaagctcaaagaaagcaaataccagcagcagcagtagcaacagcagcaagttgccaccagtttgttatgaaataattaccttgaagactaaaaagaagaagatggctgctgatatattcccccgtaaaaagccagccaactccagcagcaccagcgtccagcagtaccaccagcagaatctcagtaacaacaaccttatcccggccccaaactggcagggtctttatcccaccattagagagagaaatgcgatgatgttcaataatgatttgatggcagatgtacattttgtggttgggccaccaggtgggactcaacggttgccaggacacaaatatgttttagctgttgggagctctgtgttccatgcgatgttttacggagaacttgcagaggacaaagatgaaatccgtataccagatgtcgaacctgctgcttttctcgctatgctgaaatatatctattgtgatgaaattgacttggctgctgacacagtgctggccacactttatgctgccaaaaagtacattgtccctcaccttgccagagcctgtgttaatttcctggagaccagcctgagtgccaagaatgcctgtgtgctcctctcccagagctgcctgttcgaggagccagacctgacccagcgttgctgggaggtgattgatgcccaggctgagttagctctcaagtctgagggattctgcgatattgacttccagacactagaaagtattctccgtagggaaactctgaatgccaaagaaattgtggtttttgaggcagctctcaactgggctgaagtagaatgccaacgacaagatctggcgttgagcattgaaaataaacgcaaggttctaggaaaggcactttacttgatccgcatacccacaatggccctcgatgattttgcaaatggtgctgcacagtccggggtattaactctcaatgagaccaacgacatcttcctctggtatactgcagccaaaaagcctgagcttcagtttgtgagtaaagcccgtaagggccttgtcccccagcgctgtcaccgtttccagtcgtgtgcctatcgaagcaaccaatggcgctatcgtggtcgctgtgacagcatccagtttgcagttgataaaagagtgttcattgctggctttgggctgtatggctccagctgtggttctgcagaatacagtgccaagattgaacttaagcggcagggcgttgtcctggggcagaacttgagcaagtacttctcagatgggtccagcaatacctttcccgtatggtttgaatacccagtgcagatcgagccagacaccttctacacagccagtgtgatactggatggcaatgaactcagctactttggacaagaaggcatgacagaagttcagtgtggcaaagtgactgtccagtttcagtgctcctcagatagcaccaatggcactggggtacagggagggcagatccctgaacttatattctatgcttgaaaactcacttcctgaagcagcttgagctccaaagtgcacatctggttccaacttgcctgatgcttagctcatctgcaaatatgtgatcagtgccggtaatttgtaatgaatgaagcggtaggcaggttctaatttcttttaaccttttaattatgtacaggcaaaaatgcagcattccgcttttaactatctgcttaaaagagctaacgttcttattaaggctttgtggtttttagagttgcatctatgaacctggggagattatgtgctttcccaagcgttccaccaccctctcagttttgtccctctgaagataattttggatcaccttgaatttccttttggacgttatttgatgaacagaaataaattgataacaagagttatttttaaacagaactcctcttaccccccaaaacagataaacctcagtgtacaattttgaaagaagttttgccttgtaatgagtaataatttagaaagtagacagtggttgtgtttggctctcgttttattccttttacatttgttgcttctgggatttaaaaaattactaaattcataagatagttaggtattaaacacttcagaatatcaatgtaaaattggaaaataaggaactgggggcatttgtttaggccatgacttctacaagcagatttcttttcttttagtttagaagacaaaaaatttcaatacagatacttcttttagaagtaaatttttagattttattgtcagtagaaaaaagttaaactcctactaatttaaactaagacagtttaaaaaggaagcctgaaaaagactcatactacaaataatttaattgatggcatataagaatatgcagtttgaaaaagccaaactcttctctccacttagcttttgatccccactgtttgcttatttgtataagtcatactgtgtagaatttctattttctttttccccattaaaagaggaccaaacaattctttatacaaatggagtagcaactagttttgtagcactacatttaatgtaatgagatacctttgttcatttttttaaatttgaaatatactttacctgatccactttgattgtatactatattctttgttaattttaattttgtcctgttcctagactgctagaatctggcccctggccatcttaaagtgccaacatatgcctgcagggtttataaaaaatggcctggagtgacacattttattatacctaatattcactgcatcagtatcacatctagctcccttacttgtccacagataatgtaaacaaaggagggaaaaacttattaaattctccttcgctgctggcttgtgctggtttagtgcctgtgtccctggcagtgtccagtgtgttcacttccagttgaagtatccatgtgtttctgggcagcttttctgctcagtgtgatcctgagatggcttccccgccgccacccagagtgtggtccttggccgcctcctgctcctgctctgcaagcctgaaactggcttgtctggagccaggagttagtcctggggtgtgtgtgtgcctgcgcacccatgcgcatgcaagtgtgtttgccagctcaggagctgtctcctctctacctggctagtaagaggtgggacagtaatggtcctcctgctggccccagcaaggcccatgagtgactgccctgacgtattcactgtgcctctgggccacttcttcccctgtagatgtgggcttgttgccttcagccggcttccctgagggaggagaacactggattattggaaatgttttaatcactcttgccattacctacatctattagcatagatgatgaaaagctgttactggtgattatagatgagtatttccaggacaacattctaaaagtacaattatttcttattggggagattacaggtagtttggcaaagcattgaagtacaaaggtacattttcaattaaaaagcacacttctacaaaagatttggtttttaaattatggttacacatttcagtaactcatagctgctgtgcaaattggtagaccttataagaaggcacttgtttgtaagccagagaagaaactttaattgcatcctatcagattgttgaggtgggtgtgatagtcttcaggtgcagtgcgttcattcactaacgctcactgtcagtgcccatgtttgctagctgcctccatgtgactagtgagctgctggtgaaagtcgtgtgaaatcctgtacactgtgtatagaacaatgtaattttatgttaattgttattactttaaaacatatctaccatctgattggctggtaccgagagctgtgggtaaaatttgaaaattgtatttagaataagaaattttacattttaaaccctattgtcctttatgcattttcaatgaaatggaatgaaggctaatatgcttgctttatttacttttgtaatcttggattttgtagcttttaaaactagaaaccattgttctaacaaagcaggcaactttattctataaacacaactttattaagcagaatacactgtagatgcttttccccaacgtatctggctggcagtctttgtcgttgttcattctggggataaaggggaactaggctagcagttctaatgtgacattctttaagcatatcttaaaatagtatttaagtaaatggtctaatttctacataattattgcactgaacttttttgtttattaaggtgtttaaataagctcagctaattcaagacactgtagtcacttgtgcatcagtgtgcttgaatttagtagcttacagcattatttatgaaggaaaaaatacataaatatgaagtacctcatgttgaatgttattgtactgtatttttaatgtaacagtgcagatcttgttagacacatgaatgtgtataatcatgttaaatgcaaataaaactagttcataga

SEQ ID NO: 1592 - protein, 522 aa, Homo sapiens
MVDDKEKNMKCLTFFLMLPETVKNRSKKSSKKANTSSSSSNSSKLPPVCYEIITLKTKKKKMAADIFPRKKPANSSSTSVQQYHQQNLSNNNLIPAPNWQGLYPTIRERNAMMFNNDLMADVHFVVGPPGGTQRLPGHKYVLAVGSSVFHAMFYGELAEDKDEIRIPDVEPAAFLAMLKYIYCDEIDLAADTVLATLYAAKKYIVPHLARACVNFLETSLSAKNACVLLSQSCLFEEPDLTQRCWEVIDAQAELALKSEGFCDIDFQTLESILRRETLNAKEIVVFEAALNWAEVECQRQDLALSIENKRKVLGKALYLIRIPTMALDDFANGAAQSGVLTLNETNDIFLWYTAAKKPELQFVSKARKGLVPQRCHRFQSCAYRSNQWRYRGRCDSIQFAVDKRVFIAGFGLYGSSCGSAEYSAKIELKRQGVVLGQNLSKYFSDGSSNTFPVWFEYPVQIEPDTFYTASVILDGNELSYFGQEGMTEVQCGKVTVQFQCSSDSTNGTGVQGGQIPELIFYA

SEQ ID NO: 1593 - DNA, 2129 bp, Homo sapiens
ccgctttcgtctccgtcctgctgccgttaccgccgctgctgccgccgcttgcgtcccccgctccggtctgtggtgcagccgggacccaggaccatgtctctgtctcgctcagaggagatgcaccggctcacggaaaatgtctataagaccatcatggagcagttcaaccctagcctccggaacttcatcgccatggggaagaattacgagaaggcactggcaggtgtgacgtatgcagccaaaggctactttgacgccctggtgaagatgggggagctggccagcgagagccagggctccaaagaactcggagacgttctcttccagatggctgaagtccacaggcagatccagaatcagctggaagaaatgctgaagtcttttcacaacgagctgcttacgcagctggagcagaaggtggagctggactccaggtatctgagtgctgcgctgaagaaataccagactgagcaaaggagcaaaggcgacgccctggacaagtgtcaggctgagctgaagaagcttcggaagaagagccagggcagcaagaatcctcagaagtactcggacaaggagctgcagtacatcgacgccatcagcaacaagcagggcgagctggagaattacgtgtccgacggctacaagaccgcactgacagaggagcgcaggcgcttctgcttcctggtggagaagcagtgcgccgtggccaagaactccgcggcctaccactccaagggcaaggagctgctggcgcagaagctgccgctgtggcaacaggcctgtgccgaccccagcaagatcccggagcgcgcggtgcagctcatgcagcaggtggccagcaacggcgccaccctccccagcgccctgtcggcctccaagtccaacctggtcatttccgaccccattccgggggccaagcccctgccggtgccccccgagctggcaccgttcgtggggcggatgtctgcccaggagagcacacccatcatgaacggcgtcacaggcccggatggcgaggactacagcccgtgggctgaccgcaaggctgcccagcccaaatccctgtctcctccgcagtctcagagcaagctcagcgactcctactccaacacactccccgtgcgcaagagcgtgaccccaaaaaacagctatgccaccaccgagaacaagactctgcctcgctcgagctccatggcagccggcctggagcgcaatggccgtatgcgggtgaaggccatcttctcccacgctgctggggacaacagcaccctcctgagcttcaaggagggtgacctcattaccctgctggtgcctgaggcccgcgatggctggcactacggagagagtgagaagaccaagatgcggggctggtttcccttctcctacacccgggtcttggacagcgatggcagtgacaggctgcacatgagcctgcagcaagggaagagcagcagcacgggcaacctcctggacaaggacgacctggccatcccaccccccgattacggcgccgcctcccgggccttccccgcccagacggccagcggcttcaagcagaggccctacagtgtggccgtgcccgccttctcccagggcctggatgactatggagcgcggtccatgagcagcgccgatgtggaagtggccagattctgagccgcctgactagagttagaatccctttgcccacgtccagctgaagccgacagtgaccaacgacaggtctgcccccctcctcagctgatggccacatctgcagtgctgcccatctggtggcttcccccgcccttcccatgtagcctgttctgtcatcatctgtgcgttcctgtgtagagaacatccaggccccggctgcctggtcttgccccacttgagtctggcctggactggatcccagctgttctaggcagggccgggcagagtggggcgcaggcccctgaagggcgagacccagtggctgggctgcccagggctgaggggccgcctcttgagggtacacgcctctggtcacatggccatggagccttgggtacccctgagttaagggaggacatttggccagctggtggctgggaggggagcctggctgccctgctgcttctcctgcctaataaacaggcttctcctgc

SEQ ID NO: 1594 - protein, 520 aa, Homo sapiens
MSLSRSEEMHRLTENVYKTIMEQFNPSLRNFIAMGKNYEKALAGVTYAAKGYFDALVKMGELASESQGSKELGDVLFQMAEVHRQIQNQLEEMLKSFHNELLTQLEQKVELDSRYLSAALKKYQTEQRSKGDALDKCQAELKKLRKKSQGSKNPQKYSDKELQYIDAISNKQGELENYVSDGYKTALTEERRRFCFLVEKQCAVAKNSAAYHSKGKELLAQKLPLWQQACADPSKIPERAVQLMQQVASNGATLPSALSASKSNLVISDPIPGAKPLPVPPELAPFVGRMSAQESTPIMNGVTGPDGEDYSPWADRKAAQPKSLSPPQSQSKLSDSYSNTLPVRKSVTPKNSYATTENKTLPRSSSMAAGLERNGRMRVKAIFSHAAGDNSTLLSFKEGDLITLLVPEARDGWHYGESEKTKMRGWFPFSYTRVLDSDGSDRLHMSLQQGKSSSTGNLLDKDDLAIPPPDYGAASRAFPAQTASGFKQRPYSVAVPAFSQGLDDYGARSMSSADVEVARF

SEQ ID NO: 1595 - DNA, 3168 bp, Homo sapiens
ccgctttcgtctccgtcctgctgccgttaccgccgctgctgccgccgcttgcgtcccccgctccggtctgtggtgcagccgggacccaggaccatgtctctgtctcgctcagaggagatgcaccggctcacggaaaatgtctataagaccatcatggagcagttcaaccctagcctccggaacttcatcgccatggggaagaattacgagaaggcactggcaggtgtgacgtatgcagccaaaggctactttgacgccctggtgaagatgggggagctggccagcgagagccagggctccaaagaactcggagacgttctcttccagatggctgaagtccacaggcagatccagaatcagctggaagaaatgctgaagtcttttcacaacgagctgcttacgcagctggagcagaaggtggagctggactccaggtatctgagtgctgcgctgaagaaataccagactgagcaaaggagcaaaggcgacgccctggacaagtgtcaggctgagctgaagaagcttcggaagaagagccagggcagcaagaatcctcagaagtactcggacaaggagctgcagtacatcgacgccatcagcaacaagcagggcgagctggagaattacgtgtccgacggctacaagaccgcactgacagaggagcgcaggcgcttctgcttcctggtggagaagcagtgcgccgtggccaagaactccgcggcctaccactccaagggcaaggagctgctggcgcagaagctgccgctgtggcaacaggcctgtgccgaccccagcaagatcccggagcgcgcggtgcagctcatgcagcaggtggccagcaacggcgccaccctccccagcgccctgtcggcctccaagtccaacctggtcatttccgaccccattccgggggccaagcccctgccggtgccccccgagctggcaccgttcgtggggcggatgtctgcccaggagagcacacccatcatgaacggcgtcacaggcccggatggcgaggactacagcccgtgggctgaccgcaaggctgcccagcccaaatccctgtctcctccgcagtctcagagcaagctcagcgactcctactccaacacactccccgtgcgcaagagcgtgaccccaaaaaacagctatgccaccaccgagaacaagactctgcctcgctcgagctccatggcagccggcctggagcgcaatggccgtatgcgggtgaaggccatcttctcccacgctgctggggacaacagcaccctcctgagcttcaaggagggtgacctcattaccctgctggtgcctgaggcccgcgatggctggcactacggagagagtgagaagaccaagatgcggggctggtttcccttctcctacacccgggtcttggacagcgatggcagtgacaggctgcacatgagcctgcagcaagggaagagcagcagcacgggcaacctcctggacaaggacgacctggccatcccaccccccgattacggcgccgcctcccgggccttccccgcccagacggccagcggcttcaagcagaggccctacagtgtggccgtgcccgccttctcccagggcctggatgactatggagcgcggtccatgagcagtggcagcggcacgctggtgtccacagtgtgaggacgctgaccccgggcagccgctgctctgaagagcttccgcgccttccccctggtctcgtccgttttcctcctcagctctcgctggtttgttcttgggttgtttttcttttccacctgccccatgccttttggttggtgaccccagactctgtgatcccccagggtccatggtgctgctccatccgccccccctcccctgtgtttacgcgccccatcctgtgtgtcccagccttttgagcagaaatgccaggcaggacctgctgggccgtgcggggcaccctcggcctcaccctgcagtgtctgtggcactcactgcttttctaaggctcgccgtgagccaggtctaaagtttgaagaaaaagaaaaatcttaaaaaaaaaaaaaaaaaaagaaaaaaagaaaaacaggaaaaaggactttttttttcctgaaaaacaaaaaccgatctgcatggactccggtgtgcgctgttatctcgcatccgacttccccggtgcgatggcctctgtccggacagggaaggtgctggggtccctggccgccccggcccctgtggaggggtgcacagagaaagggggctcgtgccaagctcgaggggcctcctgaggaagccggccgctcctgtgagggaggccgggcccgggcacctgagggcttctccctctggacactgcgggccaggtgtacatagagcagcgcggcacagtggcctcacctcccgtcgggcactggcgggagcaaggtcgggggcaggcgctgcccagctggccgcacacggacattccaaagacctccagagaccaccccacccccacattcctttgaccagccttgtgagggcatcgatgctgccccgggctacctggctgctctgggcagggtgtgcgggccgggcccggctgggggagggcagctctgggcacgccgcacccacgccccccacctgggggaaacaggcggttcctgcccggttcttcctaaacgctctcgtctttttgtgtgtcttggtgactttagaaacaaacacagtggactcagtggctactggtattgtctcttcccacactgaactctggggaattgagtgcagggcacagcccggctcagcctgcccgctggtgggagcccctgggaagctgcggcgctcctttatctgatgtggtttagtaaaagcctcccacacacctccccgtggcctgggacgtggctggtagtgtttgtgtgggaagcagctcaagacgcggaccgcgtgacattaaggagagcgcaagggcggaccgggccctgtgtagagacccttccgcgccggcgttcccgctccgctaaagatttcaaatccaggggattccatgctcaatggatgaatgtagacacaaaacagcaacacttgtatgaagatgtaaagtgctgaacatatttttttcctgtttcctttccttttttttaaaaaatctgaattgtgccctgtactgcagttacttgtttgaataaaagttttatttattgc

SEQ ID NO: 1596 - protein, 521 aa, Homo sapiens
MSLSRSEEMHRLTENVYKTIMEQFNPSLRNFIAMGKNYEKALAGVTYAAKGYFDALVKMGELASESQGSKELGDVLFQMAEVHRQIQNQLEEMLKSFHNELLTQLEQKVELDSRYLSAALKKYQTEQRSKGDALDKCQAELKKLRKKSQGSKNPQKYSDKELQYIDAISNKQGELENYVSDGYKTALTEERRRFCFLVEKQCAVAKNSAAYHSKGKELLAQKLPLWQQACADPSKIPERAVQLMQQVASNGATLPSALSASKSNLVISDPIPGAKPLPVPPELAPFVGRMSAQESTPIMNGVTGPDGEDYSPWADRKAAQPKSLSPPQSQSKLSDSYSNTLPVRKSVTPKNSYATTENKTLPRSSSMAAGLERNGRMRVKAIFSHAAGDNSTLLSFKEGDLITLLVPEARDGWHYGESEKTKMRGWFPFSYTRVLDSDGSDRLHMSLQQGKSSSTGNLLDKDDLAIPPPDYGAASRAFPAQTASGFKQRPYSVAVPAFSQGLDDYGARSMSSGSGTLVSTV

SEQ ID NO: 1597 - DNA, 2877 bp, Homo sapiens
ccgctttcgtctccgtcctgctgccgttaccgccgctgctgccgccgcttgcgtcccccgctccggtctgtggtgcagccgggacccaggaccatgtctctgtctcgctcagaggagatgcaccggctcacggaaaatgtctataagaccatcatggagcagttcaaccctagcctccggaacttcatcgccatggggaagaattacgagaaggcactggcaggtgtgacgtatgcagccaaaggctactttgacgccctggtgaagatgggggagctggccagcgagagccagggctccaaagaactcggagacgttctcttccagatggctgaagtccacaggcagatccagaatcagctggaagaaatgctgaagtcttttcacaacgagctgcttacgcagctggagcagaaggtggagctggactccaggtatctgagtgctgcgctgaagaaataccagactgagcaaaggagcaaaggcgacgccctggacaagtgtcaggctgagctgaagaagcttcggaagaagagccagggcagcaagaatcctcagaagtactcggacaaggagctgcagtacatcgacgccatcagcaacaagcagggcgagctggagaattacgtgtccgacggctacaagaccgcactgacagaggagcgcaggcgcttctgcttcctggtggagaagcagtgcgccgtggccaagaactccgcggcctaccactccaagggcaaggagctgctggcgcagaagctgccgctgtggcaacaggcctgtgccgaccccagcaagatcccggagcgcgcggtgcagctcatgcagcaggtggccagcaacggcgccaccctccccagcgccctgtcggcctccaagtccaacctggtcatttcggaccccattccgggggccaagcccctgccggtgccccccgagctggcaccgttcgtggggcggatgtctgcccaggagagcacacccatcatgaacggcgtcacaggcccggatggcgaggactacagcccgtgggctgaccgcaaggctgcccagcccaaatccctgtctcctccgcagtctcagagcaagctcagcgactcctactccaacacactccccgtgcgcaagagcgtgaccccaaaaaacagctatgccaccaccgagaacaagactctgcctcgctcgagctccatggcagccggcctggagcgcaatggccgtatgcgggtgaaggccatcttctcccacgctgctggggacaacagcaccctcctgagcttcaaggagggtgacctcattaccctgctggtgcctgaggcccgcgatggctggcactacggagagagtgagaagaccaagatgcggggctggtttcccttctcctacacccgggtcttggacagcgatggcagtgacaggctgcacatgagcctgcagcaagggaagagcagcagcacgggcaacctcctggacaaggacgacctggccatcccaccccccgattacggcgccgcctcccgggccttccccgcccagacggccagcggcttcaagcagaggccctacagtgtggccgtgcccgccttctcccagggcctggatgactatggagcgcggtccatgagcaggaatccctttgcccacgtccagctgaagccgacagtgaccaacgacaggtgtgatctgtccgcccaagggccagaaggccgggagcacggggatgggagcgcccgcaccctggctggaagatgaacttcccgtaagcacgtaattcctgcaggtccggcagctacacctggagtgtggggcctggtccctccccatgcccctcggtggggctctcttgggcccctcactcccactggcaatgtcacaagggctccccaggcccctccctgcctcgggcagcccccagccctcctccttacccaacctcccatccagaaccttgctgccagggcctcccagctcgctcctgcgccaaaggccagctgtcaggtgctatgcggggtcaccagcagagtgcccgctggcaggtgggggcttccccgcttccggggtctgccccaggactcctgggtggacctcccccacccacctccgctgactcctgcaggcactggggagctctgctggaattgggggtttaaaacttcattagcagatttgtgctcttccatactgtttgtttgtttgttaggtgaaatacagtgtggtgagctgcactggtgacaacagcccttacctggctggggaggtgtctccagcgagagctcactcccgcctacagccactcacaccccggggacaggaagctgtagagttggcgggccaggagggcagttgagagctggccagcggagggtgcagggaagcccagctgtgctcaactctcctgcctccgccttccaccctgggcccagggacagacagacattgccctcagaagggcagggaggaggttgtcctggagaggcctgtaggtccattcttcacccgtccctaccaggccaactcggcctgcaggaagggagacctgcagggcgctacccctgcgcccccacacacagtagggccagaacaccatcccctccaccggggtgtgccgaggacagtggggaggagaggagaggggcagcttcctcctggccccaggaagggctggcatcgggttcctggcacagcccctcctgtccaggactttatcatcggcagacctcagaagacaacacacaaaggtttcttttttcttagcttcatttctcttaaaaaacaaggaacaagaaaacattgcaccagcgttctaagcctcaaacaaaacacaaaacaaatccccctgcgaagcaacaataaactttacatctctttggcaacaat

SEQ ID NO: 1598 - protein, 552 aa, Homo sapiens
MSLSRSEEMHRLTENVYKTIMEQFNPSLRNFIAMGKNYEKALAGVTYAAKGYFDALVKMGELASESQGSKELGDVLFQMAEVHRQIQNQLEEMLKSFHNELLTQLEQKVELDSRYLSAALKKYQTEQRSKGDALDKCQAELKKLRKKSQGSKNPQKYSDKELQYIDAISNKQGELENYVSDGYKTALTEERRRFCFLVEKQCAVAKNSAAYHSKGKELLAQKLPLWQQACADPSKIPERAVQLMQQVASNGATLPSALSASKSNLVISDPIPGAKPLPVPPELAPFVGRMSAQESTPIMNGVTGPDGEDYSPWADRKAAQPKSLSPPQSQSKLSDSYSNTLPVRKSVTPKNSYATTENKTLPRSSSMAAGLERNGRMRVKAIFSHAAGDNSTLLSFKEGDLITLLVPEARDGWHYGESEKTKMRGWFPFSYTRVLDSDGSDRLHMSLQQGKSSSTGNLLDKDDLAIPPPDYGAASRAFPAQTASGFKQRPYSVAVPAFSQGLDDYGARSMSRNPFAHVQLKPTVTNDRCDLSAQGPEGREHGDGSARTLAGR

SEQ ID NO: 1599 - DNA, 1887 bp, Homo sapiens
ggggtatcgataagtttctttttttttttttttttgagacagaatctcgctctgtcgcccaggctggaatgcagtggcgcgatctctgctcactacaagctccgcctcccgggttcacgccattctcccgcctcggcctcccaaagtgctgggattacaggcgtgagccaccgcgcccggccttaaaaattgaatctgtagcttaggccatccaaattttataaatccaaattaactttagaatgtttctattactttcacttttacatatataaattttaagtgtcctgattggctgaacaatatctcacatcaaatgctttgcctggaaatagatatcccactggggatagtggtgtgtaaactatgacttggacaattctatatactcaagcaccataaaaagtatgcagttgaaaagaaaatcaaagttgactcctgggtgccaactaaatattcaaatcaggtactcatccttatcagctaaattcattttcaccaggaacagaccaccaaataaattattttatcctaataactagttttgaagcagtgtaattactctggaagaaggctctaaaaagtcatgattcccccactattttgaaatgtatcctctaacaaggatcattatagtgtaatcttaatttttatgtttatcaagatgaaatcttgtttgaattgtgatattataaaaggggactcaaaaatccaagcagtctactgtgtttaaattaacaccacaaccttccttatcagattataagagtagaaaaattaacacttggtgtgtgaatcttcaggaaaatgagctatttcataagctcaaacaagcagcttccttttccagagaatatagaattatattatggtctccttaaatgtttagtagctcttatggtcacagcatttttaatctccctatggcatctttatggaataattttctaaagggtaattctctactaaaaatatcagaccccgaccatatttaatgtggagagcaataccctcttagaaagaaaatacattgactcatacacttgttaaaagttaataaagaaatagctcatttttaaagccggaagtttatggtctctgcatcgtcaatttaatttaagcattgctgagacaatctttaatctactcccctttttgtaataccttatttatggtgcattttcatttttatttgggggaaacgttagcccaacagagccggcagatgaaagtgttgaaaagaggtcaaatggaaacaaaggctcttacccgctgtatttcagacaggactgaggcacttagccgaggagccactgggttattagattaatttcaaaagagcttttacaagttgcttaattcctttttttttttttttttcaaaaacccatgaaccacaaactcaaatttctcctcaaatggggttaatctgacaaatgaggcatggacccagccttgtggaaaaagcattccacgctaatgagatcttggtctttcttgtgaggctacgttatttatgtaaatatgtctggaggcaccttctctaagcttttagttttctatgatctattagtttagtgtttattaaagaatcaaatgtatagaattaccaggcattcgtggggaatgctgtgtagcaaatgtaaaactgacctgctcggaagaaacgtaggaacgcttcaaacccactgtaatgtttggtttgagattattttcattgctttgagagtgaactgcctaagagtaggccttataataaatgctatgtgcgtcttcagtagttccaagctaaagcaatttggcattctcccactgtgatttgtgacttttaaacccacaaaataaaagctttttggtattgataaaaagaaaaaaaaaaaaaaaaaa

SEQ ID NO: 1600 - DNA, 1598 bp, Homo sapiens
tccctgtgccgcttgtaccggcacgtgtcgcacgacttcctagagatccgcttcaagattcagcggctgctggagccgcgacagtacatgctgctgctgcccgagcacgtgctggtcaagatcttcagcttcctgcccacgcgcgcgctggccgccctcaagtgcacctgccaccacttcaagggcatcatcgaggcgtttggcgtgcgggccacagactcgcgctggagccgagacccgctctaccgcgatgatccgtgcaaacagtgccgcaagagatacgagaagggcgacgtgtcgctctgccgctggcaccccaagccctaccaccatgacctgccttacggacgttcctactggatgtgctgccgtcgagccgaccgcgagactcccggctgccgcctgggcctccacgataacaactgggtgctgccctgcaatgggccaggcgggggccgggccggccgggaggaagggaagtgaagccgggggagggccggggagagcccaccacgcccacccctcccctctcccccgggagccgagggtccggactgggccgcctgcccattcccctactccaggcaggattgatccctcaccggaactgagctggggttcaacaggggtgacccaggaaagccctctgcttgatcctgttgattttctactcttcagaaccagggccgtggaccctctgagaagggtgtttttttttttttatcagcatctcactttcttctccattcagccccaaccccctccctgccatgctttccaccccaaggacccaccagcagggagcagacggcagctaattttggtaccacttaagggtccccccattctggcccccatcctctccctcaccccaattctttctcgctggagctgttatttcccaagaagccgcatcgcccaaggttggcacctctcctaacctgccacacgacagctctcacctctctaggaattgggggctgtcaggtcacaggtgggatctggcatttttttatgacagtccatttctagatggtttggctattaaagaagtgggggggaaatactgttttctccttaacctcaagctaccagtctctcctcttccgcgtagaggaagaggggggcagacaaaaaaaaagctgaagtataaaaaccctcctcctcccgttattatttaagctactgccatcaaccccacccccataaagctgtgaagccctttgcctcgcttttgacagcgtggggggggcccgtgggcagggacttcggatttgcatttctgggttgtttttccttccactctggggtctcgttcaggcttggggtctcctcaccccagccacatgttttctttaagaatcctttggtcaaccaggaccttgatttttcaggcattttggtctggggtatttttgtttgttctctctgttttttgttttcttttttttctttccatcgtggttctggaagctttctagcgtgtggcatctgaccaattttgaattggtccttttctataaatcaaaattaaaaaaaaaaaaaaaaaaaaaaaaaaaaaaaaaaaaaaaaaaaaaaaaaaaaaaaaaaaaaaaaaa

SEQ ID NO: 1601 - protein, 202 aa, Homo sapiens
MTCLTDVPTGCAAVEPTARLPAAAWASTITTGCCPAMGQAGAGPAGRKGSEAGGGPGRAHHAHPSPLPREPRVRTGPPAHSPTPGRIDPSPELSWGSTGVTQESPLLDPVDFLLFRTRAVDPLRRVFFFFYQHLTFFSIQPQPPPCHAFHPKDPPAGSRRQLILVPLKGPPILAPILSLTPILSRWSCYFPRSRIAQGWHLS

SEQ ID NO: 1602 - DNA, 1432 bp, Homo sapiens
cggagcgcgagcagagcgagacccccaggtcctgcgggcgcggaatatcctggaaccttcttttgtttgtcagcagccaaggtgtttccaggaagttcagagagaacagaatttaagaagtgcaacatggccaggggctgcctctgctgcttgaagtacatgatgttcctcttcaatttgatattctggctctgtggctgtgggctgctgggagtgggcatctggctctccgtgtcccaaggcaactttgccaccttctcccccagcttcccttcgttgtctgcagccaacctggtcattgccataggcaccattgtcatggtgacgggcttcctcggctgcctgggggccatcaaggaaaacaagtgcctcctcctcagctttttcatcgtcctgttggtcatcctcctagcagagctgatcttactcatcctcttctttgtctacatggacaaggtgaacgagaacgccaagaaggacctgaaggaaggcctgctgctgtaccacaccgagaacaacgtggggctgaagaacgcctggaacatcatccaggctgagatgcgatgctgtggtgtcactgactacacagactggtacccagtgctgggggagaacacggttcccgaccgctgctgcatggagaactcccagggctgcgggcgcaacgccaccacgcctttgtggagaacgggctgctatgaaaaggtgaagatgtggttcgatgacaataagcacgtgctgggcacggtggggatgtgcatcctcatcatgcagatcctgggcatggccttctccatgaccctcttccagcacatccaccggactggtaagaagtacgacgcatgagcgggctggccgggagtgcccaccccgccctgctgccctgtggagggaagaggattgagctttgtgtcacctgcctgcgctctccagatatgacccctgcacccaccccccacagcctgccctaccccacctaccctgcctcagcctcggacttctcagtgggtggagtgccagggaggaggaggcacacggagacctggggctcggggcccctggattcctgcatctgcatatgcgtatttgccaaagacgacagggtgggctggggtgcgctccggaggaacccccggcactgatgggcttctgcccctgcccttcctcacactgacactttgtccccacatggggtggggagcagagtgcccgccccgtggagataccgccccagcgggggctgcgacatccatggccaccatggggcacctggcggggcgggggtctgccggcctctgggcaaggcccctggagcatctcgcccaggctttttataccttacaatgtaacttttttattttattttactctatgattattcaggaatattatctctcagataagtttagggttaaaaaaaaaaaaaaaaaaa

SEQ ID NO: 1603 - protein, 239 aa, Homo sapiens
MARGCLCCLKYMMFLFNLIFWLCGCGLLGVGIWLSVSQGNFATFSPSFPSLSAANLVIAIGTIVMVTGFLGCLGAIKENKCLLLSFFIVLLVILLAELILLILFFVYMDKVNENAKKDLKEGLLLYHTENNVGLKNAWNIIQAEMRCCGVTDYTDWYPVLGENTVPDRCCMENSQGCGRNATTPLWRTGCYEKVKMWFDDNKHVLGTVGMCILIMQILGMAFSMTLFQHIHRTGKKYDA

SEQ ID NO: 1604 - DNA, 2247 bp, Homo sapiens
ggaggtgtgtaacgtgcgctatggagccgaaagtcgcagagctgaagcagaagatcgaggacacgctatgtccttttggcttcgaggtttaccccttccaggtggcatggtacaatgaactcttgcctccagccttccacctaccgctgccaggacctaccctggccttcctggtactcagcacgcctgccatgtttgaccgggccctcaagcccttcttgcagagctgccacctccgaatgctgactgacccagtggaccagtgtgtggcctaccatctgggccgtgttagagagagcctcccagagctgcagataggaatcattgctgactacgaggtacaccccaaccgacgccccaagatcctggcccagacagcagcccatgtagctggggctgcttactactaccaacgacaagatgtggaggctgacccatgggggaaccagcgcatatcaggtgtgtgcatacacccccgatttgggggctggtttgccatccgaggggtagtgctgctgccagggatagaggtgccagatctgccacccagaaaacctcatgactgtgtacctacaagagctgaccgtatcgccctactcgaaggcttcaatttccactggcgtgattggacttaccgggatgctgtgacaccccaggagcgctactcagaagagcagaaggcctacttctccactccacctgcccaacgattggccctattgggcttggctcagccctcagagaagcctagttctccctccccggaccttccctttaccacacccgcccccaagaagcctgggaatcccagcagagcccggagctggctcagccccagggtctcaccacctgcatcccctggcccttgattttctcccatgtggaccctgatttatggtggtacttgctaggacttaattggctttggcaaagcaaaaggttttgagtacaagattactatttttgataatatagtagagatcttccatgaagataacaaggctcaaggaagttaggtttggccaagataaaggccagggaaccagaattcccatctgccttcaaatgagtttttttttttttttttttttagacagagtcttactctgtcacctaggctggagtgcagtggcacagtctctactcaggaggctgaggcagtagaatcatttgagccagggaggcagagattgcagtgagccgagattgcatggctgcactctagcctgggtgacagtgtgagactgtctcaaaaaaaaaaaaaaaagtacctgcctcaggtagggactgaataaacacgtgtaaggcactttggaaaaatacctggcatatatagtaagcagtatgttggccattacgaaaggccctgggaattctgtactgctgctcatgggtgtagtcggttctagaggggtgggcaggtgggagtagctgaggaagacaagtggctggaatggtatcacatgatacacagaagtatcctcagttctgaatctaccttggcctcaagggcccaggagaataacttttcccagctgacagcctctctgaggacaatgacatatgaatgaggatcaaaacgagctttggccaggcactgtggcgctcacctgtaatcccaccattttgggaggctgaggcggaggaccacctgaggcaaggaattcagaaccactctgggcaacataatgacactaaaaaagactatctctaatcaaggctagaaccaagggaaggctaagaattgcccagtactgtgcaactactgaaagccctacccaaggccaccagccttgtcttcctctttcctctgtcagttcaaaaagaacagaaacctccagctcttttacatagcaggtaccaggcatttatcagaagaggccaacttctggttcccatgcagccctttgaatagtgtgtctaaacaaaaataggtgtccaagtagtcacactgagactttaactggtaacccaccctgtggcgtcagtcgcagtgctctggccaacactatagcagggcttattcttctccctcatgtgtagtgaaacaaaatgtaacaccttgggttcattcagttccattccctatgtctacctgtgtcaatataattccctgatttggaggcagctctcctcattttccccaaaacagggaaagcaaggagtaaattcctcttaaaatcaaaagctaataatatgcttcctaaaataaagactcatcaaggtctcaaaaaaaaaaaaaaaaaa

SEQ ID NO: 1605 - protein, 288 aa, Homo sapiens
RCVTCAMEPKVAELKQKIEDTLCPFGFEVYPFQVAWYNELLPPAFHLPLPGPTLAFLVLSTPAMFDRALKPFLQSCHLRMLTDPVDQCVAYHLGRVRESLPELQIGIIADYEVHPNRRPKILAQTAAHVAGAAYYYQRQDVEADPWGNQRISGVCIHPRFGGWFAIRGVVLLPGIEVPDLPPRKPHDCVPTRADRIALLEGFNFHWRDWTYRDAVTPQERYSEEQKAYFSTPPAQRLALLGLAQPSEKPSSPSPDLPFTTPAPKKPGNPSRARSWLSPRVSPPASPGP

SEQ ID NO: 1606 - DNA, 3011 bp, Homo sapiens
cacacgcacacacacacacacaaacacacgcgcacgcaaacagcagtgaggaagagaaaagcagagataagcaaggctccgcagcagcctcctttctaacttgaccctcgccagaccctggccagcatggttgtcctgaatccaatgactttgggaatttatcttcagcttttcttcctctctatcgtgtctcagccgactttcatcaacagcgttcttccaatctcagcagcccttcccagcctggatcagaagaagcgtggtggccacaaagcatgctgcctgctgacgcctcctccaccaccactgttcccaccaccattcttcagaggtggccgaagtccgcttctctccccagacatgaagaatctcatgctggaactggagacctcgcagtccccgtgcatgcaaggctcgctaggctcccctgggcctcccggcccccagggtccaccggggcttcctggcaagacaggaccaaagggagaaaagggggagcttggccgaccaggaaggaagggtagacctggccccccaggtgttcctggcatgcctgggcccatcggttggccaggccctgaaggacccaggggtgaaaaaggtgacctgggtatgatgggcttgccagggtcaagaggaccaatgggctccaagggctaccctggatccagaggggaaaagggatccagaggtgaaaagggtgacctgggtcccaaaggagaaaagggtttcccaggatttcctggaatgttggggcagaaaggtgaaatgggtccaaaaggtgaacctgggatagcaggacaccgaggacccacaggaagaccaggaaaacgaggcaagcagggacagaaaggggatagtggagttatgggcccaccaggcaagcctgggccttctggtcaacctggccgtccggggcccccaggccccccacctgcaggacaacttataatgggacccaaaggggaaagaggatttcccgggcctccaggaagatgtctttgtggacccactatgaatgtgaataacccttcctacggggaatctgtgtatgggcccagttccccgcgagttcctgtgatttttgtggtcaacaaccaggaggagcttgagaggctgaacacccaaaacgccattgccttccgcagagaccagagatctctgtacttcaaggacagccttggctggctccccatccagctgacccctttctaccctgtggattacactgcagaccagcacggcacctgtggggatgggctcctgcagcctggggaggagtgtgacgacggtaacagcgatgtgggtgacgactgcatccgctgtcaccgtgcctactgtggagatggtcaccggcatgagggtgtggaggactgtgacggctctgactttggctacctgacatgcgagacctatctccctgggtcatatggagacctgcaatgcacccagtactgctacatcgactccacgccctgccgctacttcacctgagggccgtgaggagaaggtgggctgcgccccacagaactggcagcagcttctccactgtcatcaaactggccatgtcctggccccgtctccaccaacctttgtgtgacaaaaacaaggacaaattcctgctactaagacatgctgttaactcagtctgactggaagaatttaggaccactgcatcctgtcttaatccaaggtactggaaaaccttccacatgcccaacctgagacctgttccccatcgctaccatttggccaaacaaccggctacaatgctcttcctcttctggaatgttgctgacccaggccgtggacttggctgagcactgttagacacacatagacctgcaggctgttttagtatgttttgatctctttggggaatctggagtacaggcctctccgcccctgaccaccgaaacgtgcaggcattctcactcacactgggcagcccgctgtcgggtctctctaggcctatgaaccacaaagcagggaagtgggcacgttctctcggggtggctcacagctttgaacctgccaaaggacccctcgactggccacagcccagcccagcctgacgtggatgtggctgcccaggaaaagacttaactgtgaaaaagtactgagaacccacctgacccaggcttgccccaagcagaggctagagaagaggctcctcttctcagtgtttcccaaaggggcggctcttgtggtttcaaaatctctggcaccatcttgacctcttggctctctctgcactttgccccctgtctcaaaaatgtccctcatgtccatttcctgtccaggagactcatgaggactgtgtgacctgcacaagcccacacctgggcaggctgttggtgtctccttggtccttaggcagatactcccctgagtccccgatctagggccagctgcagagggctctctctaggcagagcgttcctggccagagctctacctctttgcctcctgctgacccctgacagcgtcccgtggcatttctttcatgtctgcatattgcatagccttgtcctcctgtgtgcctgagctcctcccttttcaataagattattagtcgtgcatgtctgtgagctgcctttcatcaccatttttcctgagtagggcttagttttattctggaaagacatctccaaggtgaggtccacccccacagcagacctcaagtagaaattgcccaatttttaccagctggagggacacccttgggtttttgtacgaagctatttaatgagcctgtgtcttggggactcagcaggctggagcttggggcctggtggaccatcacctggtgtctgtaggtggacccggtctcccacaggtgacatcaacctgagggtggcgtctttagagacaggcacatgggcagctctgttcccttcgcctctactgcgaggcctggggagatgttgttttcatgctgcttccaccatcacactggggtttctggatgggaaataaaaaaataaaggcagttcatttccccaaaaaaa

SEQ ID NO: 1607 - protein, 455 aa, Homo sapiens
MVVLNPMTLGIYLQLFFLSIVSQPTFINSVLPISAALPSLDQKKRGGHKACCLLTPPPPPLFPPPFFRGGRSPLLSPDMKNLMLELETSQSPCMQGSLGSPGPPGPQGPPGLPGKTGPKGEKGELGRPGRKGRPGPPGVPGMPGPIGWPGPEGPRGEKGDLGMMGLPGSRGPMGSKGYPGSRGEKGSRGEKGDLGPKGEKGFPGFPGMLGQKGEMGPKGEPGIAGHRGPTGRPGKRGKQGQKGDSGVMGPPGKPGPSGQPGRPGPPGPPPAGQLIMGPKGERGFPGPPGRCLCGPTMNVNNPSYGESVYGPSSPRVPVIFVVNNQEELERLNTQNAIAFRRDQRSLYFKDSLGWLPIQLTPFYPVDYTADQHGTCGDGLLQPGEECDDGNSDVGDDCIRCHRAYCGDGHRHEGVEDCDGSDFGYLTCETYLPGSYGDLQCTQYCYIDSTPCRYFT

SEQ ID NO: 1608 - DNA, 2863 bp, Homo sapiens
gcctcacaatgacgggctcatcattcagcctcgctcatctgctcatcatttcaggactgctctgttactcggcaggctgcttggcccttcccagcctggatcagaagaagcgtggtggccacaaagcatgctgcctgctgacgcctcctccaccaccactgttcccaccaccattcttcagaggtggccgaagtccgcttctctccccagacatgaagaatctcatgctggaactggagacctcgcagtccccgtgcatgcaaggctcgctaggctcccctgggcctcccggcccccagggtccaccggggcttcctggcaagacaggaccaaagggagaaaagggggagcttggccgaccaggaaggaagggtagacctggccccccaggtgttcctggcatgcctgggcccatcggttggccaggccctgaaggacccaggggtgaaaaaggtgacctgggtatgatgggcttgccagggtcaagaggaccaatgggctccaagggctaccctggatccagaggggaaaagggatccagaggtgaaaagggtgacctgggtcccaaaggagaaaagggtttcccaggatttcctggaatgttggggcagaaaggtgaaatgggtccaaaaggtgaacctgggatagcaggacaccgaggacccacaggaagaccaggaaaacgaggcaagcagggacagaaaggggatagtggagttatgggcccaccaggcaagcctgggccttctggtcaacctggccgtccggggcccccaggccccccacctgcaggacaacttataatgggacccaaaggggaaagaggatttcccgggcctccaggaagatgtctttgtggacccactatgaatgtgaataacccttcctacggggaatctgtgtatgggcccagttccccgcgagttcctgtgatttttgtggtcaacaaccaggaggagcttgagaggctgaacacccaaaacgccattgccttccgcagagaccagagatctctgtacttcaaggacagccttggctggctccccatccagctgacccctttctaccctgtggattacactgcagaccagcacggcacctgtggggatgggctcctgcagcctggggaggagtgtgacgacggtaacagcgatgtgggtgacgactgcatccgctgtcaccgtgcctactgtggagatggtcaccggcatgagggtgtggaggactgtgacggctctgactttggctacctgacatgcgagacctatctccctgggtcatatggagacctgcaatgcacccagtactgctacatcgactccacgccctgccgctacttcacctgagggccgtgaggagaaggtgggctgcgccccacagaactggcagcagcttctccactgtcatcaaactggccatgtcctggccccgtctccaccaacctttgtgtgacaaaaacaaggacaaattcctgctactaagacatgctgttaactcagtctgactggaagaatttaggaccactgcatcctgtcttaatccaaggtactggaaaaccttccacatgcccaacctgagacctgttccccatcgctaccatttggccaaacaaccggctacaatgctcttcctcttctggaatgttgctgacccaggccgtggacttggctgagcactgttagacacacatagacctgcaggctgttttagtatgttttgatctctttggggaatctggagtacaggcctctccgcccctgaccaccgaaacgtgcaggcattctcactcacactgggcagcccgctgtcgggtctctctaggcctatgaaccacaaagcagggaagtgggcacgttctctcggggtggctcacagctttgaacctgccaaaggacccctcgactggccacagcccagcccagcctgacgtggatgtggctgcccaggaaaagacttaactgtgaaaaagtactgagaacccacctgacccaggcttgccccaagcagaggctagagaagaggctcctcttctcagtgtttcccaaaggggcggctcttgtggtttcaaaatctctggcaccatcttgacctcttggctctctctgcactttgccccctgtctcaaaaatgtccctcatgtccatttcctgtccaggagactcatgaggactgtgtgacctgcacaagcccacacctgggcaggctgttggtgtctccttggtccttaggcagatactcccctgagtccccgatctagggccagctgcagagggctctctctaggcagagcgttcctggccagagctctacctctttgcctcctgctgacccctgacagcgtcccgtggcatttctttcatgtctgcatattgcatagccttgtcctcctgtgtgcctgagctcctcccttttcaataagattattagtcgtgcatgtctgtgagctgcctttcatcaccatttttcctgagtagggcttagttttattctggaaagacatctccaaggtgaggtccacccccacagcagacctcaagtagaaattgcccaatttttaccagctggagggacacccttgggtttttgtacgaagctatttaatgagcctgtgtcttggggactcagcaggctggagcttggggcctggtggaccatcacctggtgtctgtaggtggacccggtctcccacaggtgacatcaacctgagggtggcgtctttagagacaggcacatgggcagctctgttcccttcgcctctactgcgaggcctggggagatgttgttttcatgctgcttccaccatcacactggggtttctggatgggaaataaaaaaataaaggcagttcatttccccaaaaaaa

SEQ ID NO: 1609 - protein, 445 aa, Homo sapiens
MTGSSFSLAHLLIISGLLCYSAGCLALPSLDQKKRGGHKACCLLTPPPPPLFPPPFFRGGRSPLLSPDMKNLMLELETSQSPCMQGSLGSPGPPGPQGPPGLPGKTGPKGEKGELGRPGRKGRPGPPGVPGMPGPIGWPGPEGPRGEKGDLGMMGLPGSRGPMGSKGYPGSRGEKGSRGEKGDLGPKGEKGFPGFPGMLGQKGEMGPKGEPGIAGHRGPTGRPGKRGKQGQKGDSGVMGPPGKPGPSGQPGRPGPPGPPPAGQLIMGPKGERGFPGPPGRCLCGPTMNVNNPSYGESVYGPSSPRVPVIFVVNNQEELERLNTQNAIAFRRDQRSLYFKDSLGWLPIQLTPFYPVDYTADQHGTCGDGLLQPGEECDDGNSDVGDDCIRCHRAYCGDGHRHEGVEDCDGSDFGYLTCETYLPGSYGDLQCTQYCYIDSTPCRYFT

SEQ ID NO: 1610 - DNA, 2909 bp, Homo sapiens
cacacgcacacacacacacacaaacacacgcgcacgcaaacagcagtgaggaagagaaaagcagagataagcaaggctccgcagcagcctcctttctaacttgaccctcgccagaccctggccagcatggttgtcctgaatccaatgactttgggaatttatcttcagcttttcttcctctctatcgtgtctcagccgactttcatcaacagcgttcttttcttcagaggtggccgaagtccgcttctctccccagacatgaagaatctcatgctggaactggagacctcgcagtccccgtgcatgcaaggctcgctaggctcccctgggcctcccggcccccagggtccaccggggcttcctggcaagacaggaccaaagggagaaaagggggagcttggccgaccaggaaggaagggtagacctggccccccaggtgttcctggcatgcctgggcccatcggttggccaggccctgaaggacccaggggtgaaaaaggtgacctgggtatgatgggcttgccagggtcaagaggaccaatgggctccaagggctaccctggatccagaggggaaaagggatccagaggtgaaaagggtgacctgggtcccaaaggagaaaagggtttcccaggatttcctggaatgttggggcagaaaggtgaaatgggtccaaaaggtgaacctgggatagcaggacaccgaggacccacaggaagaccaggaaaacgaggcaagcagggacagaaaggggatagtggagttatgggcccaccaggcaagcctgggccttctggtcaacctggccgtccggggcccccaggccccccacctgcaggacaacttataatgggacccaaaggggaaagaggatttcccgggcctccaggaagatgtctttgtggacccactatgaatgtgaataacccttcctacggggaatctgtgtatgggcccagttccccgcgagttcctgtgatttttgtggtcaacaaccaggaggagcttgagaggctgaacacccaaaacgccattgccttccgcagagaccagagatctctgtacttcaaggacagccttggctggctccccatccagctgacccctttctaccctgtggattacactgcagaccagcacggcacctgtggggatgggctcctgcagcctggggaggagtgtgacgacggtaacagcgatgtgggtgacgactgcatccgctgtcaccgtgcctactgtggagatggtcaccggcatgagggtgtggaggactgtgacggctctgactttggctacctgacatgcgagacctatctccctgggtcatatggagacctgcaatgcacccagtactgctacatcgactccacgccctgccgctacttcacctgagggccgtgaggagaaggtgggctgcgccccacagaactggcagcagcttctccactgtcatcaaactggccatgtcctggccccgtctccaccaacctttgtgtgacaaaaacaaggacaaattcctgctactaagacatgctgttaactcagtctgactggaagaatttaggaccactgcatcctgtcttaatccaaggtactggaaaaccttccacatgcccaacctgagacctgttccccatcgctaccatttggccaaacaaccggctacaatgctcttcctcttctggaatgttgctgacccaggccgtggacttggctgagcactgttagacacacatagacctgcaggctgttttagtatgttttgatctctttggggaatctggagtacaggcctctccgcccctgaccaccgaaacgtgcaggcattctcactcacactgggcagcccgctgtcgggtctctctaggcctatgaaccacaaagcagggaagtgggcacgttctctcggggtggctcacagctttgaacctgccaaaggacccctcgactggccacagcccagcccagcctgacgtggatgtggctgcccaggaaaagacttaactgtgaaaaagtactgagaacccacctgacccaggcttgccccaagcagaggctagagaagaggctcctcttctcagtgtttcccaaaggggcggctcttgtggtttcaaaatctctggcaccatcttgacctcttggctctctctgcactttgccccctgtctcaaaaatgtccctcatgtccatttcctgtccaggagactcatgaggactgtgtgacctgcacaagcccacacctgggcaggctgttggtgtctccttggtccttaggcagatactcccctgagtccccgatctagggccagctgcagagggctctctctaggcagagcgttcctggccagagctctacctctttgcctcctgctgacccctgacagcgtcccgtggcatttctttcatgtctgcatattgcatagccttgtcctcctgtgtgcctgagctcctcccttttcaataagattattagtcgtgcatgtctgtgagctgcctttcatcaccatttttcctgagtagggcttagttttattctggaaagacatctccaaggtgaggtccacccccacagcagacctcaagtagaaattgcccaatttttaccagctggagggacacccttgggtttttgtacgaagctatttaatgagcctgtgtcttggggactcagcaggctggagcttggggcctggtggaccatcacctggtgtctgtaggtggacccggtctcccacaggtgacatcaacctgagggtggcgtctttagagacaggcacatgggcagctctgttcccttcgcctctactgcgaggcctggggagatgttgttttcatgctgcttccaccatcacactggggtttctggatgggaaataaaaaaataaaggcagttcatttccccaaaaaaa

SEQ ID NO: 1611 - protein, 421 aa, Homo sapiens
MVVLNPMTLGIYLQLFFLSIVSQPTFINSVLFFRGGRSPLLSPDMKNLMLELETSQSPCMQGSLGSPGPPGPQGPPGLPGKTGPKGEKGELGRPGRKGRPGPPGVPGMPGPIGWPGPEGPRGEKGDLGMMGLPGSRGPMGSKGYPGSRGEKGSRGEKGDLGPKGEKGFPGFPGMLGQKGEMGPKGEPGIAGHRGPTGRPGKRGKQGQKGDSGVMGPPGKPGPSGQPGRPGPPGPPPAGQLIMGPKGERGFPGPPGRCLCGPTMNVNNPSYGESVYGPSSPRVPVIFVVNNQEELERLNTQNAIAFRRDQRSLYFKDSLGWLPIQLTPFYPVDYTADQHGTCGDGLLQPGEECDDGNSDVGDDCIRCHRAYCGDGHRHEGVEDCDGSDFGYLTCETYLPGSYGDLQCTQYCYIDSTPCRYFT

SEQ ID NO: 1612 - DNA, 4943 bp, Homo sapiens
cggcggcggcggtagtggcggcggcggcggtgcccgggcggcagcggcagcagtagcggcagccctgaggacggtgagacggccgcggcggcggcgacagcgcggaagtcgcgcgggacccagagcttcccccctgtcgctagtgctgaggctttcgcctttcctacccagcttcttgctcacggcccgggctgggctgggcagggcaacgcgcccccgggcaggggcggagctgtagatatggtgtaagatacttcttcaagattggacagctggggaccttcttctgattaaccttaaaccaacttgtagccatagagacacctcacaaggttcccatttttgttgttgttgttgttgattttctgctcacacctttcctgaccttgcaaccatgtatggaagtgcccgctctgttgggaaggtggagccgagcagccagagccctgggcgttcacccaggcttccacgttcccctcgcttgggtcaccgtcgaaccaacagtacgggagggagttcgggaagcagtgttggaggtggcagtgggaaaaccctttcaatggaaaatatacaatctttaaatgctgcctatgccacctctggccctatgtatctaagtgaccatgaaaatgtgggttcagaaacacctaaaagcaccatgacacttggccgttctgggggacgtctgccttacggtgttcggatgactgctatgggtagtagccccaatatagctagcagtggggttgctagtgacaccatagcatttggagagcatcacctccctcctgtgagtatggcatccactgtacctcactcccttcgtcaggcgagagataacacaatcatggatctgcagacacagctgaaggaagtattaagagaaaatgatctcttgcggaaggatgtggaagtaaaggagagcaaattgagttcttcaatgaatagcatcaagaccttctggagcccagagctgaagaaggaacgagccctgagaaaagatgaagcttccaaaatcaccatttggaaggaacagtacagagttgtacaggaggaaaaccagcacatgcagatgacaatccaggctctccaggatgaattgcggatccagagggacctgaatcagctgtttcagcaggatagtagcagcaggactggcgaaccttgtgtagcagagctgacagaggagaactttcagaggcttcatgctgagcatgagcggcaggccaaagagctgtttcttcttcgaaagacattggaggaaatggagctgcgtattgagactcaaaagcagaccctaaatgctcgggatgaatccattaagaagcttctggaaatgttgcagagcaaaggactttctgccaaggctaccgaggaagaccatgagagaacaagacgactggcagaggcagagatgcacgttcatcacctagaaagccttttggagcagaaggaaaaagagaacagtatgttgagagaggagatgcatcgaaggtttgagaatgctcctgattctgccaaaacaaaagctctgcaaactgttattgagatgaaggattcaaaaatttcctctatggagcgtgggcttcgagacctggaagaggaaattcagatgctgaaatcgaatggtgctttgagtactgaggaaagggaagaagaaatgaagcaaatggaagtgtatcggagccattctaaatttatgaaaaataagattggccaggtgaaacaggagctgtccagaaaggacacagaactactcgccctgcagacaaagctagaaacactcacaaaccagttctcagatagtaaacagcacattgaagtgttgaaggagtccttgactgctaaggagcagagggctgccatcctgcagactgaggtggatgctctccgattgcgtttggaagagaaggaaaccatgttgaataaaaagacaaaacaaattcaggatatggctgaagagaaggggacacaagctggagagatacatgacctcaaggacatgttggatgtgaaggagcggaaggttaatgttcttcagaagaagattgaaaatcttcaagagcagcttagagacaaggaaaagcagatgagcagcttgaaagaacgggtcaaatccttgcaggctgacaccaccaacactgacactgccttgacaactttggaggaggcccttgcagagaaagagcggacaattgaacgcttaaaggagcagagggacagagatgagcgagagaagcaagaggaaattgataactacaaaaaagatcttaaagacttgaaggaaaaagtcagcctgttgcaaggcgacctttcagagaaagaggcttcacttttggatctgaaagagcatgcttcttctctggcatcctcaggactgaaaaaggactcacggcttaagacactagagattgctttggagcagaagaaggaggagtgtctgaaaatggaatcacaattgaaaaaggcacatgaggcagcattggaagccagagccagtccagagatgagtgaccgaatacagcacttggagagagagatcaccaggtacaaagatgaatctagcaaggcccaggcagaagttgatcgactcttagaaatcttgaaggaggtggaaaatgagaagaatgacaaagataagaagatagctgagttggaaagtctcacctcaaggcaagtgaaagaccagaataagaaggtagcaaatctgaagcacaaggaacaggtggaaaaaaagaagagtgcacaaatgttagaggaggcgcgacgacgggaggacaatctcaacgacagctctcagcagctacaggtggaggagttactgatggccatggagaaggtaaagcaggaactagaatccatgaaagcaaagctgtcctccacccagcagtctctggcagaaaaggaaactcacttgactaatcttcgggcagagagaaggaaacacttagaggaagttctggagatgaagcaagaagctcttctggctgccattagtgaaaaagacgccaatatagctctcttggagctttcgtcctctaagaagaagacccaagaggaagtggctgccctgaagcgggagaaggatcgtctggtacagcagcttaagcagcagacgcaaaatcgaatgaagctaatggccgacaactacgaggatgaccacttcaaatcctcccattccaatcaaacaaatcacaagccctccccagaccaggatgaggaggagggtatatgggcatagccaatcagaggcttagttcagccattttgttcagaacgatcatccagcccctcttagaacttgaccaaaatagaagtaaattaaagttgtacattggacacctgacaaccctctgccatgaccgagaccccctgatcctccgtggactcactccaccagcttcctataacttggacgatgaccaggcggcttgggagaatgagctgcagaagatgacccgggggcagcttcaggatgagttagagaaaggtgaacgggacaatgcagaactgcaggagtttgccaacgccattcttcagcagatagcagaccattgtcccgacatcctagagcaagtggtcaacgccctggaagagtcctcttgaccctgctttatggggaagcctgaggtagtcaacccaggagccaagaaaagagaactacgaggaacaggtgcccggaaccttcttggcaccaaacactacaaacttcatcccaacttgctcacttgaagaagtgtgattccagcaccgtttctacatctgccatcttactctgcctttctgctttggatgtggtctctacactaaccttcttgatgtccagggtagataaagggtcgaatctctctgaagaactgccacctggtcatcagcagtggagaactgtgggagctggtggctctgccctgacagagagccatggagcagaggagcctctcacctcctgtcctctgacatgagaatgaaaccaggaatggacttggagttcaacaggctgagaggatgcctccaatggaccagagagctgagtgttctaatatcacaataggtgctttctcctaaaagggcaaaaaacaatctcaaaaagattagaaaaagagaaggggggaagggaagagaaaatcgactcttctttttactgtctcttctgcttactttccacatgagatgctttgtaccggggagctgtgagcaggcctcacgatggcttgggagcactcgttctcccaaggtctgagtcttcatccagccctgcctgtctgtcgcagccttcctcactctgttcctcggccagttaacaagaagatggtgtgaggtgttctccaccagtctctcctgtttgagactgttgacgttatcatactgaggtgttagatcaaatatctctaattgaagaacatgtgaggttgaaagagcaccagccagggcaacatagcgtgaccctgtctctacaaaaaattaaaaagagaacatacaaagttgacatatgagaccctgttgtccccgcctgcagctttgccccagtaacagatgcccgttgctcttgggctggtttcccctgaacacctccaagaggctgcctgccttgccagcacccgtgtcctgagctcctgcagcccagtggctgctgaagttgtgatccctcactcaccctgctagctttgcccttgactcgtcttctctgaacctcagcctcgtgcattgcctggaaccttcttctagcataaatgaaggtttttcctcctacacacattccttcctcggttatttcattcagagaatatttatgaaatgcctactgtgtgcaagtcatccatccttgaaaaggccacttctcagtgagggagagatgtagtggattctgtgagacatacctgctggagttgaagcagtaaatagcatgtccttcccctccccgatcttaaggtgtgttttctaga

SEQ ID NO: 1613 - protein, 948 aa, Homo sapiens
MYGSARSVGKVEPSSQSPGRSPRLPRSPRLGHRRTNSTGGSSGSSVGGGSGKTLSMENIQSLNAAYATSGPMYLSDHENVGSETPKSTMTLGRSGGRLPYGVRMTAMGSSPNIASSGVASDTIAFGEHHLPPVSMASTVPHSLRQARDNTIMDLQTQLKEVLRENDLLRKDVEVKESKLSSSMNSIKTFWSPELKKERALRKDEASKITIWKEQYRVVQEENQHMQMTIQALQDELRIQRDLNQLFQQDSSSRTGEPCVAELTEENFQRLHAEHERQAKELFLLRKTLEEMELRIETQKQTLNARDESIKKLLEMLQSKGLSAKATEEDHERTRRLAEAEMHVHHLESLLEQKEKENSMLREEMHRRFENAPDSAKTKALQTVIEMKDSKISSMERGLRDLEEEIQMLKSNGALSTEEREEEMKQMEVYRSHSKFMKNKIGQVKQELSRKDTELLALQTKLETLTNQFSDSKQHIEVLKESLTAKEQRAAILQTEVDALRLRLEEKETMLNKKTKQIQDMAEEKGTQAGEIHDLKDMLDVKERKVNVLQKKIENLQEQLRDKEKQMSSLKERVKSLQADTTNTDTALTTLEEALAEKERTIERLKEQRDRDEREKQEEIDNYKKDLKDLKEKVSLLQGDLSEKEASLLDLKEHASSLASSGLKKDSRLKTLEIALEQKKEECLKMESQLKKAHEAALEARASPEMSDRIQHLEREITRYKDESSKAQAEVDRLLEILKEVENEKNDKDKKIAELESLTSRQVKDQNKKVANLKHKEQVEKKKSAQMLEEARRREDNLNDSSQQLQVEELLMAMEKVKQELESMKAKLSSTQQSLAEKETHLTNLRAERRKHLEEVLEMKQEALLAAISEKDANIALLELSSSKKKTQEEVAALKREKDRLVQQLKQQTQNRMKLMADNYEDDHFKSSHSNQTNHKPSPDQDEEEGIWA

SEQ ID NO: 1614 - DNA, 2969 bp, Homo sapiens
ctaaattacccactacgttgcttgtatatttaaagttggagttcgttgctaaagatggcagacccagatgtcctcactgaagttccagcagcattgaagcggttagccaagtatgtgatccggggattttatggcattgagcatgccttggccttggacatcttgatcaggaactcctgtgtgaaagaggaggatatgctggagctgctcaagtttgatcggaagcaacttcgatcagttttgaataatttaaagggagacaagtttatcaaatgcagaatgagggtagagactgctgcagacgggaaaaccactcgccataactactacttcatcaattatcgtactcttgttaatgtggtaaaatataaactggaccacatgagaagaagaattgagaccgatgagagagattcgaccaaccgggcttccttcaaatgtcctgtctgtagtagtactttcacagacttagaagctaatcagctctttgatcctatgacaggaactttccgctgtactttttgccatacagaggtagaagaggatgaatcagcaatgcccaaaaaagatgcacgcacacttttggcaaggtttaatgaacaaattgagcccatttatgcattgcttcgggagacagaggatgtgaacttggcctatgaaatacttgagccagaacccacagaaatcccagccctgaaacagagcaaggaccatgcagcaactactgctggagctgctagcctagcaggtgggcaccaccgggaagcatgggccaccaaaggtccttcctatgaagacttatacactcagaatgttgtcattaacatggatgaccaagaagatcttcatcgagcctcactggaagggaaatctgccaaagagaggcctatttggttgagagaaagcactgtccaaggggcatatggttctgaagatatgaaagaagggggcatagatatggacgcatttcaggagcgtgaggaaggccatgctgggcctgatgacaacgaagaggtcatgcgagcactgctcattcacgagaaaaagacttcctctgccatggctggttcagtgggggcagctgctccagtgaccgctgccaatggcgatgactcagaaagcgagaccagtgagtcagatgatgattctccaccccgtccggcagctgtggctgtgcataaacgagaagaggatgaagaggaagatgacgagtttgaagaagtagcagatgaccccattgtcatggtggctggccgtccgttctcctacagtgaagtgagccaacggccagagctagtggcccagatgacaccagaagaaaaggaagcatatatagcaatgggacaacgcatgtttgaggacctctttgagtgagctttccctaattctttctcctttctctaatgctcagttcaaaaaggaatgtctcatctttgaagaaaagtatttaagtggctttctgcccctcttgatgtaagcaactgtccatccttgtgcaaagattgatggtagagagcttgacttttatgccagaaactttcccagcaaggtagggtgctgagaatcctacccttccttgctgtcactacagtattaatattttactgtattttcttttcttttttttttttttttggagatgaagtctcactcttgtaccccaggctggagtgcaatggcgtgatctcggctcactgcaacctctgcctcctgggttcaagcgattctcctgcctcagcctcccgagtagctgggattacaggtgcctgccaccatgcctggctaatttttgtatttttagtagaggcagggtttcaccatgttagccaggatgatctcgatctcctgacctcatgatccacccgcctcggcctcccaaagtgctgtattttcttatctgatttttttcttgccttattaagacataattttctcccttctgaaatgagtgagggaagttcataaggtaaatccttcccatccatctgtttactacaataggttacaataattcactgatcacatccattttatctgttctagccaggcattccaaacaatttcttatactgctgcccaccaaagcagcttgccaacagtcaaatcactgattgggggaaaaaatcctgaaattttgcttagaatttgagcatttcctcaaaattgagatggatcaatatgtaaggggaggtgggagcgtgtgtggaagggggagagatatacttgagtcttatgattaatgtctaaaccagaatttgtgtctttagaactgaccagactggtagattttattgtattgcttaatgtcttttggtttggatttaggatgatagaaaacagaagtataattggtaaacccttaggaagaaattagaaaaacatggacgtaagacaaaaagtctctgtgaagggttgaagagtgacaagcattggtaacagtgccttagaactgtgtcagttagtctgatttggaaatcctttatgtaaagctgagactggtcctggttttgttccctttggtacagacctcttgtcagtgctataaattgtttaatgaggccattccagcagaaatcaacagaataattgattactcttctctctctctgtcactctccctctttctaaacatcattgaaggctgtctctctttaattttgtcagacacagtattttagggtgcatccagtataccattgagcattgtaacctcaggaaacagtttattttgggttctgatatgtagcatggtattttccctaaggcagaactttaaaaataaagaactttcacacaagggtctgtaacaattgtatatcttacaatatttttccttgcattgtaatttttaagtatttatcattttatagtacacatgtaaagaatatatgagccttgtatggagtgatgtttcatttacctgggttgtgttaatgactgaatgttgacaataaatctgttttatactg

SEQ ID NO: 1615 - protein, 439 aa, Homo sapiens
MADPDVLTEVPAALKRLAKYVIRGFYGIEHALALDILIRNSCVKEEDMLELLKFDRKQLRSVLNNLKGDKFIKCRMRVETAADGKTTRHNYYFINYRTLVNVVKYKLDHMRRRIETDERDSTNRASFKCPVCSSTFTDLEANQLFDPMTGTFRCTFCHTEVEEDESAMPKKDARTLLARFNEQIEPIYALLRETEDVNLAYEILEPEPTEIPALKQSKDHAATTAGAASLAGGHHREAWATKGPSYEDLYTQNVVINMDDQEDLHRASLEGKSAKERPIWLRESTVQGAYGSEDMKEGGIDMDAFQEREEGHAGPDDNEEVMRALLIHEKKTSSAMAGSVGAAAPVTAANGDDSESETSESDDDSPPRPAAVAVHKREEDEEEDDEFEEVADDPIVMVAGRPFSYSEVSQRPELVAQMTPEEKEAYIAMGQRMFEDLFE

SEQ ID NO: 1616 - DNA, 1234 bp, Homo sapiens
gcttttagagcactgtgatgtaacatgtcaagcagaaatagggagcatgtttacagccattctatgaaaaagtgttcggaatgtacagactagcacagaagctggactaattgaacaagtattgctgaaaatgagtgctgtagatgacatgatagcagagtaccttcaagtttaaatctgagagtgatattcatttggcagaacatcataaacaggttttgtatgatgggaaacttgcaagtagcattacctttacatatactgctaaggccactgatgctcaactctgcctggaatcatcaccaaaagagaatgcatcaatttttgtgcattcccaacatgctctaatgcttcagattcaagtgctttttccactgtttccccaattggataatcggcagctcaatgacagtcaagtggaaacaactgtctgctcctgcttcaggtgcagaaatacagcgatttccagtgccagctgttgagccagtgccagcaccaggggcagattcccctccagggacagcgctggagctagaggaagctccagagccctcctgccgctgccctgggactgcccaggaccagcccagtgaggagctgcctgacttcatggcacctcctgtagagccaccggcctcagccctggagctgaaagtgtggctggagctagaggtggcagagaggggtggccagcacagctccagccagcagctcccacactgctcccagtcctgggcacagtggaagctatggaggcagagaccagggtttgcaatctgggctcctctgcctcactggagagggacttctctcattcagcagagcagcagccctgctgctgaagggcctgctgctactgctgctggggctgtttgcctgcctgcaggaggtgctggagagcaagaaaaggagcctgtgagcaggggttccagcaggtcctcctgctcccagaggcgacctcctcctctaggcatggaggtttgccctcagctgggcatctgggccatttgcccctaacgtgctgcccaggatggcctcctcttgacaggcggacagggggtgagggggccagggggcatctccaaaggaagcttttaaactcagcagctgcaccccagaatctgtatgcctgcacctgcccaaggatttattcatagcttacctaagaatttcaaatttctaccataacactgaataaagtttgactttttgaaaaaaaaaaaaaaaaaaaaaa

SEQ ID NO: 1617 - protein, 203 aa, Homo sapiens
MTVKWKQLSAPASGAEIQRFPVPAVEPVPAPGADSPPGTALELEEAPEPSCRCPGTAQDQPSEELPDFMAPPVEPPASALELKVWLELEVAERGGQHSSSQQLPHCSQSWAQWKLWRQRPGFAIWAPLPHWRGTSLIQQSSSPAAEGPAATAAGAVCLPAGGAGEQEKEPVSRGSSRSSCSQRRPPPLGMEVCPQLGIWAICP

SEQ ID NO: 1618 - DNA, 1610 bp, Homo sapiens
gcctgggctgcggctgtcatggacgcctgggtccgcttcagtgctcagagccaagcccgggagcggctgtgtagggccgcccagtatgcttgctctcttcttggccatgcgctgcagaggcatggagccagtcctgagttacagaaacagattcgacaactggagagccacctgagccttggaagaaagcttctacgcctgggtaactcagcagatgcccttgagtcagccaaaagagctgttcacctatcagatgttgtcctgagattctgcatcactgttagtcacctcaatcgagccttgtacttcgcctgtgacaatgtcctgtgggctggaaagtctggactggctccccgtgtggatcaggagaagtgggcccagcgttcattcaggtactatttgttttccctcatcatgaatttgagccgtgatgcttatgagattcgcctactgatggagcaagagtcttctgcttgtagccggcgactgaaaggttctggaggaggagtcccaggaggaagtgaaactgggggacttgggggaccagggactccaggaggaggtctgccccaactggctctgaaacttcggctgcaagtcctgctcctggctcgagtccttagaggtcatcccccacttctgctagacgtggtcagaaatgcctgtgatctcttcattcctctggacaaactaggcctctggcgctgtggccctgggattgtggggctttgtggcctcgtgtcctccatcctgtctattctcaccctaatctatccctggctacgactcaagccctgaccttccggtacaggataaggaggggacctgaattggtgagatggaatcttagatcgtcccccatgtgccagcctcattcgaattctactctttggttaaagttagaaattcagagatttaggggtggaggaagagctttggggaagatgaggtaaggaaagatgactcgtgaagttaataggatgtctctaatttctagatgtgcctgagcttctgttcttttcctctttctttgtgtctctcttgaatatatttactttgtgtctcttaactctgtttaaggttctgtgtctatgcatctctctctttcttttttcaaccttctcattctcctatccagggatttaatcagcagaattactttttgataggggaggtataaggtttggcctgtaaggttctaactgccttcttttttctcacagaggtggcttatggcagatttttcctccttcaaactccaaacataatttttaagactatgtgccagtggactcttcccttatatctctgcaccacaagttgttggatgtttcctcttcctcccttatgtctacctcaccaacctcgctcatcatttggcccttatccttccttgtacacctaccttcagatttctgcttacactttgatttcagagctttattccccagtctgttcttactcctttgtcgcttatccagaatgatgctatgtgtagcatcttgctgtaaatcctgtacaatgattctgtgtaaatagctgtggcctatgccaataatgaagagcaagcctttcaggtaagcaaattaaagttcagtttgctcatcgac

SEQ ID NO: 1619 - protein, 259 aa, Homo sapiens
MDAWVRFSAQSQARERLCRAAQYACSLLGHALQRHGASPELQKQIRQLESHLSLGRKLLRLGNSADALESAKRAVHLSDVVLRFCITVSHLNRALYFACDNVLWAGKSGLAPRVDQEKWAQRSFRYYLFSLIMNLSRDAYEIRLLMEQESSACSRRLKGSGGGVPGGSETGGLGGPGTPGGGLPQLALKLRLQVLLLARVLRGHPPLLLDVVRNACDLFIPLDKLGLWRCGPGIVGLCGLVSSILSILTLIYPWLRLKP

SEQ ID NO: 1620 - DNA, 5060 bp, Homo sapiens
gcacgaggggagttcggcgtttgctggggctgcagcagctgaagtgtagtgttttcttgggactggcggtctgcacttctctcccgggttccatctccccccgcccggtggtgaggccctcgaggagggctcggacgggtgtagcgatccgcgctagaggaagacgaggcccgggaacgcatgtcccccagggcaggttagggggctggaggggtcaaatcccggggtacttgtggagactctttagcgtggcttcttctctctgctgagaccccgagagctttcccagttctcctcccaggaccaccggggttcctgaagatcgggacttttctgcgcccctccaccaacagcccatctcctgtctatgaagaaagacccttcgtagaaacaacttccccgctgctgacgcgttttcccgtcccgtccccgaagtagtctactatgacctcgttgtgagcctctgaacgattttgacactttcccgaggcctagggtattatatcctaaccttactaaagaccacagaggtgcttgccattatgggaaatcagcttgctggcattgctccctcccagatcctttctgtagagagttatttttcagatattcatgactttgaatatgataaaagcctggggagtactcggttttttaaagttgctcgagccaagcaccgagaaggcctggtcgttgtgaaggtttttgcaattcaggatcccacattgcctttaaccagctataaacaagagctggaggaactgaaaatcaggcttaattctgcacagaattgtctacctttccagaaagcatcagaaaaagcatctgagaaagcagctatgctctttaggcagtatgtgcgagacaatctctatgatcgcatcagtacccgtccattcttgaataacattgagaagcgctggattgctttccagatcctgacagctgtggaccaagcacacaaatctggagttcgtcatggggacatcaagactgagaatgtgatggtcaccagttggaattgggttcttctaactgattttgccagttttaagcccacttatcttccagaagacaacccggcagatttcaattatttctttgacacatcacggaggagaacttgctatattgctcctgaacgttttgttgatggtgggatgtttgccactgagttagaatatatgagagatccttcaactccgcttgtagacttaaatagcaatcagagaacaagaggagagttgaagagagcaatggacatcttttcagcaggttgtgtgatagctgagctttttacagaaggtgtaccattatttgatctctctcaacttttggcttatagaaatggacattttttccctgaacaagtgctaaataaaattgaagatcacagtatcagagaattggtaactcagatgattcaccgtgagccagataaacgtttagaggcagaagattacttaaaacagcagcgtggcaatgcctttcctgaaatattttacacttttcttcagccctacatggcccagtttgccaaggaaacgtttctttctgcagatgagcgtattctggttatacggaaggatttgggcaacattattcacaatctctgtggacatgatctgccagaaaaagccgaaggagagcctaaggaaaatgggctggttatcttggtatctgttataacatcctgcctacagacccttaaatactgtgattccaaactagctgctttggaactgattcttcatttggctccaagattaagtgttgaaatccttttggatcgtattactccatatcttttgcatttcagcaatgactctgttcctagggtgagggctgaagccttgaggacgttgaccaaagttcttgctctcgtcaaagaggttcctcgtaatgatatcaatatttatccggaatacattctgccaggcatagcccacttagcccaagatgatgctactatcgttagactagcctatgctgaaaacatagctctgctggcagaaacagctctgagattcctggaattagtacagttaaaaaatcttaatatggaaaatgaccccaataatgaagaaatagatgaggttacacatccaaatggaaattatgacacagagctccaagccttacatgaaatggtccagcagaaagttgttactttgctaagtgaccctgaaaatattgtaaaacaaaccttgatggaaaatggaataacacggctgtgtgtattctttggacgtcagaaagccaacgatgttttgttgtcccacatgattactttcctaaatgataagaatgattggcatctacgtggagcattttttgatagtatagttggtgttgctgcctatgttggctggcaaagctcctcaattctcaagcctctgctgcaacaaggtcttagtgatgctgaggaatttgtcattgtgaaagctctttatgcccttacttgtatgtgccagttaggactgctacaaaaaccccatgtttacgaatttgccagtgatattgcccccttcctgtgtcatcccaatttatggatacgttatggtgccgtgggatttatcacagtggtagctcgtcaaataagtacagctgatgtctactgtaaactgatgccttatcttgacccatatattacccaaccaataatacagattgaaagaaaacttgttctgctcagtgttttaaaggaaccagtaagtcgttctatatttgattatgctttgaggtctaaagatattactagcttgttcagacatcttcacatgcgtcagaagaaacgaaatggttctcttcccgactgccctccgccagaggatcctgccatagcacagcttctgaagaagttgctctcacagggaatgacagaggaagaggaagacaaacttctggcactgaaagacttcatgatgaaatctaataaagcaaaggccaatatagtggaccagagccatcttcatgatagtagtcagaaaggtgtaattgacttggcagctttaggcataactgggagacaagttgatcttgttaaaaccaaacaagaaccagatgacaaacgggccagaaaacatgtaaaacaagactcaaatgtaaatgaagaatggaaaagcatgtttgggtcactggacccaccaaacatgccacaggccctacctaaagggagtgatcaggaggtgattcagactgggaaacctcctcgttccgagtcctctgctggcatttgtgtccctttgtcaacttcttcacaggttccagaagtgacaactgtccaaaataaaaaaccagtaataccggttttaagtagtacaatcttaccatccacctatcagattcgaattacaacttgtaaaactgaacttcagcaactcatccagcaaaagcgggagcagtgcaatgctgagagaatagctaagcagatgatggaaaatgctgaatgggagagtaaaccaccaccacctggatggcgtcctaaagggctgttagttgcccatcttcatgagcataaatctgctgtgaatcgaattagagtctctgatgaacactcactttttgcaacatgttcaaatgatggcacagtgaaaatctggaacagtcaaaagatggaggggaagaccaccactaccagatctattcttacatacagccgaattggaggacgagtcaagacgctcacattctgccaaggctcccactatttagccatagcatctgataatggtgctgtccagcttcttggaattgaggcttctaagctgcccaagtctcctaaaatccatcctctacaaagcagaattctagatcagaaggaggacggttgtgttgtggatatgcatcacttcaactctggagcacagtctgttcttgcctatgccactgtgaatggctctctggttggctgggaccttaggtcttcaagcaatgcgtggactttaaagcatgatttaaagtcgggcctcatcacttcctttgctgtggacatccaccaatgctggctctgcattggtacaagcagtggtaccatggcttgttgggacatgaggttccagttgccaatttcaagtcactgtcatccttccagggctcgaatcagacgcctctcaatgcaccctctgtatcagtcctgggtgattgcagctgttcagggcaacaacgaagtgtccatgtgggacatggagactggtgacagaagatttactctctgggccagcagtgcaccaccactttctgaattacagccttctcctcatagcgtccatggtatctactgtagtcctgcagatggaaatcctatcctactaacagctggctcagatatgaaaataaggttttgggacttggcttacccagaaaggtcctatgttgttgcaggaagtactagttccccatctgtgtcctactacaggaaaataattgaaggcactgaagttgtccaggaaattcagaataagcagaaagtaggaccaagtgatgacacccctcgaaggggcccagagtccctgcccgtgggacatcatgacatcatcactgatgtcgccacattccagaccacacagggcttcatcgtaactgcttctagagatgggattgtgaaggtgtggaaataaaacctactgatttgtataaattttaatagttataaatataatactataactcgagaaaaggcatttctagagaacagattcatttgcttaattttcaaaattatgtctccatattactgtttcatgactgactgactaaatgacacccaaaatggttaagatgtacttgactagtttacttatgcatctctttgcaagaatcagccagccaacaatgtctgggatttttattgtatatgttatagaggtgagaaatgtaaaatatgaaaatgaatatgtttattttgtattgaaaaagatggttgaaaagatggttgtaagctattatagtataaacacatttttgctattaaaaatgctattcaaagcagttaaactgtaaaaaaaaaaaaaaaaaaaaaaaaaaaaaaaaaaaaaaaactcgagggggggcccggtacc

SEQ ID NO: 1621 - protein, 1358 aa, Homo sapiens
MGNQLAGIAPSQILSVESYFSDIHDFEYDKSLGSTRFFKVARAKHREGLVVVKVFAIQDPTLPLTSYKQELEELKIRLNSAQNCLPFQKASEKASEKAAMLFRQYVRDNLYDRISTRPFLNNIEKRWIAFQILTAVDQAHKSGVRHGDIKTENVMVTSWNWVLLTDFASFKPTYLPEDNPADFNYFFDTSRRRTCYIAPERFVDGGMFATELEYMRDPSTPLVDLNSNQRTRGELKRAMDIFSAGCVIAELFTEGVPLFDLSQLLAYRNGHFFPEQVLNKIEDHSIRELVTQMIHREPDKRLEAEDYLKQQRGNAFPEIFYTFLQPYMAQFAKETFLSADERILVIRKDLGNIIHNLCGHDLPEKAEGEPKENGLVILVSVITSCLQTLKYCDSKLAALELILHLAPRLSVEILLDRITPYLLHFSNDSVPRVRAEALRTLTKVLALVKEVPRNDINIYPEYILPGIAHLAQDDATIVRLAYAENIALLAETALRFLELVQLKNLNMENDPNNEEIDEVTHPNGNYDTELQALHEMVQQKVVTLLSDPENIVKQTLMENGITRLCVFFGRQKANDVLLSHMITFLNDKNDWHLRGAFFDSIVGVAAYVGWQSSSILKPLLQQGLSDAEEFVIVKALYALTCMCQLGLLQKPHVYEFASDIAPFLCHPNLWIRYGAVGFITVVARQISTADVYCKLMPYLDPYITQPIIQIERKLVLLSVLKEPVSRSIFDYALRSKDITSLFRHLHMRQKKRNGSLPDCPPPEDPAIAQLLKKLLSQGMTEEEEDKLLALKDFMMKSNKAKANIVDQSHLHDSSQKGVIDLAALGITGRQVDLVKTKQEPDDKRARKHVKQDSNVNEEWKSMFGSLDPPNMPQALPKGSDQEVIQTGKPPRSESSAGICVPLSTSSQVPEVTTVQNKKPVIPVLSSTILPSTYQIRITTCKTELQQLIQQKREQCNAERIAKQMMENAEWESKPPPPGWRPKGLLVAHLHEHKSAVNRIRVSDEHSLFATCSNDGTVKIWNSQKMEGKTTTTRSILTYSRIGGRVKTLTFCQGSHYLAIASDNGAVQLLGIEASKLPKSPKIHPLQSRILDQKEDGCVVDMHHFNSGAQSVLAYATVNGSLVGWDLRSSSNAWTLKHDLKSGLITSFAVDIHQCWLCIGTSSGTMACWDMRFQLPISSHCHPSRARIRRLSMHPLYQSWVIAAVQGNNEVSMWDMETGDRRFTLWASSAPPLSELQPSPHSVHGIYCSPADGNPILLTAGSDMKIRFWDLAYPERSYVVAGSTSSPSVSYYRKIIEGTEVVQEIQNKQKVGPSDDTPRRGPESLPVGHHDIITDVATFQTTQGFIVTASRDGIVKVWK

SEQ ID NO: 1622 - DNA, 1743 bp, Homo sapiens
gccccggcccgcccgccagctgcggcggcgcgtcgggaagtgcttggggcggcgagcatggcggcagcggctgcaggcctgggcggcggcggcgccggcccgggacccgaggccggggacttcctggcccgctaccggctggtatcgaacaagctgaagaagcggttcctgcggaagccgaacgtggcggaggccggcgagcagttcggacagctgggccgggagctgcgcgcccaggagtgtctgccctacgcggcctggtgccagctggcggtggcgcgctgccagcaggcgctcttccacgggcccggggaggcgctggccctcaccgaggccgcccgcctcttcctgcggcaggagcgcgacgcgcgccagcgcctggtctgccccgccgcctacggggagccgctgcaggccgccgccagcgccctgggcgccgcggtgcgtctgcacctcgagctgggccagccggccgccgccgccgccctctgcctcgagctggccgccgccctgcgcgacctgggccagccggccgccgccgccggtcacttccagcgcgccgcccagctccagctgccccagctgcccctggccgcgctgcaggcgcttggcgaggccgcctcctgccagctgctggcgcgcgactacaccggcgccctggcggtcttcacgcgcatgcagcgcctggcgcgggagcacggcagccacccggtgcagtcactgccgccgcccccgccgccggcaccccagcccgggcccggggcgacgcccgccctaccggccgcgctgcttcctccgaactccggctcggcggcgccctctcccgccgccctgggcgccttctcggacgtgctggtccgctgcgaggtgtcccgcgtgctgctgctgctcctcctgcaaccaccgcccgccaagctgctgccggagcacgcccagaccctggagaagtactcctgggaggcttttgacagccacgggcaggagagcagcggccagcttcccgaggagctctttctgctgctccagtctttggtcatggctacccacgaaaaggacacggaagccatcaagtcgctgcaggtggagatgtggccactgttgactgctgagcagaaccacctccttcacctcgttctgcaagaaaccatctccccctcaggacagggagtctgatccatcccattcacccagtgacttctttttgcccaggcctggactttttgcatcagtcacgttaaccagatgactttgcctgttaccaaacctcatgcatccacgtttgcgtctggggaggaataaaaagacatcgttcccgcttctgcgttttgttattcctactgccgccataggaattatttcgttggctgaacgttaccagcaccccgagaacacattttgatagaatcagagtagaggacatggctgtcttctaaaaagccacgacatgaaaatgacaatccctttcgtctccttcctccgctgcttccacctaacgcagcctcctgcctccgcctttgtttcatagtgaggattttattttgcacggcgccctccctctaaatacctaccctagatgatttcatcctgcccctcacttcttaacatattcctgtgtctttgtaatggccaaatttctccttccactcgtccgcacggtacgtcttcatgggagtcattttattccttacagcttccttgtaaccacagccctaaatccatgataaagctactcttgtactcttc

SEQ ID NO: 1623 - protein, 371 aa, Homo sapiens
MAAAAAGLGGGGAGPGPEAGDFLARYRLVSNKLKKRFLRKPNVAEAGEQFGQLGRELRAQECLPYAAWCQLAVARCQQALFHGPGEALALTEAARLFLRQERDARQRLVCPAAYGEPLQAAASALGAAVRLHLELGQPAAAAALCLELAAALRDLGQPAAAAGHFQRAAQLQLPQLPLAALQALGEAASCQLLARDYTGALAVFTRMQRLAREHGSHPVQSLPPPPPPAPQPGPGATPALPAALLPPNSGSAAPSPAALGAFSDVLVRCEVSRVLLLLLLQPPPAKLLPEHAQTLEKYSWEAFDSHGQESSGQLPEELFLLLQSLVMATHEKDTEAIKSLQVEMWPLLTAEQNHLLHLVLQETISPSGQGV

SEQ ID NO: 1624 - DNA, 7710 bp, Homo sapiens
caaccaaccagtggttcatcccagccgtgaggggggacattccccctgggtgtgcagcctatggcttcgtgtgtgacgggactcgcctcctggtgtttggtgggatggtggagtatgggaaatacagcaatgacctctacgaactccaggcgagccggtgggagtggaagagactcaaagcaaagacgcccaaaaacgggccccctccgtgtcctcgactcgggcacagcttctcccttgtgggcaacaaatgctacctgtttgggggtctggccaatgatagcgaggacccaaagaacaacattccaaggtacctgaatgacttatatatcctggaattacggccaggctctggagtggtagcctgggacattcccatcacttacggggtcctaccaccaccccgggagtcacatactgccgtggtctacaccgaaaaagacaataagaagtccaagctggtgatctacggcgggatgagtggctgcaggctgggggacctgtggaccctagatattgacaccctgacgtggaataagcccagtctcagcggggtggcgcctcttcctcgcagtctccactcggcaaccaccatcggaaataaaatgtacgtgtttggtggctgggtgcctctcgtcatggatgacgtcaaagtggccacacacgagaaggagtggaagtgtaccaacacgctggcttgtctcaacctggataccatggcctgggagaccatcctgatggatacactggaggacaacatcccccgtgctcgggctggccactgcgcagtcgccatcaacacccgcctgtacatttggagtgggcgtgacggctaccgcaaggcctggaacaaccaggtctgctgcaaggacctctggtacctagagacagaaaagccaccacccccagcccgagtacaactggtacgcgccaacaccaactccctggaggtgagctggggggcagtggcaacagccgacagctaccttctccagctccagaaatatgacattcctgccacggctgctactgccacctcccctacacccaatccggtcccatctgtgcctgccaaccctcccaagagccctgccccagcagcagccgcacctgctgtgcagccgctgacccaagtaggcatcacgctcctgccccaggctgcccccgcacccccgaccaccaccaccatccaggtcttgccaacggtgcctggcagctccatttctgtgcccaccgcagccaggactcaaggtgtccctgctgttctcaaagtgaccggtcctcaggctacaacaggaactccattggtcaccatgcgacctgccagccaggctgggaaagcccctgtcaccgtgacctcccttcccgccggagtgcggatggttgtgccaacacagagtgcccagggaacggtgattggcagtagcccacagatgagtgggatggccgcactggccgctgcggccgctgccacccagaagatccccccttcctcgcgacccacggtgctgagtgtcccagcgggtaccaccatcgtgaagaccatggctgtgacacctggcactaccaccctcccagccactgtgaaggtggcctcctcgccagtcatggtgagcgtgagcaaccctgccactcgcatgctgaagactgcagccgcccaggtggggacatcggtttcctccgccaccaacacgtctacccgccctatcatcacagtgcacaagtcaggcactgtgacagtggcccagcaagcccaggtggtgaccacagttgtgggcggggtcaccaagaccatcaccctggtgaagagccccatctctgtcccaggaggcagtgctctgatttccaatctgggcaaagtgatgtcggtggtccagaccaaaccagttcagacttcagcagtcacaggccaggcgtccacgggtcctgtgactcagatcatccagaccaaagggcccctgccagcgggaacaatcctgaagctggtgacctcagcagatggcaagcccaccaccatcatcactaccacgcaggccagtggggcggggaccaagcccaccatcctgggcatcagcagcgtctcccccagtaccaccaagcccggcacgaccaccatcatcaaaaccatccccatgtcggccatcatcacccaggcgggcgccacgggtgtgaccagcagtcctggcatcaagtcacccatcaccatcatcaccaccaaggtgatgacttcaggaactggagcacctgcgaaaatcatcactgctgtccccaaaattgccactggccacgggcagcagggagtgacccaggtggtgcttaagggggccccgggacagccaggcaccatcctccgcactgtgcccatggggggtgttcgcctggtcacacccgtcaccgtctccgccgtcaagccagccgtcaccacgttggttgtgaaaggcaccacaggtgtcacgaccctaggcacagtgacaggcaccgtctccaccagccttgccggggcggggggccacagcactagtgcttccctggccacgcccatcaccaccttgggcaccattgccaccctctcaagccaggtgatcaaccccactgccatcactgtgtcggccgcacagaccacgctgacagcggcaggcgggctcacaaccccgaccatcaccatgcagcccgtgtcccagcccacccaggtaactctgatcacggcacctagtggggtggaggcccagcctgtgcatgacctccctgtgtccattctggcctccccgactacagaacagcccaccgccacagttaccatcgccgactcaggccagggtgatgtgcagcctggcactgtcaccttggtgtgctccaacccaccctgtgagacccacgagactggcaccaccaacacggccaccactactgttgtggctaaccttgggggacacccccagcccacccaagtgcagttcgtctgtgacagacaggaggcagctgcttctcttgtgacctcgactgtgggccagcagaatggtagcgtggtccgagtctgttcgaacccgccctgcgagacccacgagacgggcaccaccaacaccgccaccaccgccacctccaacatggccgggcagcatggctgctcaaacccaccctgcgagacccacgagacgggcaccaccaacactgccactacagccatgtcgagcgtcggcgccaaccaccagcgagatgcccgtcgggcctgtgcagctggcacccctgccgtgatccggatcagtgtggccactggggcgctggaggcagcccagggctctaagccccagtgccaaacccgccagaccagcgcgaccagcaccaccatgactgtgatggccaccggggccccgtgctcggccggcccactccttgggccgagcatggcacgggagcccgggggccgcagccctgcttttgtgcagttggcccctctgagcagcaaagtcaggctgagcagcccaagcattaaggaccttcctgcggggcgccacagccatgcggtcagcaccgctgccatgacccgttccagcgtgggtgctggggagccccgcatggcacctgtgtgcgagagcctccagggtggctcgcccagcaccacagtgactgtgacagccctggaggcactgctgtgcccctcggccaccgtgacccaagtctgctccaacccaccatgtgagacccacgagacaggcaccaccaacaccgccactacctcgaatgcaggcagcgcccagagggtgtgctccaacccgccatgcgagacccacgagacgggcaccacccacacggccaccaccgctacttcaaacgggggcacgggccagcccgagggtgggcagcagccccctgctggtcgcccctgtgagacacaccagaccacttccactggcaccaccatgtcggtcagcgtgggtgccctgcttcccgacgccacttcttcccacaggaccgtggagtctggcctagaggtggcggcggcacccagcgtcaccccccaggctggcaccgcgctgctggctcctttcccaacacagagggtgtgctccaaccccccctgtgagacccacgagacgggcaccactcacacggccaccactgtcacttccaacatgagttcaaaccaagaccccccacctgctgccagcgatcagggagaggtggagagcacccagggcgacagcgtgaacatcaccagctccagtgccatcacgacaaccgtgtcctccacactgacgcgggctgtgaccaccgtgacgcagtccacaccggtcccgggcccctctgtgccgcccccagaggaactccaggtgtcgccaggtcctcgccagcagctgccaccacggcagcttctgcagtcggcttccacagccctgatgggggagtccgccgaggtcctgtcagcctcccagacccctgagctcccggccgccgtggatctgagcagcacaggggagccatcttcgggccaggagtctgccggctctgcggtggtggccactgtggtggtccagccacccccacccacacagtccgaagtagaccagttatcacttccccaagagctaatggccgaggcccaagctggcaccaccaccctcatggtaacggggctcacccccgaggagctggcagtgacggctgctgcagaagcagctgcccaggccgcagccacggaggaagcccaggccctggccatccaggcggtgctccaggccgcgcagcaggccgtcatgggcaccggcgagcccatggacacctccgaggcagcagcaaccgtgactcaggcggagctggggcacctgtcggccgagggtcaggagggccaggccaccaccatacccattgtgctgacacagcaggagctggctgccctggtgcagcagcagcagctgcaggaggcccaggcccagcagcagcatcaccacctccccactgaggccctggcccctgccgacagtctcaacgacccagccattgagagcaattgcctcaatgagctggccggcacggtccccagcactgtggcgctgctgccctcaacggccactgagagcctggctccatccaacacatttgtggccccccagccggttgtggtggccagcccagccaagctgcaggctgcagctaccctgaccgaagtggccaatggcatcgagtccctgggtgtgaagccagacctgccgcccccacccagcaaagcccccatgaagaaggaaaaccagtggtttgatgtgggagtcattaagggcaccaatgtaatggtgacacactatttcctgccaccagatgatgctgtcccatcagacgatgatttgggcaccgtccctgactataaccagctgaagaagcaggagctgcagccaggcacagcctataagtttcgtgttgccggaatcaatgcctgtgcgcgggggcccttcagcgaaatctcagcctttaagacgtgcctgcctggtttcccaggggccccttgtgccattaaaatcagcaaaagtccggatggtgctcacctcacctgggagccaccctctgtgacctccggcaagattatcgagtactccgtgtacctggccatccagagctcacaggctgggggcgagctcaagagctccaccccggcccagctggccttcatgcgggtgtactgcgggcccagcccctcctgcctggtgcagtcctccagcctttccaacgcccacatcgactacaccaccaagcccgccatcatcttccgcatcgccgcccgcaatgagaagggctatggcccggccacacaagtgaggtggctgcaggaaaccagtaaagacagctctggcaccaagccagccaacaagcggcccatgtcctctccagaaatgaaatctgctccaaagaaatctaaggccgatggtcagtgagaggaagctgactagcccctggattcttctccagacccccctgcttcaggaacacccgccagggcccacccctcccaccccgtcccagcattcgcacttcaccctcgcgagccgctgttcactcctctcccctttctctttctctctgtttttaaaataatctaaagaaagcacattttaccattgctgttgggaggaagcagaggcagatgggaaagcagagagaggagcgcgcttcctttcctccccgctgccgcccaccctggggagagacttttgcggggagggaaggcggacgtgaggacagccagctccccctcccaaggctgtgcgttcctgagggccaggtcgggggcaggcatggaggggaggaaaggcgtccctcttggccctccccagagtggctttcctggcaccctggcctgggtgtctggttctgttttcttttcttccccttgtgtttccagtcacctaacttcccttcctcaggctcccccggcccaccctgctcagtgaccccacaggaagcttacacattttctcagaggcctttgtgctcccacctcttctaccctccccctcttctttcccattttaaaaaagaaaagaaggaaaaagaaaaaaggggcaaggagccccgcggcggcctgggcagcgcctgtgcagacctccctgcaggccgcactgccaactgctgcatttgttgtgttttttaggttgcaattggtgaagttcacactttcattgtaattttagcgtgtggggttttgtcccttttttgttgttgttagctgtgtacagaatgtgtaatcttttttcttttctcttttttttgttttgttttgttttgtttttgtttttttacttttttcttcttggctaattcttggcagggatctttctggaggaaaagctggggccagccagggcaggagaggtgtgaaatctgccacgaggggcctgctgtttgccacccagcccaacttcctgttgctggcccctgccctctgcccttttgcctgtcctcaggccgctggaacaaaggaaggacagctcattcctcatgggcgatcactccgcatctatagggtcgagcctaggggagcttgagggagggctggggcctccttgtcctggatttccagctctccccatgccccctccctgagcaccaccggcaccgcctcccaaacagggctgctggtttccgcagccactgctccacctcccccaaatcgtcatggaaagggtggagaatggaggggaaccaggcgtccttggaggcagcttgggagggtgactgtgtagtgtcacccacaagggaggctagggcaatggagcaggccaccagcagcagctgtgcagcatggaactcaggccaggctccgaggctgggggatctgcttggagttttctgccccccaccccaaacttctgtcgaggagcaaggcttgccagcaagtcagaaggatttgaaccgagcagccaatctttccagccctcccctaccgacctctgcctggagacgcagcagcctgtgtcctccagggcctctggtttgttgtattatagtatatttcgctgtggaaaatgtcacgtttagtcaccttggagcccactcacctggtcctgttgttttaccccatcccttctctcgcgcgcctattgatttgtttctgaggagagtacaccgttcactattgtagagtaacccctgtgactcaatattaccatagtgcgatgtcgttttgtgctattttgaacaattaaaagactttttttgaaataa

SEQ ID NO: 1625 - protein, 1938 aa, Homo sapiens
MVEYGKYSNDLYELQASRWEWKRLKAKTPKNGPPPCPRLGHSFSLVGNKCYLFGGLANDSEDPKNNIPRYLNDLYILELRPGSGVVAWDIPITYGVLPPPRESHTAVVYTEKDNKKSKLVIYGGMSGCRLGDLWTLDIDTLTWNKPSLSGVAPLPRSLHSATTIGNKMYVFGGWVPLVMDDVKVATHEKEWKCTNTLACLNLDTMAWETILMDTLEDNIPRARAGHCAVAINTRLYIWSGRDGYRKAWNNQVCCKDLWYLETEKPPPPARVQLVRANTNSLEVSWGAVATADSYLLQLQKYDIPATAATATSPTPNPVPSVPANPPKSPAPAAAAPAVQPLTQVGITLLPQAAPAPPTTTTIQVLPTVPGSSISVPTAARTQGVPAVLKVTGPQATTGTPLVTMRPASQAGKAPVTVTSLPAGVRMVVPTQSAQGTVIGSSPQMSGMAALAAAAAATQKIPPSSRPTVLSVPAGTTIVKTMAVTPGTTTLPATVKVASSPVMVSVSNPATRMLKTAAAQVGTSVSSATNTSTRPIITVHKSGTVTVAQQAQVVTTVVGGVTKTITLVKSPISVPGGSALISNLGKVMSVVQTKPVQTSAVTGQASTGPVTQIIQTKGPLPAGTILKLVTSADGKPTTIITTTQASGAGTKPTILGISSVSPSTTKPGTTTIIKTIPMSAIITQAGATGVTSSPGIKSPITIITTKVMTSGTGAPAKIITAVPKIATGHGQQGVTQVVLKGAPGQPGTILRTVPMGGVRLVTPVTVSAVKPAVTTLVVKGTTGVTTLGTVTGTVSTSLAGAGGHSTSASLATPITTLGTIATLSSQVINPTAITVSAAQTTLTAAGGLTTPTITMQPVSQPTQVTLITAPSGVEAQPVHDLPVSILASPTTEQPTATVTIADSGQGDVQPGTVTLVCSNPPCETHETGTTNTATTTVVANLGGHPQPTQVQFVCDRQEAAASLVTSTVGQQNGSVVRVCSNPPCETHETGTTNTATTATSNMAGQHGCSNPPCETHETGTTNTATTAMSSVGANHQRDARRACAAGTPAVIRISVATGALEAAQGSKPQCQTRQTSATSTTMTVMATGAPCSAGPLLGPSMAREPGGRSPAFVQLAPLSSKVRLSSPSIKDLPAGRHSHAVSTAAMTRSSVGAGEPRMAPVCESLQGGSPSTTVTVTALEALLCPSATVTQVCSNPPCETHETGTTNTATTSNAGSAQRVCSNPPCETHETGTTHTATTATSNGGTGQPEGGQQPPAGRPCETHQTTSTGTTMSVSVGALLPDATSSHRTVESGLEVAAAPSVTPQAGTALLAPFPTQRVCSNPPCETHETGTTHTATTVTSNMSSNQDPPPAASDQGEVESTQGDSVNITSSSAITTTVSSTLTRAVTTVTQSTPVPGPSVPPPEELQVSPGPRQQLPPRQLLQSASTALMGESAEVLSASQTPELPAAVDLSSTGEPSSGQESAGSAVVATVVVQPPPPTQSEVDQLSLPQELMAEAQAGTTTLMVTGLTPEELAVTAAAEAAAQAAATEEAQALAIQAVLQAAQQAVMGTGEPMDTSEAAATVTQAELGHLSAEGQEGQATTIPIVLTQQELAALVQQQQLQEAQAQQQHHHLPTEALAPADSLNDPAIESNCLNELAGTVPSTVALLPSTATESLAPSNTFVAPQPVVVASPAKLQAAATLTEVANGIESLGVKPDLPPPPSKAPMKKENQWFDVGVIKGTNVMVTHYFLPPDDAVPSDDDLGTVPDYNQLKKQELQPGTAYKFRVAGINACARGPFSEISAFKTCLPGFPGAPCAIKISKSPDGAHLTWEPPSVTSGKIIEYSVYLAIQSSQAGGELKSSTPAQLAFMRVYCGPSPSCLVQSSSLSNAHIDYTTKPAIIFRIAARNEKGYGPATQVRWLQETSKDSSGTKPANKRPMSSPEMKSAPKKSKADGQ

SEQ ID NO: 1626 - DNA, 1999 bp, Homo sapiens
gccgggagcgccgctccagcgaggcgcgggctgtggggccgccgcgtgcctggccccgctcgcccgtgccggccgctcgcccgccatgcctggcttcgactacaagttcctggagaagcccaagcgacggctgctgtgcccactgtgcgggaagcccatgcgcgagcctgtgcaggtttccacctgcggccaccgtttctgcgatacctgcctgcaggagttcctcagtgaaggagtcttcaagtgccctgaggaccagcttcctctggactatgccaagatctacccagacccggagctggaagtacaagtattgggcctgcctatccgctgcatccacagtgaggagggctgccgctggagtgggccactacgtcatctacagggccacctgaatacctgcagcttcaatgtcattccctgccctaatcgctgccccatgaagctgagccgccgtgatctacctgcacacttgcagcatgactgccccaagcggcgcctcaagtgcgagttttgtggctgtgacttcagtggggaggcctatgagagccatgagggtatgtgcccccaggagagtgtctactgtgagaataagtgtggtgcccgcatgatgcggcggctgctggcccagcatgccacctctgagtgccccaagcgcactcagccctgcacctactgcactaaggagttcgtctttgacaccatccagagccaccagtaccagtgcccaaggctgcctgttgcctgccccaaccaatgtggtgtgggcactgtggctcgggaggacctgccaggccatctgaaggacagctgtaacaccgccctggtgctctgcccattcaaagactccggctgcaagcacaggtgccctaagctggcaatggcacggcatgtggaggagagtgtgaagccacatctggccatgatgtgtgccctggtgagccggcaacggcaggagctgcaggagcttcggcgagagctggaggagctatcagtgggcagtgatggcgtgctcatctggaagattggcagctatggacggcggctacaggaggccaaggccaagcccaaccttgagtgcttcagcccagccttctacacacataagtatggttacaagctgcaggtgtctgcattcctcaatggcaatggcagtggtgagggcacacacctctcactgtacattcgtgtgctgcctggtgcctttgacaatctccttgagtggccctttgcccgccgtgtcaccttctccctgctggatcagagcgaccctgggctggctaaaccacagcacgtcactgagaccttccaccccgacccaaactggaagaatttccagaagccaggcacgtggcggggctccctggatgagagttctctgggctttggttatcccaagttcatctcccaccaggacattcgaaagcgaaactatgtgcgggatgatgcagtcttcatccgtgctgctgttgaactgccccggaagatcctcagctgagtgcaggtggggttcgaggggaaaggacgatggggcatgacctcagtcaggcactggctgaacttggagagggggccggacccccgtcagctgcttctgctgcctaggttctgttaccccatcctccctcccccagccaccaccctcaggtgcctccaattggtgcttcagccctggcccctgtggggaacaggtcttggggtcatgaagggctggaaacaagtgaccccagggcctgtctcccttcttgggtagggcagacatgccttggtgccggtcacactctacacggactgaggtgcctgctcaggtgctatgtcccaagagccataagggggtgggaattggggagggagaaagggtagttcaaagagtctgtcttgagatctgattttttccccctttacctagctgtgccccctctggttatttatttccttagtgccaggagggcacagcaggggagccctgatttttaataaatccggaattgtatttatt

SEQ ID NO: 1627 - protein, 470 aa, Homo sapiens
MPGFDYKFLEKPKRRLLCPLCGKPMREPVQVSTCGHRFCDTCLQEFLSEGVFKCPEDQLPLDYAKIYPDPELEVQVLGLPIRCIHSEEGCRWSGPLRHLQGHLNTCSFNVIPCPNRCPMKLSRRDLPAHLQHDCPKRRLKCEFCGCDFSGEAYESHEGMCPQESVYCENKCGARMMRRLLAQHATSECPKRTQPCTYCTKEFVFDTIQSHQYQCPRLPVACPNQCGVGTVAREDLPGHLKDSCNTALVLCPFKDSGCKHRCPKLAMARHVEESVKPHLAMMCALVSRQRQELQELRRELEELSVGSDGVLIWKIGSYGRRLQEAKAKPNLECFSPAFYTHKYGYKLQVSAFLNGNGSGEGTHLSLYIRVLPGAFDNLLEWPFARRVTFSLLDQSDPGLAKPQHVTETFHPDPNWKNFQKPGTWRGSLDESSLGFGYPKFISHQDIRKRNYVRDDAVFIRAAVELPRKILS

SEQ ID NO: 1628 - DNA, 1183 bp, Homo sapiens
gccgggagcgccgctccagcgaggcgcgggctgtggggccgccgcgtgcctggccccgctcgcccgtgccggccgctcgcccgccatgcctggcttcgactacaagttcctggagaagcccaagcgacggctgctgtgcccactgtgcgggaagcccatgcgcgagcctgtgcaggtttccacctgcggccaccgtttctgcgatacctgcctgcaggagttcctcagtgaaggagtcttcaagtgccctgaggaccagcttcctctggactatgccaagatctacccagacccggagctggaagtacaagtattgggcctgcctatccgctgcatccacagtgaggagggctgccgctggagtgggccactacgtcatctacagggccacctgaatacctgcagcttcaatgtcattccctgccctaatcgctgccccatgaagctgagccgccgtgatctacctgcacacttgcagcatgactgccccaagcggcgcctcaagtgcgagttttgtggctgtgacttcagtggggaggcctatgagagccatgagagttctctgggctttggttatcccaagttcatctcccaccaggacattcgaaagcgaaactatgtgcgggatgatgcagtcttcatccgtgctgctgttgaactgccccggaagatcctcagctgagtgcaggtggggttcgaggggaaaggacgatggggcatgacctcagtcaggcactggctgaacttggagagggggccggacccccgtcagctgcttctgctgcctaggttctgttaccccatcctccctcccccagccaccaccctcaggtgcctccaattggtgcttcagccctggcccctgtggggaacaggtcttggggtcatgaagggctggaaacaagtgaccccagggcctgtctcccttcttgggtagggcagacatgccttggtgccggtcacactctacacggactgaggtgcctgctcaggtgctatgtcccaagagccataagggggtgggaattggggagggagaaagggtagttcaaagagtctgtcttgagatctgattttttccccctttacctagctgtgccccctctggttatttatttccttagtgccaggagggcacagcaggggagccctgatttttaataaatccggaattgtatttatt

SEQ ID NO: 1629 - protein, 198 aa, Homo sapiens
MPGFDYKFLEKPKRRLLCPLCGKPMREPVQVSTCGHRFCDTCLQEFLSEGVFKCPEDQLPLDYAKIYPDPELEVQVLGLPIRCIHSEEGCRWSGPLRHLQGHLNTCSFNVIPCPNRCPMKLSRRDLPAHLQHDCPKRRLKCEFCGCDFSGEAYESHESSLGFGYPKFISHQDIRKRNYVRDDAVFIRAAVELPRKILS

SEQ ID NO: 1630 - DNA, 2960 bp, Homo sapiens
tgatggtggaaatttcttgaaaccgctctcgtaatttgccacgtgctgttgcaaatattctggtgaatgaacacagaatcagcatggctttcctttgctgagaaatcactgatgggaagtgagacttgttaaacttgaaagtgaatggacctgagtggaccctttgatcacatcagtaaacatgagcggtaccaaacctgatattttatgggcaccacaccatgttgatagatttgttgtgtgtgactcagaactaagtctttatcatgtggaatctactgtgaattcagaactcaaagctggatctttacgtttatctgaagactctgcagctacattactgtcaataaattcagatacaccctatatgaaatgtgttgcctggtatcttaattatgatcctgaatgtctgctggcagttggacaagcaaatggtcgagttgtacttacaagccttggtcaagatcataactcaaagttcaaagatttgataggaaaagagtttgttccaaaacatgcacgacaatgtaatacccttgcctggaatccactggatagtaactggctagctgctggtttagataagcacagagctgacttttcagtgctaatatgggatatctgcagcaaatatactcctgatatagttcccatggaaaaagtgaaactttcagcaggtgaaactgaaacaacattattagtaacaaaaccactttatgagttaggacagaatgatgcttgtctgtctctttgttggcttccacgagaccagaaacttctccttgctggtatgcatcgtaacctagctatatttgatcttcggaatacaagccaaaagatgttcgtaaatacaaaagctgttcagggtgtgacggtagacccatatttccacgatcgtgttgcttccttctatgaaggtcaggttgcaatatgggatcttagaaaatttgagaagccagttttgacattgactgagcaaccaaaacccttaacaaaagtagcatggtgtcccactaggactggtctacttgccactttaacaagggatagtaatattattagattgtatgatatgcagcatacacccactcccattggggatgaaactgaacccacaataattgaaagaagtgtgcaaccttgtgacaattacattgcttcctttgcgtggcatccaacaagtcaaaatcgaatgatagttgtaactcccaaccgaacaatgtcagacttcactgtttttgaaaggatatctcttgcctggagcccaattacatctttaatgtgggcttgtggtcgtcatttatatgaatgtacggaagaagaaaatgataattctttagaaaaagatatagcaacgaagatgcgtcttcgggctttatcaaggtatggacttgatacagagcaggtgtggaggaaccacattttagctggaaatgaagatccacagctcaagtcactctggtatactctgcactttatgaagcaatacacagaagatatggatcagaaatctccaggcaacaaaggatcattggtttatgcaggaattaaatcaattgtaaagtcatcgttgggaatggtggaaagcagcagacataattggagtgggttggataagcaaagtgatattcaaaacttaaatgaagagagaatcttagctttacagctttgtgggtggataaagaaaggaacggatgtagacgtggggccatttttgaactcccttgtacaagaaggggaatgggaaagagctgctgctgtggcattgttcaacttggatattcgccgagcaatccaaatcctgaatgaaggggcatcttctgaaaaaggcaggagatctgaatctcaatgtggtagcaatggctttatcgggttatacggatgagaagaactccctttggagagaaatgtgtagcacactgcgattacagctaaataacccgtatttgtgtgtcatgtttgcatttctgacaagtgaaacaggatcttacgatggagttttgtatgaaaacaaagttgcagtacgtgacagagtggcatttgcttgtaaattccttagtgatactcagatacatcgaaaagttgaccaatgaaatgaaagaggctggaaatttggaaggaattttgcttacaggccttactaaagatggagtggacttaatggagagttatgttgatagaactggagatgttcaaacagcaagttactgtatgttacagggttcacctttagatgttcttaaagatgaaagggttcagtactggattgagaattatagaaatttattagatgcctggaggttttggcataaacgagctgaatttgatattcacaggagtaagttggatcccagttccaagcctttagcacaagtttttgtgagttgcaatttctgtggcaagtcaatctcctacagctgttcagctgtgcctcatcagggcagaggttttagtcagtatggtgtgagtggctcaccaacgaaatctaaagtcacaagttgtcctggctgtcgaaaaccacttcctcgatgtgcgctttgtctcattaatatgggaacaccagtttctagctgtcctggaggaaccaaatcagatgaaaaagtggacttgagcaaggacaaaaaattagcccaatttaacaactggtttacatggtgtcataattgcaggcacggtggacatgctggacatatgcttagttggttcagggaccatgcagagtgccctgtgtctgcatgcacgtgtaaatgtatgcagttggatacaacggggaatctggtacctgcagagactgtccagccataaaatgttaccaccttaagagaacccttcaagtgtggagctttctagtaggtgtccttcatagctcagaaacatacctcagaacaagccattcatgacttacctgtaatgggaaaataaatcattctatcagaaaaaaaaaaaaaaaaaaaaaaaaa

SEQ ID NO: 1631 - protein, 567 aa, Homo sapiens
MSGTKPDILWAPHHVDRFVVCDSELSLYHVESTVNSELKAGSLRLSEDSAATLLSINSDTPYMKCVAWYLNYDPECLLAVGQANGRVVLTSLGQDHNSKFKDLIGKEFVPKHARQCNTLAWNPLDSNWLAAGLDKHRADFSVLIWDICSKYTPDIVPMEKVKLSAGETETTLLVTKPLYELGQNDACLSLCWLPRDQKLLLAGMHRNLAIFDLRNTSQKMFVNTKAVQGVTVDPYFHDRVASFYEGQVAIWDLRKFEKPVLTLTEQPKPLTKVAWCPTRTGLLATLTRDSNIIRLYDMQHTPTPIGDETEPTIIERSVQPCDNYIASFAWHPTSQNRMIVVTPNRTMSDFTVFERISLAWSPITSLMWACGRHLYECTEEENDNSLEKDIATKMRLRALSRYGLDTEQVWRNHILAGNEDPQLKSLWYTLHFMKQYTEDMDQKSPGNKGSLVYAGIKSIVKSSLGMVESSRHNWSGLDKQSDIQNLNEERILALQLCGWIKKGTDVDVGPFLNSLVQEGEWERAAAVALFNLDIRRAIQILNEGASSEKGRRSESQCGSNGFIGLYG

SEQ ID NO: 1632 - DNA, 2373 bp, Homo sapiens
cccaggcccaccccacccagcacccctggcgcagggactgctggaacctggctgtgcgcgctgtcgctttaagacagactctgccggcgccgtccggagccttagaaaccggccccggatcgcgagccggagccggagccggagccggggccggccgggctgctgaggcccgagcggcaggagcgcagcgcggagcgctgagccaggcgcccagtcgcgagaagctgccgccgcctctgcccgcccggcgccgcagccccgggcggtccatggggcgggcacggcgtcgctgcaggcgccggcagccctggagggcagccgcttaggcgctgcgctcttgtccccgcaggtcgcagccagggcggcggggcgcgcccagccccggcccctggagcgcccgccgcggtccccacctccatggacgccttcaaggggggcatgagcctggagcggctgccggaggggctccggccgccgccgccgccaccccatgacatggggcccgccttccacctggcccggcccgccgacccccgcgagccgctcgagaactccgccagcgagtcgtctgacacggagctgccagagaaggagcgcggcggggaacccaaggggcccgaggacagtggtgcgggaggcacgggctgcggcggcgcagacgacccagccaagaagaagaagcagcggcggcaacgtacgcacttcacaagccagcagttgcaagagctagaggccacgttccagaggaaccgctaccccgacatgagcatgagggaggagatcgccgtgtggaccaacctcaccgagccgcgcgtgcgggtctggttcaagaaccggcgagccaagtggcgtaagcgcgagcgtaaccagcagctggacctgtgcaagggtggctacgtgccgcagttcagcggcctagtgcagccctacgaggacgtgtacgccgccggctactcctacaacaactgggccgccaagagcctggcgccagcgccgctctccaccaagagcttcaccttcttcaactccatgagcccgctgtcgtcgcagtccatgttctcagcacccagctccatctcctccatgaccatgccgtccagcatgggcccaggcgccgtgcctggcatgcccaactcgggcctcaacaacatcaacaacctcaccggctcctcgctcaactcggccatgtcgccgggcgcttgcccgtacggcactcccgcctcgccctacagcgtctaccgggacacgtgcaactcgagcctagccagcctgcggctcaagtccaaacagcactcgtcgtttggctacggcgccctgcagggcccggcctcgggcctcaacgcgtgccagtacaacagctgaccgccccgccgcaccacgcgggccggcggccggagcggggaagggcgcgggcgcggaggacgcacgcggggccccggctcgcaagccccagctcaccgcgccgcggacctcacacctgcgcagccccctcctcccacttcccactccgggttggttttgtgtttgcttttccggaccccactctgccctccaaaaagacaaaaaaaaaaaaaaaaaaaaaagcaaaaagacgtcggagaaaagtgccgcgaaaaaatggatgagttgcaatttctctcgggatggcgcgggtggtgtgtgtgtgttcccacgggccccggaggcccactccgcggagggcacgcggcgcggtaggcgagcgccgaggcccagcggccgggggaggacgacctcgtatcccgcgtccccgccgcgctggatccggactgagtggccgggcctgcggactggatgtgcggggcctggacttgcctaggatttcccgaccccgtacaaaccaagttgccctctccgagctaggcccggccgagagcgccttagctcgagtcggatccgtgttggggcgggcgttgggtttggggggacggtgcccccagcccaggatcgggcactcagtggagccgcacacggccccggcgcgcctggtagagcctcgctggccccgcgccccggagccctatattaaggccacggagcgacagcgggcagtgcgggcctggcgggaggtgggggaggtccatctcagaacaccccagccttgagcttagctgcaggcccaggccctctgctctgctcccgggctaggaggtggccctctgtctgggcgaacagccccctcctcaccgcccgccgtgcaagagtcgagccggcagagcaaggggcgcggccccagggccctgcgcccactttgcacacccgctctccggcccgcgcccctgtttacagcgtccctgtgtatgttggactgactgtaataaatctgtctatatcgactaaaaaaaaaaaaaaaaa

SEQ ID NO: 1633 - protein, 314 aa, Homo sapiens
MDAFKGGMSLERLPEGLRPPPPPPHDMGPAFHLARPADPREPLENSASESSDTELPEKERGGEPKGPEDSGAGGTGCGGADDPAKKKKQRRQRTHFTSQQLQELEATFQRNRYPDMSMREEIAVWTNLTEPRVRVWFKNRRAKWRKRERNQQLDLCKGGYVPQFSGLVQPYEDVYAAGYSYNNWAAKSLAPAPLSTKSFTFFNSMSPLSSQSMFSAPSSISSMTMPSSMGPGAVPGMPNSGLNNINNLTGSSLNSAMSPGACPYGTPASPYSVYRDTCNSSLASLRLKSKQHSSFGYGALQGPASGLNACQYNS

SEQ ID NO: 1634 - DNA, 2632 bp, Homo sapiens
atgggccccaagaggcgacagctgacgttccgggagaagtcacggatcatccaggaggtggaggagaatccggacctgcgcaagggcgagatcgcgcggcgcttcaacatcccgccgtccacgctgagcacgatcctgaagaacaagcgcgccatcctggcgtcggagcgcaagtacggggtggcctccacctgccgcaagaccaacaagctgtctccctacgacaagctcgagggcttgctcatcgcctggttccagcagatccgcgccgccggcctgccggtcaagggcatcatcctcaaggagaaggcgctgcgcatagccgaggagctgggcatggacgacttcaccgcctccaacggctggctggaccgcttccgccggcgccacggcgtggtgtcctgcagcggcgtggcccgcgcccgcgcgcgaaacgctgccccccgcaccccggcggcgcctgccagtccggccgcggtgccctcggagggcagtggcgggagcactactggttggcgcgctcgggaggagcagccgccgtcggtggccgagggctacgcctcgcaggacgtgttcagcgccaccgagaccagtctatggtacgacttcctgcccgaccaggccgcggggctgtgcggaggcgacggacggccgcgtcaagccacccagcgcctgagcgtcctgctatgcgccaatgccgacggcagcgagaagctgcccccgctggtggccggcaagtcggccaagccccgcgcaggccaagccggcctgccctgcgactacaccgccaactccaagggtggtgtcaccacccaggccctggccaagtacttgaaggccttggacacccgaatggctgcagagtctcgccgggtcctgctgttggccggccgcttggctgcccagtccttggacacctcgggcctgcggcatgtgcagctggccttcttccctcccggcaccgtgcatccgctggagaggggagtggtccagcaggtgaagggccactaccgccaggccatgctgctcaaggccatggccgcgctagagggccaggatccctcaggcctgcagctgggtctcacggaggccctgcactttgtggctgccgcctggcaggcagtggagccttcggacatagccgcctgctttcgtgaggctggctttgggggtggccctaatgccaccatcaccacttccctcaagagtgagggagaggaagaggaggaggaggaggaagaagaggaggaggaagagggtgaaggagaggaagaggaggaggaaggggaggaggaggaggaggaagggggggaaggagaggaattgggggaggaagaggaggtggaggaggagggtgatgttgatagtgatgaagaagaggaggaagatgaggagagctcctcggagggcttggaggctgaggactgggcccagggagtagtggaggccggtggcagcttcggggcttatggtgcccaggaggaagcccagtgccctactctgcatttcctggaaggtggggaggactctgattcagacagtgaggaagaggacgatgaggaagaggatgatgaagatgaagacgacgatgatgatgaggaggatggtgatgaggtgcctgtacccagctttggggaggccatggcttactttgccatggtcaagaggtacctgacctccttccccattgatgaccgcgtgcagagccacatcctccacttggaacacgatctggttcatgtgaccaggaagaaccacgccaggcaggcgggagttcgaggtcttggacatcaaagctgagtcactggacctagctgtgcccccaacctagattggcagcaccaccccagggcagaggactctctgggcacccgctgtgcatggagccagagtgcagagccccagatcctttagtaatgcttcccctggtcctgcaacaggcccggtcacctcggccgggcccggggctgaggtcagcctcactgcctgcttattgcctctttctcagaatcctctttcctccccatttggccctgggctcaggggaccaggtggggcgggtggggagctgtccggtgctaccacaccgtgccctcagtggactaaccacagcagcagccagggatgggccctggaggttcccggccggagagtgcctctcccctctgccatccacgtcaggtctttggtggggggaccccaaagccattctgggaagggctccagaagaaggtccagcctaggccccctgcaaggctggcagcccccacccccaccccccaggccgccttgagaagcacagtttaactcactgcgggctcctgagcctgcttctgcctgctttccacctccccagtccctttctctggccctgtccatgtgactttggcccttggttttctttccagattggaggtttccaagaggccccccaccgtggaagtaaccaagggcgcttccttgtgggcagctgcaggccccatgcctctcctccctctctggcagggccccatcctgggcagaggggcctggggctgggcccagagtccagccgtccagctgctcctttcccagtttgatttcaataaatctgtccactccccttttgtgggggtgaacgttttaacagcca

SEQ ID NO: 1635 - protein, 599 aa, Homo sapiens
MGPKRRQLTFREKSRIIQEVEENPDLRKGEIARRFNIPPSTLSTILKNKRAILASERKYGVASTCRKTNKLSPYDKLEGLLIAWFQQIRAAGLPVKGIILKEKALRIAEELGMDDFTASNGWLDRFRRRHGVVSCSGVARARARNAAPRTPAAPASPAAVPSEGSGGSTTGWRAREEQPPSVAEGYASQDVFSATETSLWYDFLPDQAAGLCGGDGRPRQATQRLSVLLCANADGSEKLPPLVAGKSAKPRAGQAGLPCDYTANSKGGVTTQALAKYLKALDTRMAAESRRVLLLAGRLAAQSLDTSGLRHVQLAFFPPGTVHPLERGVVQQVKGHYRQAMLLKAMAALEGQDPSGLQLGLTEALHFVAAAWQAVEPSDIAACFREAGFGGGPNATITTSLKSEGEEEEEEEEEEEEEEGEGEEEEEEGEEEEEEGGEGEELGEEEEVEEEGDVDSDEEEEEDEESSSEGLEAEDWAQGVVEAGGSFGAYGAQEEAQCPTLHFLEGGEDSDSDSEEEDDEEEDDEDEDDDDDEEDGDEVPVPSFGEAMAYFAMVKRYLTSFPIDDRVQSHILHLEHDLVHVTRKNHARQAGVRGLGHQS

SEQ ID NO: 1636 - DNA, 6452 bp, Homo sapiens
cgagcgagtgtcatggcggccggcgtcgagttggcaggagtaacccacggaactgaggaaagtcattagagctgagaaagaagtggcccaatctggacggtgggaattcgtgggaatgagcagaaggccctccgtagtgactgtgtcactagaggcgggcccctggtaaaattccaggccaggcctctgcgtttctaggcagaacctggagtcggccttgcctgagaacccagctttgtgttatcgtatcctgtctcgcgaaggcaggcgttcaaggatatttggtcggatcgcccggcggcgctaaacgttttcttttttccgagcggaccgggtcgttctctaaactcgccgcgatgtcgtcctggcttgggggcctcggctccggattgggccagtctctgggtcaagtcgggggcagcctggcttccctcactggccagatatcaaactttacaaaggatatgctgatggagggcacggaggaagtggaagcagaattacctgattctaggacaaaggaaattgaagccattcatgcaatcttgagatcagagaatgaaaggcttaagaaactttgtactgatctagaagagaaacatgaagcatcagagattcaaataaagcagcaatctacaagttaccgaaatcaacttcaacaaaaagaggtagaaatcagccatcttaaagccagacagattgcactccaggatcagttgctgaaactgcagtcagctgctcagtcagtaccttcaggagctggtgtaccagcaaccactgcatcatcttcattcgcttatgggattagtcatcatccttcagctttccatgacgatgacatggactttggtgatataatttcatcccaacaagaaataaaccgactctcaaatgaagtttcaagacttgagtctgaagttggccattggaggcatattgctcagacttccaaagcacaaggaacagataactctgatcaaagtgaaatatgtaaactacaaaatatcattaaggaactaaaacagaaccgaagtcaggaaattgatgaccatcaacatgaaatgtcagtactgcagaatgcacaccaacagaaattgacagaaataagtcgacgacatcgagaagaattaagtgactatgaagaacgaattgaagaacttgaaaatctgttacaacaaggtggctctggagttatagaaactgatctctctaaaatctatgagatgcaaaaaactattcaagttctacaaatagaaaaagtggagtctaccaaaaaaatggaacaacttgaggataaaataaaagatataaataaaaaattatcttctgcagaaaatgacagagatattttgaggagggaacaagaacagctaaatgtggaaaagagacaaataatggaagaatgtgaaaacttgaaattggaatgtagtaaattgcagccttctgctgtgaagcaaagtgatactatgacagaaaaggaaagaattcttgcccagagtgcatcagtggaagaagtgttcagactacaacaagcactgtctgatgccgaaaatgaaataatgagattgagtagtttaaaccaggataacagtcttgctgaagacaatctgaaacttaaaatgcgtatcgaagttttagaaaaagagaagtcattactgagtcaagaaaaggaagaacttcagatgtcacttttaaaattgaacaatgaatatgaagtaattaaaagtacagctacaagagacataagtttggattcagaattacatgacttaagacttaatttggaggcaaaggaacaagaactcaatcagagtattagtgaaaaggaaacactgatagctgagatagaagaattggacagacagaatcaagaagctacaaagcacatgattttgataaaagatcagctatcaaaacaacaaaatgaaggagatagcatcatcagtaaactgaaacaagatctaaatgatgaaaaaaagagagttcatcaacttgaagatgataaaatggacattactaaagagttagatgtacagaaagaaaagctaattcaaagtgaagtggccctaaatgatttacatttaaccaagcagaaacttgaggacaaagtagaaaatttagtagatcagctaaataaatcacaagaaagtaatgtaagcatccagaaggagaatttagaacttaaggagcatattagacaaaatgaggaggagctttctagaataaggaatgagttaatgcagtctctaaatcaagactctaatagtaattttaaggataccttacttaaagaaagagaagctgaagttagaaacttaaagcaaaatctttcagaattagaacagctcaatgaaaatttaaagaaagttgcttttgatgtcaaaatggaaaatgaaaagttagttttagcatgtgaagatgtgaggcatcagttagaagaatgtcttgctggtaacaatcagctttctctggaaaaaaacactattgtggagactctaaaaatggaaaaaggagagatagaggcagaattgtgttgggctaaaaagaggctgttggaagaagcaaacaagtatgagaaaaccattgaagaactgtcaaatgcacgtaatttgaatacctctgccttacagctggaacatgagcatttaattaaactcaatcaaaagaaagacatggaaatagcagaactcaaaaagaatattgaacaaatggatactgaccataaagaaactaaggacgttttgtcatctagtttagaagagcagaagcagttgacacaacttataaacaagaaagaaatttttattgaaaagcttaaagaaagaagttcaaagctgcaggaggaattggataaatattctcaggccttaagaaaaaatgaaattttaagacagaccatagaggaaaaagaccgaagtcttggatccatgaaagaggaaaataatcatctgcaagaagaattggaacgactcagggaagagcagagtcgaaccgcacctgtggctgaccctaaaacccttgatagtgttactgaactagcatctgaggtatctcaactgaacacgatcaaggaacatcttgaagaggaaattaaacatcatcaaaagataattgaagatcaaaaccagagtaagatgcaactacttcagtctttacaagagcaaaagaaggaaatggatgagtttagataccagcatgagcaaatgaacgccacacacacccagctctttttagagaaggatgaggaaattaagagtttgcaaaaaacaattgaacaaatcaaaacccagttgcatgaagaaagacaggacattcaaacagataactctgatatttttcaagaaacaaaagttcagagccttaatatagaaaatggaagtgaaaagcatgatttatctaaagctgaaacggaaagattagtgaaaggaataaaagagcgagaactggagattaaacttctaaatgaaaagaatatatctttaactaaacagattgatcagttgtccaaagatgaagttggtaaactaactcagattattcagcagaaagatttggagatacaagctcttcatgctagaatttcttcaacttcccatactcaagatgttgtttaccttcaacagcaactgcaggcttatgctatggaaagagaaaaggtatttgctgttttgaatgagaagactagggaaaatagccatctaaaaacagaatatcacaaaatgatggatattgttgctgccaaggaagcagctcttatcaaactgcaagatgaaaataaaaaattgtccactagatttgaaagtagtggccaagatatgtttagagaaactattcagaatttatcacgtatcattcgagaaaaagacatcgaaatagatgcactaagtcagaaatgtcagactttattggcagttttacaaacatccagcactggtaatgaggctggaggtgttaatagtcatcaatttgaggagcttctacaggaacgtgacaagttaaaacagcaagtaaagaaaatggaagagtggaagcagcaggtgatgaccacagtacaaaatatgcaacacgagtcagcccagcttcaggaagagcttcaccaacttcaagcacaggttttggttgacagtgataataattctaaattacaagtggactatactggcctgatccaaagttatgagcagaatgaaaccaaactcaaaaattttgggcaggaattagcacaagttcagcacagcattgggcagctttgcaataccaaggatcttcttttaggaaaacttgatattatttcaccccagctgtcttctgcatcattgcttactccccagtctgcagagtgtcttagagcaagtaagtctgaagtattgagtgaatcttctgaattgcttcagcaagagttagaagagctaagaaaatcactacaggaaaaagatgcaacaattagaactctccaggaaaataaccacagattgtctgattcgattgctgccacctcagagctagaaagaaaagaacacgaacaaaccgattcagaaatcaagcagctaaaggagaaacaagatgttttgcaaaagttacttaaggaaaaagacctcttaatcaaagccaaaagtgatcaactactttcttccaatgaaaatttcactaacaaagtaaatgaaaacgaacttttgaggcaggcagtaacaaacctgaaggagagaatattaattctagagatggacattggcaaactaaaaggagaaaatgaaaaaatagtggaaacatacaggggaaaggaaacagaatatcaagcgttacaagagactaacatgaagttttctatgatgctgcgagaaaaagagtttgagtgccactcaatgaaggagaaggctcttgcttttgaacagctattgaaagagaaagaacagggcaagactggagagttaaatcagcttttaaatgcagttaaatcaatgcaggagaagacagttgtgtttcaacaggagagagaccaagtcatgttggccctgaaacaaaaacaaatggaaaatactgccctacagaatgaggttcaacgtttacgtgacaaagaatttcgttcaaaccaagagctagagagattgcgtaatcatcttttagaatcagaagattcttatacccgtgaagctttggctgcagaagatagagaggctaaactaagaaagaaagtcacagtattggaggaaaagctagtttcatcctctaatgcaatggaaaatgcaagccatcaagccagtgtgcaggtagagtcattgcaagaacagttgaatgtagtttccaagcaaagggatgaaactgcgctgcagctttctgtctctcaggaacaagtaaagcagtatgctctgtcactggccaacctgcagatggtactagagcatttccaacaagaggaaaaagctatgtattctgctgaactcgaaaagcaaaaacagcttatagctgaatggaagaaaaacgcagaaaatctggaaggaaaagtgatatcattacaggaatgtttggatgaagcaaatgctgcattggattcagcatcaagacttacagaacagttagatgtaaaagaagaacaaattgaagaacttaaaagacaaaatgagctccgacaagaaatgctggatgatgtacaaaagaaattgatgagcttagcaaacagctcagaaggaaaagtagacaaagtcctaatgagaaacctcttcattggtcatttccacacaccgaaaaatcagcgtcatgaagtgttacggttaatggggagcatcctgggcgtcagaagggaggagatggagcagttgtttcatgacgatcagggcagtgttaccaggtggatgactgggtggcttggaggaggatcaaaaagtgttcccaacacacctttgagaccaaatcagcaatctgtggttaatagttctttttcagaactttttgttaaatttctagaaacagaatctcatccatccattccaccaccaaagctttctgttcatgatatgaaacctctggattcaccaggaagaagaaaaagagatacaaatgcaccagaaagttttaaagatacagcagaatccaggtctggtagaagaacagatgtaaatccgtttttggctcctcgctcggcagctgtacctcttattaacccagctggacttggacctggtgggcccgggcatcttcttctgaaacccatctcagatgttttgcccacatttacacctttgccagcgttacctgacaacagtgctggggttgtgctgaaagaccttttaaagcaatagatgattctcaagccagagacaatctagcactttaaagaaaccatgaacactatatgtatgtactttatcacaaagtggcctttggggagaaagtcatgtatttgttcgcaattatgctttctctgaatttaataaaaatattcctaatgcttttag

SEQ ID NO: 1637 - protein, 1979 aa, Homo sapiens
MSSWLGGLGSGLGQSLGQVGGSLASLTGQISNFTKDMLMEGTEEVEAELPDSRTKEIEAIHAILRSENERLKKLCTDLEEKHEASEIQIKQQSTSYRNQLQQKEVEISHLKARQIALQDQLLKLQSAAQSVPSGAGVPATTASSSFAYGISHHPSAFHDDDMDFGDIISSQQEINRLSNEVSRLESEVGHWRHIAQTSKAQGTDNSDQSEICKLQNIIKELKQNRSQEIDDHQHEMSVLQNAHQQKLTEISRRHREELSDYEERIEELENLLQQGGSGVIETDLSKIYEMQKTIQVLQIEKVESTKKMEQLEDKIKDINKKLSSAENDRDILRREQEQLNVEKRQIMEECENLKLECSKLQPSAVKQSDTMTEKERILAQSASVEEVFRLQQALSDAENEIMRLSSLNQDNSLAEDNLKLKMRIEVLEKEKSLLSQEKEELQMSLLKLNNEYEVIKSTATRDISLDSELHDLRLNLEAKEQELNQSISEKETLIAEIEELDRQNQEATKHMILIKDQLSKQQNEGDSIISKLKQDLNDEKKRVHQLEDDKMDITKELDVQKEKLIQSEVALNDLHLTKQKLEDKVENLVDQLNKSQESNVSIQKENLELKEHIRQNEEELSRIRNELMQSLNQDSNSNFKDTLLKEREAEVRNLKQNLSELEQLNENLKKVAFDVKMENEKLVLACEDVRHQLEECLAGNNQLSLEKNTIVETLKMEKGEIEAELCWAKKRLLEEANKYEKTIEELSNARNLNTSALQLEHEHLIKLNQKKDMEIAELKKNIEQMDTDHKETKDVLSSSLEEQKQLTQLINKKEIFIEKLKERSSKLQEELDKYSQALRKNEILRQTIEEKDRSLGSMKEENNHLQEELERLREEQSRTAPVADPKTLDSVTELASEVSQLNTIKEHLEEEIKHHQKIIEDQNQSKMQLLQSLQEQKKEMDEFRYQHEQMNATHTQLFLEKDEEIKSLQKTIEQIKTQLHEERQDIQTDNSDIFQETKVQSLNIENGSEKHDLSKAETERLVKGIKERELEIKLLNEKNISLTKQIDQLSKDEVGKLTQIIQQKDLEIQALHARISSTSHTQDVVYLQQQLQAYAMEREKVFAVLNEKTRENSHLKTEYHKMMDIVAAKEAALIKLQDENKKLSTRFESSGQDMFRETIQNLSRIIREKDIEIDALSQKCQTLLAVLQTSSTGNEAGGVNSHQFEELLQERDKLKQQVKKMEEWKQQVMTTVQNMQHESAQLQEELHQLQAQVLVDSDNNSKLQVDYTGLIQSYEQNETKLKNFGQELAQVQHSIGQLCNTKDLLLGKLDIISPQLSSASLLTPQSAECLRASKSEVLSESSELLQQELEELRKSLQEKDATIRTLQENNHRLSDSIAATSELERKEHEQTDSEIKQLKEKQDVLQKLLKEKDLLIKAKSDQLLSSNENFTNKVNENELLRQAVTNLKERILILEMDIGKLKGENEKIVETYRGKETEYQALQETNMKFSMMLREKEFECHSMKEKALAFEQLLKEKEQGKTGELNQLLNAVKSMQEKTVVFQQERDQVMLALKQKQMENTALQNEVQRLRDKEFRSNQELERLRNHLLESEDSYTREALAAEDREAKLRKKVTVLEEKLVSSSNAMENASHQASVQVESLQEQLNVVSKQRDETALQLSVSQEQVKQYALSLANLQMVLEHFQQEEKAMYSAELEKQKQLIAEWKKNAENLEGKVISLQECLDEANAALDSASRLTEQLDVKEEQIEELKRQNELRQEMLDDVQKKLMSLANSSEGKVDKVLMRNLFIGHFHTPKNQRHEVLRLMGSILGVRREEMEQLFHDDQGSVTRWMTGWLGGGSKSVPNTPLRPNQQSVVNSSFSELFVKFLETESHPSIPPPKLSVHDMKPLDSPGRRKRDTNAPESFKDTAESRSGRRTDVNPFLAPRSAAVPLINPAGLGPGGPGHLLLKPISDVLPTFTPLPALPDNSAGVVLKDLLKQ

SEQ ID NO: 1638 - DNA, 2994 bp, Homo sapiens
ggcacgaggaaacctctaggtccaccacctccatcttacacgtgtttccgttgtggtaaacctggacattatattaagaattgcccaacaaatggggataaaaactttgaatctggtcctaggattaaaaagagcactggaattcccagaagttttcatgatggaagtgaaagatcctaatatgaaaggtgcaatgcttaccaacactggaaaatatgcaataccaactatagatgcagaagcatatgcaattgggaagaaagagaaacctcccttcttaccagaggagccatcttcttcctcagaagaagatgatcctatcccagatgaattgttgtgtctcatctgcaaggatattatgactgatgctgttgtgattccctgctgtggaaacagttactgtgatgaatgtataagaacagcactcctggaatcagatgagcacacatgtccgacgtgtcatcaaaatgatgtttctcctgatgctttaattgccaataaatttttacgacaggctgtaaataacttcaaaaatgaaactggctatacaaaaagactacgaaaacagttacctcctccaccacccccaataccacctccgagaccactgattcagaggaacctacaacctctgatgagatctccgatatcaagacaacaagatcctcttatgattccagtgacatcttcatcaactcacccagctccgtctatatcttcattaacttctaatcagtcttccttggcccctcctgtgtctggaaatccgtcttctgctccagctcctgtacctgatataactgcaacagtatccatatcagttcattcagaaaaatcagatggaccttttcgggattctgataataaaatattgccagctgcagctcttgcatcagagcactcaaagggaacctcctcaattgcaattaccgctcttatggaagagaagggttaccaggtgcctgttcttggaaccccatctttgcttggacagtcattattgcatggacagttgatccccacaactggtccagtaagaataaatactgctcgtccaggtggtggtcgaccaggctgggaacattccaacaaacttggctatctggtttctccaccacaacaaattagaagaggggagaggagctgctacagaagtataaaccgtgggcgacaccacagcgaaagatcacagaggactcaaggcccgtcactaccagcaactccagtctttgtacctgttccaccacctcctttgtatccgcctcctccccatacacttcctctccctccgggtgttcctcctccacagttttctcctcagtttcctcctggccagccaccacccgctgggtatagtgtccctcctccagggtttcctccagctcctgccaatttatcaacaccttgggtatcatcaggagtgcagacagctcattcaaataccatcccaacaacacaagcaccacctttgtccagggaagaattctatagagagcagcgacgactaaaagaagaggaaaagaaaaagtccaagctagatgagtttacaaatgattttgctaaggaattgatggaatacaaaaagattcaaaaggagcgtaggcgctcattttccaggtctaaatctccctatagtggttcttcgtattcaagaagttcatatacttattctaaatcaagatctgggtcaacacgttcacgctcttattctcgatcattcagccgctcacattctcgttcctattcacggtcacctccataccccagaagaggcagaggcaagagccgcaattaccgttcacggtctagatctcatggatatcatcgatctaggtcaaggtcacccccttacagacgctatcattcacgatcaagatctcctcaagcgtttaggggacagtctcctaataaacgtaatgtacctcaaggggaaacagaacgtgaatattttaatagatacagagaagttccaccaccatatgacatgaaagcatattatgggagaagtgttgactttagagacccatttgaaaaagaacgctaccgagaatgggagagaaaatatagagagtggtatgaaaaatattataaaggttatgctgctggagcacagcctagaccctcagcaaatagagagaacttttctccagagagatttttgccacttaacatcaggaattctcccttcacaagaggccgcagagaagactatgttggtgggcaaagtcatagaagtcgaaacataggtagcaactatccagaaaagctttcagcaagagatggtcacaatcagaaggataatacaaagtcaaaagagaaggagagtgaaaacgctccaggagatggtaaaggaaataagcataagaaacacagaaaaagaagaaaaggggaggaaagtgagggttttctgaacccagagttattagagacttctaggaaatcaagagaacctacaggtgttgaagaaaataaaacagactcattgtttgttctcccaagtagagatgatgccacacctgttagagatgaaccaatggatgcagaatcaatcacttttaaatcagtgtctgaaaaagacaagagagaaagggataaaccaaaagcaaagggtgataaaaccaaacggaagaatgatggatctgctgtgtccaaaaaagaaaatattgtaaaacctgctaaaggaccccaagaaaaagtagatggagacgtgagagatctcctcgatctgaacctccaattaaaaaagccaaagaggagactccgaagactgacaatactaaatcatcatcttcctctcagaaggatgaaaaaatcactggaacccccagaaaagctcactctaaatcagcaaaagacaccaagaaacaaaaccagtcaaagaggaaaaagtgaagaaggactattccaaagatgtcaaatcagaaaagctaacaactaaggaagaaaaggccaagaagcctaatgagaaaaacaaaccacttgataataagggag

SEQ ID NO: 1639 - protein, 948 aa, Homo sapiens
MGIKTLNLVLGLKRALEFPEVFMMEVKDPNMKGAMLTNTGKYAIPTIDAEAYAIGKKEKPPFLPEEPSSSSEEDDPIPDELLCLICKDIMTDAVVIPCCGNSYCDECIRTALLESDEHTCPTCHQNDVSPDALIANKFLRQAVNNFKNETGYTKRLRKQLPPPPPPIPPPRPLIQRNLQPLMRSPISRQQDPLMIPVTSSSTHPAPSISSLTSNQSSLAPPVSGNPSSAPAPVPDITATVSISVHSEKSDGPFRDSDNKILPAAALASEHSKGTSSIAITALMEEKGYQVPVLGTPSLLGQSLLHGQLIPTTGPVRINTARPGGGRPGWEHSNKLGYLVSPPQQIRRGERSCYRSINRGRHHSERSQRTQGPSLPATPVFVPVPPPPLYPPPPHTLPLPPGVPPPQFSPQFPPGQPPPAGYSVPPPGFPPAPANLSTPWVSSGVQTAHSNTIPTTQAPPLSREEFYREQRRLKEEEKKKSKLDEFTNDFAKELMEYKKIQKERRRSFSRSKSPYSGSSYSRSSYTYSKSRSGSTRSRSYSRSFSRSHSRSYSRSPPYPRRGRGKSRNYRSRSRSHGYHRSRSRSPPYRRYHSRSRSPQAFRGQSPNKRNVPQGETEREYFNRYREVPPPYDMKAYYGRSVDFRDPFEKERYREWERKYREWYEKYYKGYAAGAQPRPSANRENFSPERFLPLNIRNSPFTRGRREDYVGGQSHRSRNIGSNYPEKLSARDGHNQKDNTKSKEKESENAPGDGKGNKHKKHRKRRKGEESEGFLNPELLETSRKSREPTGVEENKTDSLFVLPSRDDATPVRDEPMDAESITFKSVSEKDKRERDKPKAKGDKTKRKNDGSAVSKKENIVKPAKGPQEKVDGDVRDLLDLNLQLKKPKRRLRRLTILNHHLPLRRMKKSLEPPEKLTLNQQKTPRNKTSQRGKSEEGLFQRCQIRKANN

SEQ ID NO: 1640 - DNA, 2765 bp, Homo sapiens
ggcacgagggaaagggagtgttcgggtttcgctggggcctcgcggctccagagcccagcatggcttcctcgcgagcctcttccacgcaggcaaccaaaactaaagcacccgacgacttagttgctccggtcgtgaagaaaccacacatctattatggaagtttggaagagaaggagagggagcgtctggccaaaggagagtctgggattttggggaaagacggacttaaagcagggatcgaagctggaaatattaatataacctctggagaagtgtttgaaattgaagagcatatcagcgagcgacaggcagaagtattggctgagtttgagagaaggaagcgagcccggcagatcaatgtttccacagatgactcagaggtcaaagcttgccttagagccttgggggaacccatcacactttttggagagggtcctgctgaaagaagagaaaggttaagaaatatcctctcagttgtcggtactgatgccttgaaaaagaccaaaaaggatgatgagaagtctaaaaagtccaaagaagagtatcagcaaacctggtatcatgaaggaccaaatagcttgaaggtggcaagactatggattgctaattattcgttgcccagggcaatgaaacgcttggaagaggcccgactccataaggagattcctgagacaacaaggacctcccagatgcaagagctgcacaagtctctccggtctttgaataatttttgcagtcagattggggatgatcggcctatctcctactgtcactttagtcccaattccaagatgctggccacagcttgttggagtgggctttgcaagctctggtctgttcctgattgcaacctccttcacactcttcgagggcataacacaaatgtaggagcaattgtattccatcccaaatccactgtctccttggacccaaaagatgtcaacctggcctcttgtgcggctgatggctctgtgaagctttggagtctcgacagtgatgaaccagtggcagatattgaaggccatacagtgcgtgtggcgcgggtaatgtggcatccttcaggacgtttcctgggcaccacctgctatgaccgttcatggcgcttatgggatttggaggctcaagaggagatcctgcatcaggaaggccatagcatgggtgtgtatgacattgccttccatcaagatggctctttggctggcactgggggactggatgcatttggtcgagtttgggacctacgcacaggacgttgtatcatgttcttagaaggccacctgaaagaaatctatggaataaatttctcccccaatggctatcacattgcaaccggcagtggtgacaacacctgcaaagtgtgggacctccgacagcggcgttgcgtctacaccatccctgctcatcagaacttagtgactggtgtcaagtttgagcctatccatgggaacttcttgcttactggtgcctatgataacacagccaagatctggacgcacccaggctggtccccgctgaagactctggctggccacgaaggcaaagtgatgggcctagatatttcttccgatgggcagctcatagccacttgctcatatgacaggaccttcaagctgtggatggctgaatagatgacaatgggaaaaggacttgaacctcaagctctctctaaggagctgttttcctcaaacgagaagaattgaagtgtttagttctatcatgttttctgccaattaccatgcatagaccctcagtagaattggatttccatgtcagcccccactccaggaaggcagcccaatccctaggtgatggggaacccctctcacggttgaaaatttattacctttttacgccctgccacgaactgtgtagacattgtttttattaatcttttgtttggccgggcgtggtggctcacgcctgtaatcctagcactttgggaggccgaggtgggtagatcgcttgagctcaggagttcaagacgagcctgggcaacatggcaaatgccgtctctgcaaaaaaatactaaaattagctggtcgcggtggcttctgcctgtgattccggctacttgggaggctgaggtgggagggattgcttaagcctgggaggcagaggttgcagtgagccgagattgcgccattgcactctagcctgtgtgacagagcaagaccctgtctcaaaaaaaaaaaaaatttgttcgaatgccttatagccttcctcacagcacccaggattgtgactgactctgcatttttaattcttgaaacttggctttccataacatggtacatgcttcaggactacatatgacccagagagcaaggtggctgaactatagtctggaagccctcaggtaaagaggcacatctcaccactcattggttaaacaatgcatcatagcgagcacttttcctttccctggagaatgggatgtgaagcagtagaccgcagccacgccgatggttatacagtgaagaagacttcacctcttcctattgagtttgcttggaatgctgacagcatcaggcaactctgaactgaacatttgctttgtcagaaaatatctttttttttactttgaagtttggcaaccttcatgttaccccaaagcaaaaccattgtgtcaggagtcaaacaaatgtttagaaagcaaacatgacgtctctattgtacaacctcctttctcttggctgtttaaaggatgtacttcgtgtattaaagggtactttatgttgaagtaaaaaaaaaaaaaaaaaaaaaaa

SEQ ID NO: 1641 - protein, 522 aa, Homo sapiens
MASSRASSTQATKTKAPDDLVAPVVKKPHIYYGSLEEKERERLAKGESGILGKDGLKAGIEAGNINITSGEVFEIEERISERQAEVLAEFERRKRARQINVSTDDSEVKACLRALGEPITLFGEGPAERRERLRNILSVVGTDALKKTKKDDEKSKKSKEEYQQTWYHEGPNSLKVARLWIANYSLPRAMKRLEEARLHKEIPETTRTSQMQELHKSLRSLNNFCSQIGDDRPISYCHFSPNSKMLATACWSGLCKLWSVPDCNLLHTLRGHNTNVGAIVFHPKSTVSLDPKDVNLASCAADGSVKLWSLDSDEPVADIEGHTVRVARVMWHPSGRFLGTTCYDRSWRLWDLEAQEEILHQEGHSMGVYDIAFHQDGSLAGTGGLDAFGRVWDLRTGRCIMFLEGHLKEIYGINFSPNGYHIATGSGDNTCKVWDLRQRRCVYTIPAHQNLVTGVKFEPIHGNFLLTGAYDNTAKIWTHPGWSPLKTLAGHEGKVMGLDISSDGQLIATCSYDRTFKLWMAE

SEQ ID NO: 1642 - DNA, 2593 bp, Homo sapiens
gtggggacgcaggatggcggcagcagtggcggacgaggcggtggcgcgcgatgtgcagcggttgctagtgcagttccaggatgagggcgggcagctgctgggttccccgttcgacgtgcccgtggacatcaccccggacaggctgcagctcgtgtgcaacgcgctactggcccaggaggatcccctgccactggctttctttgtccacgatgctgagatcgtctcctcactggggaagacgttggagtcccaggcagtggagacagagaaggtcctagacatcatctaccagccacaggctatcttcagagtccgggctgtgactcgctgcaccagctccttggagggtcacagtgaggcagtcatttctgtggccttcagccctacgggaaagtacctggccagtggctctggagacaccaccgtgcgcttctgggatctcagcacagagacaccacatttcacatgcaagggacacagacactgggtccttagtatatcctggtctccagatggcaagaagctggcctcaggctgcaagaatggccagattctcctctgggacccaagcacagggaagcaggtgggcaggaccctcgctggccacagcaagtggatcacaggcctgagctgggagcccctccatgcgaaccctgagtgccgctatgtggccagcagctccaaggatggcagtgtgcggatctgggacacaactgcaggccgctgtgagcgcatcctcaccgggcacacccagtcggtcacctgtctccggtggggaggggacgggcttctctactctgcctcccaggaccgcaccatcaaagtctggagagctcatgacggtgtgctgtgccggactctgcaaggccacggccactgggtgaacaccatggccctcagcactgactatgccctgcgcactggggcctttgaacctgctgaggcctcagttaatccccaagacctccaaggatccttgcaggagttgaaggagagggctctgagccgatacaacctcgtgcggggccagggtccagagaggctggtgtctggctccgacgacttcaccttattcctgtggtccccagcagaggacaaaaagcctctcactcggatgacaggacaccaagctctcatcaaccaggtgctcttctctcctgactcccgcatcgtggctagtgcctcctttgacaagtccatcaagctgtgggatggcaggacgggcaagtacctggcttccctacgcggccacgtggctgccgtgtaccagattgcgtggtcagctgacagtcggctcctggtcagcggcagcagtgacagcacactgaaggtgtgggatgtgaaggcccagaagctggccatggacctgcccggccacgcggatgaggtatatgctgttgactggagtccagatggccagagagtggcaagtggtgggaaggacaaatgcctccggatatggaggagatgagacggcccgaagttctctctgacccccacctcgactcggcctctgccagctgccttccctgccagagaacaaaggctgagatggcagtgcacacaccctccccaccagtggggacctgagaatgcgtgtggcctgctgtcctcgatagaccggaatggggttttcccacagatccccgcctgtggcacaccccagagccagaaatcgaaggtcacaggaagttgtcactgaacttggcccgtgtctgctactctgtaccttgctggtacagacaggggtggtgggcagccaggctctatgagtgggcccctagtgtcagctctgtacagggtcagatcccaggttctatgaccaaataagtaacttaagttttgtgtgttgggttctaattccttgtcctagaatccccatgactcaatcaaggactgtgctaaatgagattgtccagcccccgcccttgcactggactacgccaaaaccacactgaccaggcacttgccttccctctcttcccccgtgttggtaagagagaggccagttgtgatagtggccaaggagaatctagggctgtattgttgtccactgcagtaggcaccggccacatgtgactgctggcatgaaatagaagtgcagttcctccatcgcactgggtaaggcctccagtattggacagcacacagaaaggttttcatcatcaagagagttctgctggtcagccctgctccaggggatgcctctgccttcgcatagcacactgcttgaggccctgccaggcaccaagcactgccctgggcccatgggatagagcggggaaggtgatggctcttccagaggattccctcagatggggaggcagcagtatgagctctgagcagaagtgggtattgttgatacagaggaagttctttgccacgagaactttcaagcagtgaaaggaattcccatcaggactcagaccccaggccgagatcttgccctgaatgtaccctgcctctgctttctcctgcatcccatgctaagcagggtcatggtctgaactactcagattggatttccaaaccatccttgtataaactgctcagaactaaaaaaaaaaaaaaaaaaaaaaaaaaaaaaaaaaaa

SEQ ID NO: 1643 - protein, 485 aa, Homo sapiens
MAAAVADEAVARDVQRLLVQFQDEGGQLLGSPFDVPVDITPDRLQLVCNALLAQEDPLPLAFFVHDAEIVSSLGKTLESQAVETEKVLDIIYQPQAIFRVRAVTRCTSSLEGHSEAVISVAFSPTGKYLASGSGDTTVRFWDLSTETPHFTCKGHRHWVLSISWSPDGKKLASGCKNGQILLWDPSTGKQVGRTLAGHSKWITGLSWEPLHANPECRYVASSSKDGSVRIWDTTAGRCERILTGHTQSVTCLRWGGDGLLYSASQDRTIKVWRAHDGVLCRTLQGHGHWVNTMALSTDYALRTGAFEPAEASVNPQDLQGSLQELKERALSRYNLVRGQGPERLVSGSDDFTLFLWSPAEDKKPLTRMTGHQALINQVLFSPDSRIVASASFDKSIKLWDGRTGKYLASLRGHVAAVYQIAWSADSRLLVSGSSDSTLKVWDVKAQKLAMDLPGHADEVYAVDWSPDGQRVASGGKDKCLRIWRR

SEQ ID NO: 1644 - DNA, 1080 bp, Homo sapiens
cctattctacggctgacccctggtggtcacgtggatctgttcgccacgcaagtctgggtccttcggcgattgaccggggtccttgctgttcgggagcctctcctaagctgcctgttcgcgcgagagtttggaggggcgggtttggggtcggtgtctgattggggctcgcaccgcagcacgctggagtcccgcttaggtaccagttagcgtcaggggagctgggtcaggcggtcgccgggacaccccgtgtgtggcaggcggcgaagcgctctggagaatcccggacagccctgctccctgcagccaggtgtagtttcgggagccactggggccaaagtgagagtccagcggtcttccagcgcttgggccacggcggcggccctgggagcagaggtggagcgaccccattacgctaaagatgaaaggctggggttggctggccctgcttctgggggccctgctgggaaccgcctgggctcggaggagccaggatctccactgtggagcatgcagggctctggtggatgaactagaatgggaaattgcccaggtggaccccaagaagaccattcagatgggatctttccggatcaatccagatggcagccagtcagtggtggaggtgccttatgcccgctcagaggcccacctcacagagctgctggaggagatatgtgaccggatgaaggagtatggggaacagattgatccttccacccatcgcaagaactacgtacgtgtagtgggccggaatggagaatccagtgaactggacctacaaggcatccgaatcgactcagatattagcggcaccctcaagtttgcgtgtgagagcattgtggaggaatacgaggatgaactcattgaattcttttcccgagaggctgacaatgttaaagacaaactttgcagtaagcgaacagatctttgtgaccatgccctgcacatatcgcatgatgagctatgaaccactggagcagcccacactggcttgatggatcacccccaggaggggaaaatggtggcaatgccttttatatattatgtttttactgaaattaactgaaaaaatatgaaacc

SEQ ID NO: 1645 - protein, 182 aa, Homo sapiens
MKGWGWLALLLGALLGTAWARRSQDLHCGACRALVDELEWEIAQVDPKKTIQMGSFRINPDGSQSVVEVPYARSEAHLTELLEEICDRMKEYGEQIDPSTHRKNYVRVVGRNGESSELDLQGIRIDSDISGTLKFACESIVEEYEDELIEFFSREADNVKDKLCSKRTDLCDHALHISHDEL

SEQ ID NO: 1646 - DNA, 3761 bp, Homo sapiens
ggctgcaatatggcggaggcggaaggggaaagcctggagtcctggctcaataaagccaccaatccttccaaccgccaggaggactgggaatacataattggcttctgtgatcagatcaacaaggagctggaagggccacagatcgccgtccgactgctggcccacaagatccagtccccacaggaatgggaggcgctccaggccctgacgtacctgggggacagggtgtctgagaaagtgaagaccaaggttattgagctgctgtacagctggaccatggccctgccagaagaagcaaagatcaaagacgcctaccacatgctgaagagacagggcatagtgcagtctgacccaccaattcctgtggataggacgctgatcccctctccaccacctcgtcccaaaaaccctgtttttgatgatgaggagaagtccaagcttttagccaagctgctgaaaagcaaaaacccagatgacctgcaggaggccaacaagctcatcaagtccatggtgaaggaagacgaggcacggatccagaaggtgaccaagcgtctgcacacgttagaggaagttaacaacaacgtgagactgctcagtgagatgctgcttcattacagccaggaggactcttcggacggggacagagagctgatgaaggagctgtttgatcagtgtgagaacaagaggcggactttatttaaactcgccagtgagactgaggacaatgataacagtttgggggacatcctgcaagccagtgacaacctctcccgggtcatcaactcttacaaaacaattattgaagggcaggtcatcaatggcgaggtggctaccttaaccctgcctgactcggaaggaaacagtcagtgcagtaaccaaggcacgctcatcgaccttgcggagctggacacgaccaacagtttgtcctccgtgttggccccagcacctactccaccctcctcaggcatcccaatcctccctccaccaccccaggcctcaggacctccacggagccgctcctctagccaggccgaggccaccctggggcccagcagcacaagcaacgccctctcctggctggacgaggagctactctgcttgggcctcgccgacccagcccctaatgttcctcccaaagagtcagctgggaacagccagtggcacctgctccagagggaacagtccgacctggacttcttcagccccaggccggggaccgctgcctgtggcgcctccgatgctcctctgctccagccctcagccccctcctcaagcagctcccaagctccactgccgcctcccttcccagctcctgtggtcccagccagtgttcctgcccccagtgcgggctcctccttgttttctactggagtggccccagccttggccccaaaagttgagcccgcagtccctgggcaccatggcttggcgttgggcaacagcgcgctgcaccacctggatgccctcgatcagcttctagaagaggccaaagtgacctcgggcttggtgaaacccactacctcccctctcatccccaccaccaccccagccaggcccctcctgcccttctccacggggcccggcagcccgctcttccagccactgagtttccagtcccagggcagccccccgaaggggcctgagctctccctggccagcatccacgtgcccctggaatcgatcaagcctagcagtgcccttcctgtgacagcctacgataaaaacggcttccgcatcctcttccactttgccaaggagtgtcccccaggacgacctgacgtgctggtggtggtggtgtccatgctgaacacggctcccttacctgtcaagagcatcgtgctgcaggctgcagtgcccaagtcaatgaaagtgaagttgcagccaccttctgggacagaactctctccatttagccccatccagccacctgcagccatcacccaggtcatgttgctggccaatccactgaaggagaaggtgcggcttcggtataagctgaccttcgccctgggggagcagctgagcacagaggtgggcgaggtggaccagttccctcctgtggaacagtgggggaacctatgaccccagaggacgctgtgatctccaccttgaagccaggcaggctgccctgagacgaggagggctctggtcccgtcactctccatgccctgacaacagtgcttgtagctttgatgtggaacaggggccctgggcatttctgctgagaaccaaactgctgctgtgataacctctcctttggcccctaaaaggacctgtttttatctacctgtgtgacttgaagtggccatatgctgtcaggggtgcggagtggcccctgacttcactgctgtcccgggaacatggacccccaggcttggcgtaggtgtttgcttccttctactggcattcactgaagccactggggtggggggtggggggtgggggtctctaaagagagactgtcatgggtcattccccacaagagccacatcctcacacctgacagatgcacggcccaaggggctgcagccctgttgcaattccatgcttcccccgccaaccagctcctgctgccatccccagggaggtggcccaggaaggtgcctggcccagaataaggaactggcatactgcaaagtccccagccctgcctctggtggacagcatcgtcctggaatggccacggagtgatgagttgtgtgcttgtccctggcagtggcaggctgtgtcctatggacatcttggcaggacatggaatttggcctcatgacaggcccaactagggataggaaggaaaatgaagagagccagtatttccccttctccagaagcaggtactcagctttctgggaaaagcgtgcctccagccgtggggacaggccatcctactgactacctcttgcttggcatgaaataaactgctatcctccccttggaatctaccgccactctacatcctactgctttggcctccctctcctctcaccagatggcatgtggtgtggcacctgtggctggacacaggaggcctcaggatcacaaatgttacactagacatatgtcctaatgtgctgcccagaaacctcaactgttccccagctactgaggggcactgtcagcgagatgttgggtctggaggtgatgagatcgggccacacttgagctgagtcaccagaccctattgcttcaacagtgcttggcccccgccagcttgtcccagccactctagctgctggatgtgatcctgggacatgtactccaagcctccgtcacaaaaaaaaaatcaccagctgccatagacacgggggaagcttgcggagcccaggtgaacaagctcagcaatcggacatctctggggaaaggaaggtggcacagaccatgttccctggttcctccctgccccttgccaggcttccttattccttactatgggaagaggtcatatcccttccctgcccctcgctgtctttagcaagcaggtttcactgcttcattagaagaggacaagtcaaaagtgaatcatttttcactacttaaggaataaatccaagagctttccagagactggctgctgcagccctgggaatgtctgtggaattactatgtggaaatggaactttgtgttatgctctagacattacagttatttgagtgttactcgttactgttgaggtcagtgcttcgtggcaaatggctgtactggatatcccagctctgctgcccttgttttgctgcatgttaaataaaaccattttcactgt

SEQ ID NO: 1647 - protein, 690 aa, Homo sapiens
MAEAEGESLESWLNKATNPSNRQEDWEYIIGFCDQINKELEGPQIAVRLLAHKIQSPQEWEALQALTYLGDRVSEKVKTKVIELLYSWTMALPEEAKIKDAYHMLKRQGIVQSDPPIPVDRTLIPSPPPRPKNPVFDDEEKSKLLAKLLKSKNPDDLQEANKLIKSMVKEDEARIQKVTKRLHTLEEVNNNVRLLSEMLLHYSQEDSSDGDRELMKELFDQCENKRRTLFKLASETEDNDNSLGDILQASDNLSRVINSYKTIIEGQVINGEVATLTLPDSEGNSQCSNQGTLIDLAELDTTNSLSSVLAPAPTPPSSGIPILPPPPQASGPPRSRSSSQAEATLGPSSTSNALSWLDEELLCLGLADPAPNVPPKESAGNSQWHLLQREQSDLDFFSPRPGTAACGASDAPLLQPSAPSSSSSQAPLPPPFPAPVVPASVPAPSAGSSLFSTGVAPALAPKVEPAVPGHHGLALGNSALHHLDALDQLLEEAKVTSGLVKPTTSPLIPTTTPARPLLPFSTGPGSPLFQPLSFQSQGSPPKGPELSLASIHVPLESIKPSSALPVTAYDKNGFRILFHFAKECPPGRPDVLVVVVSMLNTAPLPVKSIVLQAAVPKSMKVKLQPPSGTELSPFSPIQPPAAITQVMLLANPLKEKVRLRYKLTFALGEQLSTEVGEVDQFPPVEQWGNL

SEQ ID NO: 1648 - DNA, 3860 bp, Homo sapiens
ggctgcaatatggcggaggcggaaggggaaagcctggagtcctggctcaataaagccaccaatccttccaaccgccaggaggactgggaatacataattggcttctgtgatcagatcaacaaggagctggaagggccacagatcgccgtccgactgctggcccacaagatccagtccccacaggaatgggaggcgctccaggccctgacggtgctggaggcatgcatgaagaactgtgggaggagatttcataacgaagtggggaagttccgctttttgaatgagttaatcaaagtcgtctctccaaagtacctgggggacagggtgtctgagaaagtgaagaccaaggttattgagctgctgtacagctggaccatggccctgccagaagaagcaaagatcaaagacgcctaccacatgctgaagagacagggcatagtgcagtctgacccaccaattcctgtggataggacgctgatcccctctccaccacctcgtcccaaaaaccctgtttttgatgatgaggagaagtccaagcttttagccaagctgctgaaaagcaaaaacccagatgacctgcaggaggccaacaagctcatcaagtccatggtgaaggaagacgaggcacggatccagaaggtgaccaagcgtctgcacacgttagaggaagttaacaacaacgtgagactgctcagtgagatgctgcttcattacagccaggaggactcttcggacggggacagagagctgatgaaggagctgtttgatcagtgtgagaacaagaggcggactttatttaaactcgccagtgagactgaggacaatgataacagtttgggggacatcctgcaagccagtgacaacctctcccgggtcatcaactcttacaaaacaattattgaagggcaggtcatcaatggcgaggtggctaccttaaccctgcctgactcggaaggaaacagtcagtgcagtaaccaaggcacgctcatcgaccttgcggagctggacacgaccaacagtttgtcctccgtgttggccccagcacctactccaccctcctcaggcatcccaatcctccctccaccaccccaggcctcaggacctccacggagccgctcctctagccaggccgaggccaccctggggcccagcagcacaagcaacgccctctcctggctggacgaggagctactctgcttgggcctcgccgacccagcccctaatgttcctcccaaagagtcagctgggaacagccagtggcacctgctccagagggaacagtccgacctggacttcttcagccccaggccggggaccgctgcctgtggcgcctccgatgctcctctgctccagccctcagccccctcctcaagcagctcccaagctccactgccgcctcccttcccagctcctgtggtcccagccagtgttcctgcccccagtgcgggctcctccttgttttctactggagtggccccagccttggccccaaaagttgagcccgcagtccctgggcaccatggcttggcgttgggcaacagcgcgctgcaccacctggatgccctcgatcagcttctagaagaggccaaagtgacctcgggcttggtgaaacccactacctcccctctcatccccaccaccaccccagccaggcccctcctgcccttctccacggggcccggcagcccgctcttccagccactgagtttccagtcccagggcagccccccgaaggggcctgagctctccctggccagcatccacgtgcccctggaatcgatcaagcctagcagtgcccttcctgtgacagcctacgataaaaacggcttccgcatcctcttccactttgccaaggagtgtcccccaggacgacctgacgtgctggtggtggtggtgtccatgctgaacacggctcccttacctgtcaagagcatcgtgctgcaggctgcagtgcccaagtcaatgaaagtgaagttgcagccaccttctgggacagaactctctccatttagccccatccagccacctgcagccatcacccaggtcatgttgctggccaatccactgaaggagaaggtgcggcttcggtataagctgaccttcgccctgggggagcagctgagcacagaggtgggcgaggtggaccagttccctcctgtggaacagtgggggaacctatgaccccagaggacgctgtgatctccaccttgaagccaggcaggctgccctgagacgaggagggctctggtcccgtcactctccatgccctgacaacagtgcttgtagctttgatgtggaacaggggccctgggcatttctgctgagaaccaaactgctgctgtgataacctctcctttggcccctaaaaggacctgtttttatctacctgtgtgacttgaagtggccatatgctgtcaggggtgcggagtggcccctgacttcactgctgtcccgggaacatggacccccaggcttggcgtaggtgtttgcttccttctactggcattcactgaagccactggggtggggggtggggggtgggggtctctaaagagagactgtcatgggtcattccccacaagagccacatcctcacacctgacagatgcacggcccaaggggctgcagccctgttgcaattccatgcttcccccgccaaccagctcctgctgccatccccagggaggtggcccaggaaggtgcctggcccagaataaggaactggcatactgcaaagtccccagccctgcctctggtggacagcatcgtcctggaatggccacggagtgatgagttgtgtgcttgtccctggcagtggcaggctgtgtcctatggacatcttggcaggacatggaatttggcctcatgacaggcccaactagggataggaaggaaaatgaagagagccagtatttccccttctccagaagcaggtactcagctttctgggaaaagcgtgcctccagccgtggggacaggccatcctactgactacctcttgcttggcatgaaataaactgctatcctccccttggaatctaccgccactctacatcctactgctttggcctccctctcctctcaccagatggcatgtggtgtggcacctgtggctggacacaggaggcctcaggatcacaaatgttacactagacatatgtcctaatgtgctgcccagaaacctcaactgttccccagctactgaggggcactgtcagcgagatgttgggtctggaggtgatgagatcgggccacacttgagctgagtcaccagaccctattgcttcaacagtgcttggcccccgccagcttgtcccagccactctagctgctggatgtgatcctgggacatgtactccaagcctccgtcacaaaaaaaaaatcaccagctgccatagacacgggggaagcttgcggagcccaggtgaacaagctcagcaatcggacatctctggggaaaggaaggtggcacagaccatgttccctggttcctccctgccccttgccaggcttccttattccttactatgggaagaggtcatatcccttccctgcccctcgctgtctttagcaagcaggtttcactgcttcattagaagaggacaagtcaaaagtgaatcatttttcactacttaaggaataaatccaagagctttccagagactggctgctgcagccctgggaatgtctgtggaattactatgtggaaatggaactttgtgttatgctctagacattacagttatttgagtgttactcgttactgttgaggtcagtgcttcgtggcaaatggctgtactggatatcccagctctgctgcccttgttttgctgcatgttaaataaaaccattttcactgt

SEQ ID NO: 1649 - protein, 723 aa, Homo sapiens
MAEAEGESLESWLNKATNPSNRQEDWEYIIGFCDQINKELEGPQIAVRLLAHKIQSPQEWEALQALTVLEACMKNCGRRFHNEVGKFRFLNELIKVVSPKYLGDRVSEKVKTKVIELLYSWTMALPEEAKIKDAYHMLKRQGIVQSDPPIPVDRTLIPSPPPRPKNPVFDDEEKSKLLAKLLKSKNPDDLQEANKLIKSMVKEDEARIQKVTKRLHTLEEVNNNVRLLSEMLLHYSQEDSSDGDRELMKELFDQCENKRRTLFKLASETEDNDNSLGDILQASDNLSRVINSYKTIIEGQVINGEVATLTLPDSEGNSQCSNQGTLIDLAELDTTNSLSSVLAPAPTPPSSGIPILPPPPQASGPPRSRSSSQAEATLGPSSTSNALSWLDEELLCLGLADPAPNVPPKESAGNSQWHLLQREQSDLDFFSPRPGTAACGASDAPLLQPSAPSSSSSQAPLPPPFPAPVVPASVPAPSAGSSLFSTGVAPALAPKVEPAVPGHHGLALGNSALHHLDALDQLLEEAKVTSGLVKPTTSPLIPTTTPARPLLPFSTGPGSPLFQPLSFQSQGSPPKGPELSLASIHVPLESIKPSSALPVTAYDKNGFRILFHFAKECPPGRPDVLVVVVSMLNTAPLPVKSIVLQAAVPKSMKVKLQPPSGTELSPFSPIQPPAAITQVMLLANPLKEKVRLRYKLTFALGEQLSTEVGEVDQFPPVEQWGNL

SEQ ID NO: 1650 - DNA, 3371 bp, Homo sapiens
tttctcccaacgtgttcttttttttcctcttcattctccctccttcgaggacacaaaagtggcttccgcggaaagatttggaggcggtgggagcttttctccccggagagcgactgtgtagaaaggatttttgggaagccgctttttaacacctctgctctccgtcccccaagcctctgtgtaatcctctgaggagaaaagcccatagcttgaaagttcgggggcattttgttgtgttctgtaggagagagggggaggaccctgttcgggtagtttggccggactggtactggccgttggaaaacccgaagtacatttccgtgtggaacttttgcagatatatatttttagatttttaaataccagataaaaaatatatgccttctatatatctcctggcgacctgcccctgacagcgcgatgtacaatacggtgtggagtatggaccgcgatgacgcagactggagggaggtgatgatgccctattcgacagaactgatattttatattgaaatggatcctccagctcttccaccaaagccacctaagccaatgacttcagcagttccaaatggaatgaaggacagttctgtttctcttcaggatgcagaatggtactggggggatatttcaagggaggaggtaaatgacaaattgcgggatatgccagatgggaccttcttggtccgagatgcctcaacaaaaatgcagggagattatactttgactttgcggaagggaggcaataataagttaataaagatctatcaccgggatggtaaatatggcttttctgatcctctgacatttaattccgtggtggagctcattaaccactatcaccatgaatctcttgctcagtacaatcccaaacttgatgtgaagctgatgtacccagtgtccagataccaacaggatcagttggtaaaagaagataatattgatgcagtaggtaaaaaactgcaagaataccactctcagtatcaggagaagagtaaagagtatgataggctgtatgaagaatatactagaacatcccaggaaatacagatgaagaggactgcaatagaagcttttaatgaaacaattaaaatatttgaagagcagtgtcacacacaagaacaacatagcaaagaatatattgagcgatttcgcagagaggggaatgaaaaggagattgaacgaattatgatgaattatgataaattgaaatcacgtctgggtgagattcatgatagcaaaatgcgtctagagcaggatttgaagaaacaagctttggacaaccgagaaatagataaaaaaatgaatagtatcaaacctgacctgatccagctgcgaaagatccgagatcaacaccttgtatggctcaatcacaaaggagtgagacagaaacgcctgaatgtctggctgggaattaagaatgaggatgctgatgagaactattttatcaatgaggaagatgaaaacctgccccattatgatgagaaaacctggtttgttgaggatatcaatcgagtacaagcagaggacttgctttatgggaaacctgatggtgcattcttaattcgtgagagtagcaagaaaggatgctatgcttgctctgtggtggccgatggggaagtgaagcactgtgtgatctacagcactgctcggggctatggctttgcagagccctacaacctgtacagctctctgaaggagctagtgctccattaccagcagacatccttggttcagcacaacgactccctcaacgtcaggcttgcctaccctgttcatgcacagatgccctcgctttgcagataaagaggaagtgggaagagaggtggtcttctggcatttttttctacagtttttattagactacgatgagggcattctttctacatagactgcttgttttgcacaagaagtgattttgtgaatgtgaagtggagaggccgaggagcagccggccgggatgggggcattagaggcctgaggttctctaggactcagccatgccgctgcactgacatactaagctggaagcagatgttttttttgaaagtctgtttcattggggtttttgttttgtttagccagacaccctcaacagaatattaggcttgatggttatagcgggtggggttgtatttggaagcctctgaagagaccatgtctttttaaaatctaactcttgagagtgcagcaggggcatggctctgctgggagttgtgttttgctttggcagtctctcttccccccacgaagaaggctgtttaggttttgtgatagaatgggatttgatgaaaaagacaaccaaaggaaaatggggaggcttgggatttcatttaaataatctaagccaagatgataaaaaaaaccttcaactgaaggtactttgtttcttacaacataatttaggcttcagcatctcaccagcccctccctctgaagaagtattatgttcagaagccaacaaaacagtttgttgccagaccaatgtttgatgggaaaacgtggcactcatagttgaatgtatacttctgtaccaaaacttgaacataaaagactagaatttgtgagttttagcaaacgctaaattgatcactgtaactaaccccttctgtccttcctgcctgtttctctgagatgaggaatagcattctttttgtggggatggtgagctttgaatcataaaatgaagttggtgcttgtatggtgtttccttagcctaaagaatgatctgttgtttgaaacctttgtaacttgtttgtatgagtaaagaaaaggtgcaatgcagtgcttttagatggcttgatataccaaataacaatatagacaacattattatatgtgcttccccaagtttaaaggccctgcagaaatagtaaacatggtttaatttcccttcatttccccctcctttgctggatggggttttgggagctataggttgctaaggaggggagtcagattgtggtcaggtgcctcagtaaatcacagacccaggggccctgtggtccagggtgagagtcacaccacattacacatgtgcttccatacagtggtttctgaagcttttgcagggagagaagatggcttagtgtttagactgttagtagaagccatctggaagcttttctctttgcctttttttgtgatcctgccattaaggctatgtgcagtctgccctcctgctccagtggccttgattttaggccaggaatcttctgctccatgtggcttaagccttccagctgagtgaagctaggcaaatggagtgggggcaggcatctattcctgcccccatcatgccccacacccatcagtcaacactcatttgacaaatagagtccagctgcctctgagccaatcctgggacctaa

SEQ ID NO: 1651 - protein, 461 aa, Homo sapiens
MYNTVWSMDRDDADWREVMMPYSTELIFYIEMDPPALPPKPPKPMTSAVPNGMKDSSVSLQDAEWYWGDISREEVNDKLRDMPDGTFLVRDASTKMQGDYTLTLRKGGNNKLIKIYHRDGKYGFSDPLTFNSVVELINHYHHESLAQYNPKLDVKLMYPVSRYQQDQLVKEDNIDAVGKKLQEYHSQYQEKSKEYDRLYEEYTRTSQEIQMKRTAIEAFNETIKIFEEQCHTQEQHSKEYIERFRREGNEKEIERIMMNYDKLKSRLGEIHDSKMRLEQDLKKQALDNREIDKKMNSIKPDLIQLRKIRDQHLVWLNHKGVRQKRLNVWLGIKNEDADENYFINEEDENLPHYDEKTWFVEDINRVQAEDLLYGKPDGAFLIRESSKKGCYACSVVADGEVKHCVIYSTARGYGFAEPYNLYSSLKELVLHYQQTSLVQHNDSLNVRLAYPVHAQMPSLCR

SEQ ID NO: 1652 - DNA, 1937 bp, Homo sapiens
cggacgcgtgggcggacgcgtgggttgtaaccgcgttaacctgacaaaacctcagcagcagaagtccctatttttctaggagttcatcgtgcagacagtcttcactacaggactcggccctggggcctctgcctctcgtctgaccttgcagccttagtcgttggaggctggagcgcaatggccctgccgtctgtggagcctctgggcggccttctttcctttctgtcaacctctcatttcacagaaaaaggctgaatttcattttttccagcatgaaagccaggatcggttagtggttggattctattggtttttttttttaaacagatggagttactgtgaagaagttttcacaactatttatgctggtaaaacaaatgctgttaaatcaccttatgcgtcgttttcaacagcagtggggctaattacccggaatacggtctcaccgatgcagttttcatggacatagaaaattcaaatagaatatataatattgaatttaagatttggggggttaaaaaagaaaacttaactttataaaattatttattctattttaagccttctatcatattttcccatccaattgtttggtttcagtggtccagctttatttacaggcatataaaatgaaattgtgagatgttttgcaagcttctttttactttgagtagcttttaatttgtatgtttttatgtggatgaagagcattttttatgcttttgtgcaataggttccaatatgcatttattagacatctgtttaaatggtaatgtagcatttattttgctaaattgaaagggaacatagatggaattccaaaatatgtacattcagctgtttggtttttcgtttttcattgttattattgtgagaatgctgttattggggttgtgtgtgagtgcccgtcagccagtgatgcctcgggccacgctgtggggccacctcagtcctgcctgggtcctggtgccttggaccccacgtgcttgtggccaggctgcccctgggcggggccatgtggcctcagaccacaagagcggagctgccctggcccaagcactgcagctgcctgcacccccgggcttcgcagccttgcttgttttctctgaacagcaacagaacagtgttcacagcgattcaaagggtggcattgggttggacgttctgggtacaagccaacctagtcccacgttgtacgtgaatgtttaatgtgctctcaaaacatggaaaataagtttagtgcacatagctaaatcacaaaacatccaatttctctgtttcctcaggaagtcattactgcgccaccacatcacatgaccttaacatgatcaatgtatttctctgccttgacatttaaatacataaattgagataagtagattagaaaatcattcaaatgataccataatttgtacgggacagggtgcgggcaatggccacgtggccaaggccccgcaggaacgcgccgaggtctccctcaccctccaggtgtccttcgcacccaacagtgcgtctgaggaacgagctgcagtttgagcgttcccctgagatgtgcgtagcctccgtgtaaatgtccactcccatggcttaattgcctatcagacgcattttcccagacgaaagcaatgttgggttggggaagacagtgcagccacccagcctttaccagcagcgtacggcagacgaaggcagtcgaggtgtggaggtgatcacgaagatacatgtgtttgactgtttaatttgaaagtttacattttttatgctttgtgttggtgtgtaatttttgtactcttggtggctagtttttgtcaaatcttttttggaatattgcttaaatgttttgattttatgatagtgaagcttgtattcagtgttttgccaattaatattatatgcttgtaataaaagcaaagaaaagcttaaaaaaaaaaaaaaaa

SEQ ID NO: 1653 - protein, 96 aa, Homo sapiens
MPRATLWGHLSPAWVLVPWTPRACGQAAPGRGHVASDHKSGAALAQALQLPAPPGFAALLVFSEQQQNSVHSDSKGGIGLDVLGTSQPSPTLYVNV

SEQ ID NO: 1654 - DNA, 1806 bp, Homo sapiens
ggccggagggagcccgcgctcggggcggcggctggaggcagcgcaccgagttcccgcgaggatccatgacctgacggggccccggagccgcgctgcctctcgggtgtcctgggtcggtggggagcccagtgctcgcaggccggcgggcgggccggagggctgcagtctccctcgcggtgagaggaaggcggaggagcgggaaccgcggcggcgctcgcgcggcgcctgcggggggaagggcagttccgggccgggccgcgcctcagcagggcggcggctcccagcgcagtctcagggcccgggtggcggcggcgactggagaaatcaagttgtgcggtcggtgatgcccgagtgagcggggggcctgggcctctgcccttaggaggcaactcccacgcaggccgcaaagggctctcgcggccgagaggcttcgtttcggtttcgcggcggcggcggcgttgttggctgaggggacccgggacacctgaatgcccccggccccggctcctccgacgcgatggggaaggtgctatccaaaatcttcgggaacaaggaaatgcggatcctcatgttgggcctggacgcggccggcaagacaacaatcctgtacaagttgaagctgggccagtcggtgaccaccattcccactgtgggtttcaacgtggagacggtgacttacaaaaatgtcaagttcaacgtatgggatgtgggcggccaggacaagatccggccgctctggcggcattactacactgggacccaaggtctcatcttcgtagtggactgcgccgaccgcgaccgcatcgatgaggctcgccaggagctgcaccgcattatcaatgaccgggagatgagggacgccataatcctcatcttcgccaacaagcaggacctgcccgatgccatgaaaccccacgagatccaggagaaactgggcctgacccggattcgggacaggaactggtatgtgcagccctcctgtgccacctcaggggacggactctatgaggggctcacatggttaacctctaactacaaatcttaatgagcattctccacccatcccctggaaggagagaaatcaaaaacccattcataggattatcgccaccatcacctctttcaattgccactttctcttcttttgaatttgaactctggagttactgttctacagtttggcggggacggggcttgggggttttctcttttgtttgtttccctttctttttcctttttttttttttttttttgttggctttgcgttaggatggctctgatctgacatttgacatgaacacaaagttgccaagatgctccttgttgacttccagcagaatgggaatgggggaaacacagcagttcttgggtaaaagtccctttgtaataataggtttgggatttttttatttcgagagaatctttcattttcctatgtatgcttttttccttttttgcccagtttccttatcacttgctgtagatggcttattttgcattcatgcagactatgttgcaagtctgtttcatctagtaaactgaaaattattgcttaatcaaactgccgtttgtcttttatatttaaggccttccccccccttccttatgagttctaacttagtaatttcaaatgtgaccttttatatctaagaccagtatagtaaacttagcccacagtggcaaataatgagtaatattgtaatatgttccagttgcacctcagtatgttaaacaggtaatgtaagaagttctctgaaatgtcagcaagtaagttctgaaacacatcatgcatgagtaggaataaac

SEQ ID NO: 1655 - protein, 175 aa, Homo sapiens
MGKVLSKIFGNKEMRILMLGLDAAGKTTILYKLKLGQSVTTIPTVGFNVETVTYKNVKFNVWDVGGQDKIRPLWRHYYTGTQGLIFVVDCADRDRIDEARQELHRIINDREMRDAIILIFANKQDLPDAMKPHEIQEKLGLTRIRDRNWYVQPSCATSGDGLYEGLTWLTSNYKS

SEQ ID NO: 1656 - DNA, 1049 bp, Homo sapiens
ggcacgaggcagacgtccctgcgcgtcgtcctcctcgccctccaggccgcccgcgccgcgccggagtccgctgtccgccagctacccgcttcctgccgcccgccgctgccatgctgcccgccgcgctgctccgccgcccgggacttggccgcctcgtccgccacgcccgtgcctatgccgaggccgccgccgccccggctgccgcctctggccccaaccagatgtccttcaccttcgcctctcccacgcaggtgttcttcaacggtgccaacgtccggcaggtggacgtgcccacgctgaccggagccttcggcatcctggcggcccacgtgcccacgctgcaggtcctgcggccggggctggtcgtggtgcatgcagaggacggcaccacctccaaatactttgtgagcagcggttccatcgcagtgaacgccgactcttcggtgcagttgttggccgaagaggccgtgacgctggacatgttggacctgggggcagccaaggcaaacttggagaaggcccaggcggagctggtggggacagctgacgaggccacgcgggcagagatccagatccgaatcgaggccaacgaggccctggtgaaggccctggagtaggcggtgcgtacccggtgtcccgaggcccggccaggggctgggcagggatgccaggtgggcccagccagctcctggggtccccgccacctggggaagccgcgcctgccaaggaggccaccagagggcagtgcaggcttctgcctgggccccaggccctgcctgtgttgaaagctctggggactgggccagggaagctcctcctcagctttgagctgtggctgccacccatggggctctccttccgcctctcaagatccccccagcctgacgggccgcttaccatcccctctgccctgcagagccagccgccaaggttgacctcagcttcggagccacctctggatgaactgcccccagcccccgccccattaaagacccggaagcctgaaaaaaaaaaaaaaaaaaaaaaaaaaaaaaaaaaaaaaaaaaaaa

SEQ ID NO: 1657 - protein, 168 aa, Homo sapiens
MLPAALLRRPGLGRLVRHARAYAEAAAAPAAASGPNQMSFTFASPTQVFFNGANVRQVDVPTLTGAFGILAAHVPTLQVLRPGLVVVHAEDGTTSKYFVSSGSIAVNADSSVQLLAEEAVTLDMLDLGAAKANLEKAQAELVGTADEATRAEIQIRIEANEALVKALE

SEQ ID NO: 1658 - DNA, 1438 bp, Homo sapiens
ggttgggatctgaggggtcctctctgtgcccatcacagtttgagcttcagggaaaagaagaagaggtctttgcccttcgtttttccacgggaggagaatcaagagtgagccatggagctacgtgtggggaacaagtaccgcctgggacggaagatcgggagcgggtccttcggagatatctacctgggtgccaacatcgcctctggtgaggaagtcgccatcaagctggagtgtgtgaagacaaagcacccccagctgcacatcgagagcaagttctacaagatgatgcagggtggcgtggggatcccgtccatcaagtggtgcggagctgagggcgactacaacgtgatggtcatggagctgctggggcctagcctcgaggacctgttcaacttctgttcccgcaaattcagcctcaagacggtgctgctcttggccgaccagatgatcagccgcatcgagtatatccactccaagaacttcatccaccgggacgtcaagcccgacaacttcctcatggggctggggaagaagggcaacctggtctacatcatcgacttcggcctggccaagaagtaccgggacgcccgcacccaccagcacattccctaccgggaaaacaagaacctgaccggcacggcccgctacgcttccatcaacacgcacctgggcattgagcaaagccgtcgagatgacctggagagcctgggctacgtgctcatgtacttcaacctgggctccctgccctggcaggggctcaaagcagccaccaagcgccagaagtatgaacggatcagcgagaagaagatgtcaacgcccatcgaggtcctctgcaaaggctatccctccgaattctcaacatacctcaacttctgccgctccctgcggtttgacgacaagcccgactactcttacctacgtcagctcttccgcaacctcttccaccggcagggcttctcctatgactacgtctttgactggaacatgctgaaattcggtgcagcccggaatcccgaggatgtggaccgggagcggcgagaacacgaacgcgaggagaggatggggcagctacgggggtccgcgacccgagccctgccccctggcccacccacgggggccactgccaaccggctccgcagtgccgccgagcccgtggcttccacgccagcctcccgcatccagccggctggcaatacttctcccagagcgatctcgcgggtcgaccgggagaggaaggtgagtatgaggctgcacaggggtgcgcccgccaacgtctcctcctcagacctcactgggcggcaagaggtctcccggatcccagcctcacagacaagtgtgccatttgaccatctcgggaagtgaggagagcccccattggaccagtgtttgcttagtgtcttcactgtattttctttaaaaaaaaaaaaaaaaaaaaaaa

SEQ ID NO: 1659 - protein, 416 aa, Homo sapiens
MELRVGNKYRLGRKIGSGSFGDIYLGANIASGEEVAIKLECVKTKHPQLHIESKFYKMMQGGVGIPSIKWCGAEGDYNVMVMELLGPSLEDLFNFCSRKFSLKTVLLLADQMISRIEYIHSKNFIHRDVKPDNFLMGLGKKGNLVYIIDFGLAKKYRDARTHQHIPYRENKNLTGTARYASINTHLGIEQSRRDDLESLGYVLMYFNLGSLPWQGLKAATKRQKYERISEKKMSTPIEVLCKGYPSEFSTYLNFCRSLRFDDKPDYSYLRQLFRNLFHRQGFSYDYVFDWNMLKFGAARNPEDVDRERREHEREERMGQLRGSATRALPPGPPTGATANRLRSAAEPVASTPASRIQPAGNTSPRAISRVDRERKVSMRLHRGAPANVSSSDLTGRQEVSRIPASQTSVPFDHLGK

SEQ ID NO: 1660 - DNA, 1559 bp, Homo sapiens
gggaggcggcggcggcggcggcggcggcggcgagagcccagagccagagcccggccggggccgagcggagcgcggcggcggcggcggcggcggcggctgggccgggagaggctggcgcgccgggcggctccgcgaatcctccggcatccgccccggcgggccgcccccgcccgcggcagccccccgagcagtggcccggcatcggcgccttcccggcgggcaagagtgagccatggagctacgtgtggggaacaagtaccgcctgggacggaagatcgggagcgggtccttcggagatatctacctgggtgccaacatcgcctctggtgaggaagtcgccatcaagctggagtgtgtgaagacaaagcacccccagctgcacatcgagagcaagttctacaagatgatgcagggtggcgtggggatcccgtccatcaagtggtgcggagctgagggcgactacaacgtgatggtcatggagctgctggggcctagcctcgaggacctgttcaacttctgttcccgcaaattcagcctcaagacggtgctgctcttggccgaccagatgatcagccgcatcgagtatatccactccaagaacttcatccaccgggacgtcaagcccgacaacttcctcatggggctggggaagaagggcaacctggtctacatcatcgacttcggcctggccaagaagtaccgggacgcccgcacccaccagcacattccctaccgggaaaacaagaacctgaccggcacggcccgctacgcttccatcaacacgcacctgggcattgagcaaagccgtcgagatgacctggagagcctgggctacgtgctcatgtacttcaacctgggctccctgccctggcaggggctcaaagcagccaccaagcgccagaagtatgaacggatcagcgagaagaagatgtcaacgcccatcgaggtcctctgcaaaggctatccctccgaattctcaacatacctcaacttctgccgctccctgcggtttgacgacaagcccgactactcttacctacgtcagctcttccgcaacctcttccaccggcagggcttctcctatgactacgtctttgactggaacatgctgaaattcggtgcagcccggaatcccgaggatgtggaccgggagcggcgagaacacgaacgcgaggagaggatggggcagctacgggggtccgcgacccgagccctgccccctggcccacccacgggggccactgccaaccggctccgcagtgccgccgagcccgtggcttccacgccagcctcccgcatccagccggctggcaatacttctcccagagcgatctcgcgggtcgaccgggagaggaaggtgagtatgaggctgcacaggggtgcgcccgccaacgtctcctcctcagacctcactgggcggcaagaggtctcccggatcccagcctcacagacaagtgtgccatttgaccatctcgggaagtgaggagagcccccattggaccagtgtttgcttagtgtcttcactgtattttctttaaaaaaaaaaaaaaaaaaaaaaa

SEQ ID NO: 1661 - DNA, 2033 bp, Homo sapiens
cctccttccagtgcccggcgttcctcccttccccctcgccgccgaccgagttcttccttttcagaccgggtcgccttgctgtcgtcgcggtgattttcctgctactgctactgctgctgctgccaccgccactaccactgggctcatttgccccgaccccttcccgccgccccgcccccagccccacacaagatgtcagaggatttagcaaagcagctggcaagctacaaagctcagctccagcaagttgaagctgcattatctggaaatggagaaaatgaagatttgctaaaattgaagaaagatttacaagaagttatagaactaaccaaagaccttctgtcaactcaaccttctgagacgcttgcaagttcagacagttttgcttctactcaacctactcattcatggaaagtaggagacaagtgtatggcagtctggagtgaagatggacagtgttatgaagcggagattgaggagatagatgaagaaaatggcaccgctgcaatcacctttgctggttatggcaatgctgaagtgactccactgttgaacctcaagcctgtagaagaaggaaggaaggcaaaggaggacagtggcaacaaacccatgtcaaaaaaagaaatgattgcccagcagcgtgaatataaaaagaagaaagctttgaaaaaagctcagagaataaaagaacttgagcaggaaagagaggaccagaaagtgaaatggcaacaattcaacaacagagcctattctaaaaacaaaaaaggccaggtaaagaggagtatttttgcttcacctgagagtgtgactggtaaagttggagtaggaacctgtggaattgctgataaacctatgacacaatatcaagatacctctaaatacaatgtcaggcatttgatgcctcaataatcagaaaaactgttggatttcatctctgcagggctttacatttacctttttatccttatatttttctaaaggtaaattatttgttagatgagtaagcaagataccattgtcgtcattggttggcttcagtagaatgaaacgtgaagaaattgcatttgataactgctattcatttaacttttctcattatcagtaccacggttccctcaaagtttgttgaataaagcaacttttgtagatgctgtttcatacagcacttagatgaattattgatcttcctaatatcaggcgcctacttaacctatggtgtgtactttttgtaagttgtaacttgaaattttcagatgctttgaacttgacacatactctagcaattcattggaacaccaaggcaaaaacaccaacctgctaaaagagatcttttcatttttcttattttcagctttaaaacttagctgtcgttcagttaagcttaaagataggttaatttgtaaatggcaaagtttgttttgaggtttttcctcaataacttgtttcccaggcctattaggccatctctaaaattgatctagctgttttatttttatgtactcttagttttatgtaagaaaccttaggatgagctcccttttctaaggtgtttttgttttttgtatgtttgcttttttcctgttttttgttttttccatttacggcagtggtaccatgttttggatgtgtgatgtttatatgggagaacaaaaagctgatgtatagccctgtatacagtgtagatactatttttgtaaaaacacaaggctaaattaatgaacaagaatactgaatatttcatcattaaaaatttcttgtatttcttgtgcattaatctgacgataatttccctgtatattatgttcatttagctgtttgtaatttttgttaattagatcaggttgtctgcatttgttggtgtaagtgaacatcatcacagttatcctgagttgagtttaagccaaatacatgcatagaaaagggtcttcctattaatggaagaaggtaatttttaggatgtgtattatttcagttttgtatgtttaacttttattaaataaagtgtttttaaaatctccaaaaaaaaaaaaaaa

SEQ ID NO: 1662 - protein, 238 aa, Homo sapiens
MSEDLAKQLASYKAQLQQVEAALSGNGENEDLLKLKKDLQEVIELTKDLLSTQPSETLASSDSFASTQPTHSWKVGDKCMAVWSEDGQCYEAEIEEIDEENGTAAITFAGYGNAEVTPLLNLKPVEEGRKAKEDSGNKPMSKKEMIAQQREYKKKKALKKAQRIKELEQEREDQKVKWQQFNNRAYSKNKKGQVKRSIFASPESVTGKVGVGTCGIADKPMTQYQDTSKYNVRHLMPQ

SEQ ID NO: 1663 - DNA, 2159 bp, Homo sapiens
ccacgctcggcagtggcacgatcctggttcactgcaccctctgcctcccaggttcaagcgattctcctgcctcagcctcccaagtagctggtactacaggtgcgtgccaccacacctggcttattttagttattttagtagagatagggtttcaccatgttggccaggctggtctcggaactcctgactgcaggtgatccgtcctccttgggctcccaaagtgctgggattataggtgtgagcccccacgcctggccaacttgattatattaattttgggttttttgttttgttttgttttgttttttaatttttcaaagaatttgtggatcttggtataaagtcattggaacatatctgttttaacagcaagagatcctaggcagatacttcaaaaggttaaaaattcttaatcctacagaattttaaatgaatcttatcaatgttttgtaaacaaacaatatgaatggccaaaaaattgccctccattttactggcaggtaatttatattgtcttacttaagaattctcccctagtttttcaattgtactttatcgtgttgttttcaatgagataagtattttcatagggaaagcattttccagcataatatttgcttgggtagcatccgggttttagtatttaaccaagagccttttaaatattgaaaacccatagttcagaaaatgttagtattgctgcccttcttcacataaatttttttttaaattatactattattttgcttaattttatattgggttaaaacaaccttcaagaaggttaactaggaaagaagacctttttgttttatttttactatttatatatagaagacaaatcagcatttggtgatagttttacatgaccagttatcaaacggtcatagtatgaagtgtgcagttgttcattattagtaaattatgtttgatttttaaactatttagtactaatagttgagatgaaaactgaagaaaaatgccaatgtgacgtttgtgtatagctagccttaaaaaacttcccatgtttttaggtgacttttttccccctcttagtactctggagaaacaatgaagatgggccatctcaattccagatgtaaacaaaaagtaatttttatttcaacatttaatgtaactgctattattgtggattcttgtcttgtgtattttctttcccttattcaagtaatatagaataactttccttaaaatgatttgatccaagatacgtcatttctgtattggcaaaatgccactattaaagtgtaattcttgaatttaggttgaattgatgactttttaaaacaaaacaaacactggacagttctacattgtattgcgtttgcgaatgtgcgtgaacacacgcacacgtgcaggagaatgtagtgccataagaacactggcgctttttaaaactttccaagctagctacttattttcattttcagggttgagtactctaagctctctacttactgtgagaagttttctacattgtaaaattaaaagattatatttaaaatacttctttaggatgttattcagccatcaaaaaaaaacccaactaaaatgtcttaccagtaaagtattattaaaagcctcatttgtggagattcgctgacttccttggttaagctgtcttgtatttacttaatttgtcccctcaaccaggtgttttcttttcagcctgttactgtcctgtgccatttttaaaaatagccatcatgagtaagggcttctttaaaataatccctgacaatatctttggcattaatacgacataaagacaagacagtatatgtatgttttcattcctgttttgtacgagtgcctcattttgtagtcatgaaagtaacatagtaccttaaataaaaatgtaatgactaatctaaggtctaggaataactattgtagaagctaagtagaacacttagtttggggtgtcaattttctatcaacgcaaacaccttagggtacccagaccaattttatgtatatatattctgaaatgctccctttttaatgtggtcatttgttgccttctaagttgagaggacaaaactgaataaagtgaatgttaattgtaaaaaaaaaaaaaaaaaaaaaaaaaaaaaaaaaaaaaaaaaaaaaaaaaaagaaaaaaaaaaaaaaaaagg

SEQ ID NO: 1664 - DNA, 6203 bp, Homo sapiens
aacagaatcgcgtttggctgtgctggatgtgtgaacctattgggtactgtacaacttcaagcctcgaaatcagataggcaccaccaacctcatttcctgtttcaccttgattttctgtgataccaaaatctcagcttcacaaagtcattgaaagtgttggttcatgaagttttaccatcaattcaagtaatcataaatggcaaattctgcaaaagcagaagaatatgaaaagatgtctcttgaacaggcaaaagcgtcagtgaattctgaaacagagtcttcattcaatattaatgaaaacacaacagcttctgggactgggctttctgaaaagacttctgtctgtaggcaagtagacatagcaagaaagagaaaagagtttgaagatgatcttgtaaaggaaagttctagttgtgggaaagacactccatccaagaagagaaaacttgatcctgaaattgtcccagaggaaaaagattgtggtgatgctgaaggcaattcaaagaaaagaaaaagagaaactgaggatgttccaaaagataaatcttctactggagatggcactcaaaataagagaaaaatagcacttgaggatgttcctgaaaagcagaaaaatctggaagaaggacacagctcaacagtggctgcccattacaatgaacttcaggaagttggtttggagaagcgtagtcaaagtcgtattttttacctaagaaactttaataattggatgaaaagtgttctcattggagaatttttggaaaaggtacgacagaagaaaaaacgtgatatcactgttttggacctgggatgtggtaaaggtggagatttgctgaaatggaaaaaaggaagaattaacaagctagtttgtactgatattgccgatgtttctgtcaaacagtgtcagcagcggtatgaggacatgaaaaatcgtcgtgatagtgaatatattttcagtgcagaatttataactgctgacagctcaaaggaacttctgattgacaaatttcgtgacccacaaatgtgttttgacatctgcagttgtcagtttgtctgtcattactcatttgagtcttatgagcaggctgacatgatgctgagaaatgcgtgtgagagacttagccctgggggctattttattggtactactcccaatagctttgaattgataagacgccttgaagcttcagaaacagaatcatttggaaatgaaatatatactgtgaaatttcagaagaaaggagattatcctttatttggctgcaaatatgacttcaacttggaaggtgttgtggatgttcctgaattcttggtctattttccattgctaaatgaaatggcaaagaagtacaatatgaaactagtctacaaaaaaacatttctggaattctacgaagaaaagattaagaacaatgaaaataaaatgctcttaaaacgaatgcaggccttggagccatatcctgcaaatgagagttctaaacttgtctctgagaaggtggatgactatgaacatgcagcaaagtacatgaagaacagtcaagtaaggttacctttgggaaccttaagtaaatcagaatgggaagctacaagtatttacttggtgtttgcctttgagaaacagcagtgagcacataggcagtagtcccagaggggccgtgttctgtcctgcacaaatttgaacaactcatctcgatatatttgatatttctctgtctgttgattttaattctaaatgtgcaggatgctgccagaaactccaatgtagaaattcaacatttgctgtctgtgacagatgaacttttgcatgtgtatataagaatgagttgggacctctgtctttaaaaatctatttttaggtaatgttctaagaattccatttgcctctatgatcttagctcataaaaatataatatgacttgataaagcaactaaactcttcccacagtgttcagatttgtcctgtgtgtgtttacagtattcaatttattgcagttatagaattggtcagagagcattttcatagtgtgctcatttctatggttttgttatatagcatttttcaacatttaatggtctgtacagttgaatgtaagtgttcaatatgtattgctgaagttataagtttaaaactcaatttcagatgctcataaaagttacttagctaaaattttagcaatttattgcattttgaaataatcattaacatgctgcaattcaggagctggttagaacattttaagtggcagcatagaattttggaattttggggctttcttttcagaaattgctaccatagtaattaatgtttccagttatcaagattgtgattagacacatttacctttcttcattgaacaaatggtgccatagttatttttctcaaaatttagtgaaaatccctcccatgtagacatgttgcacattttttccaaatttatacatggaactgcagtaggaatattctcaccatctgatgccatgtacccacttcagaaataagcaatacttgttcctctgttacaacctcagcactttgcaccgtaggagccattgttaaagttgtcacttgtgtaactgactgcttttccaaaactggtacttacgtgaactgttgtccttgctttacaccaccatttggaaaacttaccagtttttagatgtagatgtagtgaaaaacttcaagaatgaagcagagcaattgagtattcttttttaaattattaagccatgatttacaaaaacattactttctgtaattcacaatacttgttttaaaaacatagtgtcttcattagtgtgcatctattaactgttcatggtgttagagttgcaaactttttagcaagaaaatatggatttcctcatttcagttccttctgcagcctgtgaatctccacaaagtgttaccagtttacaaaaataagtctttttgccttaagtcattttggaaataagtaatactgcatctgactctggtggctgtattagctaggaaaggtttgtaaatggtgtcagtgaggtggggaaaggaagtcttcctgtcacatatgcaggttcgttttcattctagggcagtgccaggaagtatattgatagctttgtaggtacaggaaaaacatcatcattatttcctctgttcacatttactggtcttaattaacaggtaataataatacatgtacttttagcctgaaacctcttccacgccatgggtaacttgggggagagaagaatcctccaaacgatggagtagccagtggtaatacaaagcagggagaacagaaaggtagagttactaaggccttcagtgaacagaaaggagcagagagcaagattagatctgagaagatgctctggggactgagcccactgttgttggtgtcagggaggcttactggagccacacctgcaggcgctgtgttcaggcaccaccttcctccttgagctttgcctgtctcttgccttatcagttcttcctccaccaccctacacccccctccccccggccccaagcccctgtgtctccttgttacaattaagtttctggatattgacttaagaactgttaggaagaggactagaaaaggcttcccctgcctatcctctccgatcaccaaggtggaagggagctagtaggactcttccttgacacaccttgtagtctaaatgttcggtattctattcaggacttacggtaactattatgagggaggcatggctttccaccgtcgggccaggaagagcacctgttgctgcaagctcagtgaagtggggcactcccagacctgccatgcagtttatcctctgagaatggaattggaaatgaagacctaaccagctattggtgggaatgacggaactggggattgcgatgattgatctgggaacatggctggattgtgatttaaccaagaatgctgatgttgaattctttgggcctagaatatacttgagaaagcactagtggcttgtgttcagggagaggagctggcagtttttaaccacttctgtgggagccgtgttctaacctgtggaaagtattgcaattctgtgagagtgactctgcagagtcactgcaccatcaggcttggccctgctgtgccttcagtacccagccaggttctctgggtccagggtgactctccaaagaaattggccttcagctggagaaaacattgggtggagactctcacttatgttaatgcaatcttgaaatgactgaaaggtagattgccagcacagtgagtttcccagcctgctcccccatccacacttggaaattgagggagcatgaccgctctctgacttcacatgttaatagaggatcagagcagagttgggagtatattggtcaggatcatagaaaagaagacaaagcttgctcagccatgagatggccaggtatccagttttgttaactctctttgggaatttctttttcagcctgttttttagcttagtgccattatgtcattttgatttgtattcaagtactcttcaagtatctttgtaatgaaggtttggctacttgtataggtctgcctgcagggtgaaaatgccagtgtgaatattctagctaccaaacattgttttttgttgaaaaactgactttctgttgtctacctcaggccttgtgcatttgggttatctcaagccagtcaccacagagggtctctagggtctgcaaaatagaggccaaatccagggaccaggccctaataatagaagttgtaccaaaatgcctgtggtacttgatggcctgttggtcaaataggaagtacaagtgtgtgatgttagaacctccctagttgctgctatatcaaacactgcacacttgacaagtgttttcattccccgccctctgacagaacaacattcctaattctttgaaggcaaccagtgcaaaggctactacacttgtgtaatgatatttagcagatgcatacaggactggatcccagggcactgtcagttcttccctccctctcgtgctgctcagtttgtcctctgctcccatgtaggcctaaagtcaccccactccttagtgcctgcacctcaccacgatattgaggaagcacaggacatccaagggtactctccagtttggctgtggagacttgagcaagccctaaagtcccctgctccctggacttctcctgggttgtgcttttttgggggcaacataccttggacaaagctgagctgacagctaatgtttattagcctcctacctaagtcagtcactttgctaaattcttcacctgtggtaactcattttgattgttataacatctcagcaccattattcccattttaatgatgaggaaactgagtcatagaggatacagacttgcccaaaggagagccaggattttcacaccccctcctcaagctgggcctgccctccaagtgcttgttatatacctccacgggtgtcagcccagatgactcctcacccatccaccacctgcagcttgagatgttaactattagagctccattcttttggttcaaaacgttgatacttacttagatgttccctgagaggagtgtttatttctgagtaaggggctttgttgaaagagggggttagagagagcaagacagcacttgagtgcactggcaggaagcagagataagacttgaatttcagtttggtagaccaccttctttagcagcccaacctgtagcaaatctagtttagcctgcatggcagggagagggattctcttcccaccctcaccatttgcaagtggcaggagctgagaatgccagtacgagagtgtagccaaagtgagaggctgagagcaaaggagacatttttttcagttttgagtcgagtatccagacagaggcaaatcattttgtttaactttttattaaagtgtaactatagaaacacatcaatgatttttcacaagtggagcacgtgcatacaatcggcaccccagaagccccccgtcagattcccttccagttaactacctctccaagggaaaccactatcctgagttctaagcgcatagattagttctgtctggtttggggagatatataaatggaattatgcattcttcgtatctggtttcttttcaccaatattatgtttgtgagatttttgttgcatgtatttgtacatggattttcattctcatggttgtataatatttcattgtgtgaataaaccacatactgtttatctg

SEQ ID NO: 1665 - protein, 476 aa, Homo sapiens
MANSAKAEEYEKMSLEQAKASVNSETESSFNINENTTASGTGLSEKTSVCRQVDIARKRKEFEDDLVKESSSCGKDTPSKKRKLDPEIVPEEKDCGDAEGNSKKRKRETEDVPKDKSSTGDGTQNKRKIALEDVPEKQKNLEEGHSSTVAAHYNELQEVGLEKRSQSRIFYLRNFNNWMKSVLIGEFLEKVRQKKKRDITVLDLGCGKGGDLLKWKKGRINKLVCTDIADVSVKQCQQRYEDMKNRRDSEYIFSAEFITADSSKELLIDKFRDPQMCFDICSCQFVCHYSFESYEQADMMLRNACERLSPGGYFIGTTPNSFELIRRLEASETESFGNEIYTVKFQKKGDYPLFGCKYDFNLEGVVDVPEFLVYFPLLNEMAKKYNMKLVYKKTFLEFYEEKIKNNENKMLLKRMQALEPYPANESSKLVSEKVDDYEHAAKYMKNSQVRLPLGTLSKSEWEATSIYLVFAFEKQQ

SEQ ID NO: 1666 - DNA, 6245 bp, Homo sapiens
tggcacgaggcgatgagttcctgctgctgttcaccatggcctccaaccacccggccttcagcttccaccagaagcaggtgctgcgccaggagctcacgcagatccagagcagcctgaacggcggcgggggccacggcggcaagggcgcgcccgggccgggcggcgcgctgcccacttgcccagcctgccacaagatcactccaagaactgaggcccctgtcagcagtgtcagtaatagtttggagaatgccctgcacacatcagcacattccacggaggagtcgctgcccaagaggcccttaggaaaacacagcaaagtgagtgttgaaaagatagacctgaagggattatcacacacaaaaaatgacagaaatgttgaatgttcctttgaggtcttgtggtctgattcttcaataacatcagtaaccaaatcttcctctgaagtgacggaatttatttcaaagctatgtcagctctatcctgaagagaacttggagaaactcattccttgcttagctggtccggacgcattttatgtggagcgaaaccacgtggatctggactcaggcctgaggtacctggcctcattaccttctcacgtgttgaaaaatgaccatgtcaggaggtttctcagcacttcctctcccccacagcagcttcagagtccaagtcctggcaatccctccctttctaaagtaggtaccgtgatgggcgtgtctggaaggcctgtgtgtggagtggctggtatcccgtcctcgcagagcggagcccagcaccacgggcagcacccggccggctccgccgcccccttgcctcactgctcccatgcgggcagcgcgggctcagccctggcctaccggacccagatggacacatcacctgccatcctcatgccttccagtctgcagacccctcagacccaggagcagaatgggattctagactggcttaggaaactgcgtttgcacaagtattaccccgtctttaagcagctctccatggagaagtttttgagccttactgaagaagatctgaataaatttgagtctcttaccatgggggcaaagaagaagctcaagacccagctggagctggaaaaggagaagtcagagagacggtgcctgaacccctcggccccgccgctggtcaccagcagtggtgtggctcgagtgccccccaccagccacgtcgggcccgtgcagtcggggcggggcagccatgcagcagagctgcgggtggaagtggagcagccccatcaccagctgccccgggaaggcagttcctcggagtactccagctcctcctccagccccatgggggtacaggcccgggaagagagctccgacagcgctgaggagaatgacagacgtgtggagattcacttggagagctctgacaaggagaagccggtgatgctgctgaatcacttcacttccagttccgccagacccacggcccaggttctccctgtgcagaatgaggccagctccaatccatcaggccaccaccccctgcccccgcagatgctgagcgcagcctcacacatcacacccatccgcatgctgaattccgtgcacaagccagaaagagggagcgcggacatgaagctcctctcgtcttctgtgcactcacttttgtctctagaagaaaggaataaaggatctggaccaagaagcagcatgaaagtggacaagagctttggcagcgccatgatggacgtgctgcccgcgtccgcaccccaccagcctgtgcaggtcctctctgggctttcggagagcagctccatgtcacccacagtctcctttggtccccggaccaaagtcgtgcatgcatccacgctggacagggtgctgaagacagcacagcaaccggccctggtcgtggagaccagcacggccgccacggggacgcccagcacagtcctccacgccgcccgtccgcccatcaaactgctgctgtcgtcatctgttcctgctgattctgccatttctgggcaaacttcctgtcctaataatgtgcaaataagtgtgccccctgcaataataaacccccggactgctctgtacacagccaacaccaaagttgccttttctgcaatgagcagtatgccagtgggccccctgcagggtggcttctgtgcaaacagcaacactgcctctcccagcagccacccctccacgtcctttgccaacatggccacgttgcccagctgcccagcccccagctccagcccggcgctgtcctccgtccctgaaagcagtttctatagcagcagtggcggtggcggctccacaggaaacattcctgcctcgaatccgaaccaccaccaccaccaccaccatcagcagcccccggcacccccgcagcccgccccacccccgccaggctgcattgtgtgcacgtcctgtggctgcagcggcagctgcggctcgagtggcctgactgtcagctacgccaactacttccagcacccgttctccggtccgtccgtgttcaccttccccttcttgcccttcagtcccatgtgcagcagcggctacgtcagcgcccagcagtacggcggcggctccaccttccccgtcgtgcacgccccttacagcagcagcgggaccccagaccctgtcctgagtgggcagtccacgtttgccgtgccacccatgcagaacttcatggcagggacagcaggggtgtaccagacccaaggactggtgggcagtagcaatggttccagtcacaaaaagagcgggaacctatcttgttacaactgcggggccactggtcaccgcgcccaggactgcaaacagccgtccatggacttcaaccggccaggtacttttaggttgaaatacgcccctccagcagaaagtctggactccacagattgatatttttctctggcaacagaacgttattaagccatggagacataaggaaaattaaatacaaaactgagaagtctagttgctgttgagcttaatctttttaatccaaaggtgctttacttttcctagactggatagaaaatctagcgtagaagtgcatcaaactcgatttattgccaaaaccctagattggagcttggtgtcagaactcgcctagtgggcatctctgtggctggtgagatcggccacctccacttttggttgcagtgcagagacgccatgtctcccgaagagcattgccatcactggccctcctaggctcacacgtcaattccagggcagctacacgtggtctgaatcgagaaccgagcttggagttctccaagtggagttccacccgccggactcctgacacccctgggctagggaaaatgtcgactttgttttgttctgttcctaaagtgattagcactaatctctgggatttttaaggattgcactacagaagaatgtaccctgatgtaaatctctgcggttctgggagccaaactcctctgagaacagtcagtgcaagagactccaataatccatattgaaagagtcagcaccagcagaggctactcgacttaggacgcaacagaggttttagtatttccttccctcctccaagcacttgtagcagtttcaggtttttaatttttttctgcaaataaatctaaactacgttattaaatagaaatagtttactcgcaacaacttaatttctaagggtccaagtcccagagaatccatagtcgtcaaagctttgagagtatctttcttcccagccagtcagtggctttgagccctatcttccactacaaatgacctctcgaggggggacggcgacagcgcggctctgtgagtggctgtgaggatgctgcacgtcctcagcagagtttgcaagttgctttatctcccacgggctccccaagaacctccaaccccgaggcttatcgctagcggattcacacctgagacagacatttcaacaatgatacagtcctgtcatttatcagcaaaagattgggaattttctcctgtcaacttcttttgtattaggctgtgtattgatagttaattccgttaaaaattacttggaaaacagtgggaagtggtaggactctggaagaggccacacacccgagagctgcgagatctgtgcaagtctggttttggttaggtagtaataaaagtcctcactgtagatctctaaatttcaacccacggaaatgaaagccttttgtctgaaatttacggacttaaatcttcaaggttaaagggaattttctgctcaaataatactcttatcgaaaatgctaaagtcttcaatgttaaaatactgattggtaaaatcttgcagttgggattttgcagttggatatttattttaaaaaaaattataatattcagactattcttaaaatgggacaatcagcctcatgaaaaattgatgtaaatcagaagaataccctagaatgaggccttgtgatgtgagcgttcaatttgaagagcagttcctaacttcatagaaactaaagcagaaagttgttacattttttttatgacaggcttttagtagaattttttagttttattttagttgaattttatttctatgcaatgcagaattaacagacctcttctcctcatggtacacagtattacagtgttgaagtaatggtgatgcttattacaacagctatttaggggaatgttacgttgatctcttaaattgtaaacactacaaaatgtcaaaataatgagaactgacacaactttgccttaaagagtactagactggaccttctcatattacgtttaaggaagacttagagtgttcattgatgtttacgattttaatatttctgaaggccattacagtggcctggatatgtgctgaaagccaaacttttaaattttttggtttttttaagcaaagaaatattttaaataaatcctatttcaacactgaaattgttgaaaaccgtctcataacaaaaggaaaaaacattggaatttttgttttagtggtcagtataggggaatgaaagcgtctgttgttacccacgtaactattttgataagtattagaggttaaccttaaatccagcaaaacattaaaacagaaacttttcaacttggagcctgccattcagcgttgaggtagatgagttccgacactgtcacggctgtgttcccagcagcgaaggcctctgcggagctgccagtcgtcttgaacgtgcatgggcggcgtgtgacatctccagggaggccgtccgaagtcgagaatcgtcagctgtaagtaggagctacacagcgcagagaaaatggaaccacccatccgtgaggcctctttccggagggagccgcacacttggacttgagagtttgccagcagcgagctcggatgcatctctccaaaagccaccaaggtcggcgcgtctgaagagcgttttgcggtcatcagacttcctcatctgaaaacacagaacatactgaccctttcaagtacttagtcattttcctgaaagtgtggtctgtttcagaatgctgtggcaaccagtgttttattttatgccttgctcgttgtacatcatgatgactgatggtcttcaaggttgtgaggaaagccgtctccctgcttgactcgactgctgtcccagaggagagtcctgtgcgacctgagcgggggtggctgccatttccagcatgcaggtgacttccaaagaatgagtcaggtggcactgaaagccatgggttctgaagaggcgaatttgttgaaaagtcccaagggtctgaatgaaagcatctttaatcaacactcaacactcgcaatattctagaaaaccatatactgtgctggttgaggccaaaggttaacattgctccactgttcaccaaggaagggggcagtggccatccgccgcggcctcacgtgcgttgtaacaagccctcatcacatgtgtgagtcttacgtgcacaaaaagagaaggctttggtactgaaactggacaccttgtgtactcgataccttcacagcttctattggacatattttctttttaggaatgaaggaaaattctcccatttttgagccattcttttgtcaattctacaaaattgcatgtaactttataaatatttttaaaagatatagttttgtaaatatttaatattccgctaatttgattttgaattgtaaatgtcaagtattctgtttttggggtttttatgttttattatactttgttaaaaaggacaaattgtacatttttagaatgtttttatgagtaaatttaatgtactgaaaataaaaatttt

SEQ ID NO: 1667 - protein, 949 aa, Homo sapiens
MASNHPAFSFHQKQVLRQELTQIQSSLNGGGGHGGKGAPGPGGALPTCPACHKITPRTEAPVSSVSNSLENALHTSAHSTEESLPKRPLGKHSKVSVEKIDLKGLSHTKNDRNVECSFEVLWSDSSITSVTKSSSEVTEFISKLCQLYPEENLEKLIPCLAGPDAFYVERNHVDLDSGLRYLASLPSHVLKNDHVRRFLSTSSPPQQLQSPSPGNPSLSKVGTVMGVSGRPVCGVAGIPSSQSGAQHHGQHPAGSAAPLPHCSHAGSAGSALAYRTQMDTSPAILMPSSLQTPQTQEQNGILDWLRKLRLHKYYPVFKQLSMEKFLSLTEEDLNKFESLTMGAKKKLKTQLELEKEKSERRCLNPSAPPLVTSSGVARVPPTSHVGPVQSGRGSHAAELRVEVEQPHHQLPREGSSSEYSSSSSSPMGVQAREESSDSAEENDRRVEIHLESSDKEKPVMLLNHFTSSSARPTAQVLPVQNEASSNPSGHHPLPPQMLSAASHITPIRMLNSVHKPERGSADMKLLSSSVHSLLSLEERNKGSGPRSSMKVDKSFGSAMMDVLPASAPHQPVQVLSGLSESSSMSPTVSFGPRTKVVHASTLDRVLKTAQQPALVVETSTAATGTPSTVLHAARPPIKLLLSSSVPADSAISGQTSCPNNVQISVPPAIINPRTALYTANTKVAFSAMSSMPVGPLQGGFCANSNTASPSSHPSTSFANMATLPSCPAPSSSPALSSVPESSFYSSSGGGGSTGNIPASNPNHHHHHHHQQPPAPPQPAPPPPGCIVCTSCGCSGSCGSSGLTVSYANYFQHPFSGPSVFTFPFLPFSPMCSSGYVSAQQYGGGSTFPVVHAPYSSSGTPDPVLSGQSTFAVPPMQNFMAGTAGVYQTQGLVGSSNGSSHKKSGNLSCYNCGATGHRAQDCKQPSMDFNRPGTFRLKYAPPAESLDSTD

SEQ ID NO: 1668 - DNA, 1953 bp, Homo sapiens
cttaaatccagcaaaacattaaaacagaaacttttcaacttggagcctgccattcagcgttgaggtagatgagttccgacactgtcacggctgtgttcccagcagcgaaggcctctgcggagctgccagtcgtcttgaacgtgcatgggcggcgtgtgacatctccagggaggccgtccgaagtcgagaatcgtcagctgtaagtaggagctacacagcgcagagaaaatggaaccacccatccgtgaggcctctttccggagggagccgcacacttggacttgagagtttgccagcagcgagctcggatgcatctctccaaaagccaccaaggtcggcgcgtctgaagagcgttttgcggtcatcagacttcctcatctgaaaacacagaacatactgaccctttcaagtacttagtcattttcctgaaagtgtggtctgtttcagaatgctgtggcaaccaggtaggtgtggcactggccatgtgccacgtctttgccctttgtagtctgtcagatattaaagtttctaaccctgtttttttaatctccaagaatggggaaagtggaatgtagagatggaagcagaacgtgatgtttggatacaacagctatttaatccttttttattttttaagcaaaacactcagttttctaccttattttctaatgttgatttcatggtaatactgacagttggaagtgtttaacataaaaactcattgctaaagagcactgaggaaatgggagctagcgcacttgtaataaaaataaagacaaaatattttcttgaatgcatatatgtgattgggtattttaaaaaccagtatcatctgtcatctccaaaagattataggagtcagcttgttaatacagtagtgttagtaggttctgtatttttaattcagtacttagaattctaggtcctttattgcccaaagtcagcacagttagtttataccacagactctgtcttggggcacagtagtggggcggggtagtgactttgcctaaacatcacccagctggaacagaggctgagcggggctttaggcacttgccagatgggaactgggttgcaccctccttgctccctgtcattttcttgtcactcttcctgcttcccagtgttttattttatgccttgctcgttgtacatcatgatgactgatggtcttcaaggttgtgaggaaagccgtctccctgcttgactcgactgctgtcccagaggagagtcctgtgcgacctgagcgggggtggctgccatttccagcatgcaggtgacttccaaagaatgagtcaggtggcactgaaagccatgggttctgaagaggcgaatttgttgaaaagtcccaagggtctgaatgaaagcatctttaatcaacactcaacactcgcaatattctagaaaaccatatactgtgctggttgaggccaaaggttaacattgctccactgttcaccaaggaagggggcagtggccatccgccgcggcctcacgtgcgttgtaacaagccctcatcacatgtgtgagtcttacgtgcacaaaaagagaaggctttggtactgaaactggacaccttgtgtactcgataccttcacagcttctattggacatattttctttttaggaatgaaggaaaattctcccatttttgagccattcttttgtcaattctacaaaattgcatgtaactttataaatatttttaaaagatatagttttgtaaatatttaatattccgctaatttgattttgaattgtaaatgtcaagtattctgtttttggggtttttatgttttattatactttgttaaaaaggacaaattgtacatttttagaatgtttttatgagtaaatttaatgtactgaaaataaaaattttaaaaaaggaaaaaaaaaaaaaaaaaaaaaaaaaaaaaaaaaaaaaaaaaaaaaaaaaaaaaaaaaaaa

SEQ ID NO: 1669 - DNA, 5937 bp, Homo sapiens
ggctgaggactgactggggttctgagactccctgtcccggaccgcagattatagtgggaccagtctcattaggttgaatctacagcctatgttggtgttaacccaggtctcttagagcgttaaaaggatctgaacaaagtctgctcaaatctcctgctgtgaaccagcagaatttttgaacaggtttcttcacatataaaaatctattgtaaaaatacggaacagaatggcagcggaaacgcagacactgaactttgggcctgaatggctccgagctctgtccagtggtgggagtattacatcccctcctctttctccagcattgccgaagtataaattagcagattatcgttacggcagagaagaaatgttagcacttttccttaaagacaacaagataccttcagaccttctggataaagaatttctgcctatcctccaggaggaaccccttccaccattggctctggtaccctttacagaagaagaacagagaaacttttccatgtctgtaaatagtgctgctgtcctgcgattgacaggacgaggaggaggaggaacagtggtgggggctcctagaggtcgaagttcttcaagagggcgaggcagaggcagaggtgaatgtggtttctaccaaagaagttttgatgaagtagagggtgtttttggtcgaggaggtggcagagaaatgcatagatcgcagagctgggaggaaaggggtgacagacgttttgaaaaaccaggacgaaaagatgtaggaaagaagaatggatattattgcatgtactcaccagttcttttgctgggtcagcctttatgccaagggagaccaaattttgaggaaggtggaccaacatcagtagggagaaagcatgaatttatacgctcagaaagtgaaaattggcgcatctttagagaggaacaaaatggagaagatgaagatggaggttggcgactagctggatcaaggagggatggagagaggtggcgacctcacagtcctgatggccctcgttctgcaggctggcgggaacacatggaacgacgtcggaggtttgagtttgattttcgagatagagatgatgaacggggttaccgaagggttcgctctggcagtgggagcatagatgatgacagggatagcttgcccgaatggtgcttagaggatgctgaagaagaaatgggtacatttgactcatctggagcattcctttctctaaaaaaagtacagaaagagcctattccagaagagcaggagatggacttccggcctgtggacgaaggggaggagtgctctgactctgagggtagccataatgaagaggccaaagaacccgataagacaaataagaaagaaggagagaaaacagatagagtaggagttgctagtgaggaaactccccagacctcatcatcatctgctagaccaggtactccttcagaccatcagtctcaggaagcatcacagtttgagaggaaagatgaaccaaaaactgagcaaacggaaaaagctgaagaggagactcggatggaaaatagtctaccagccaaagtgcccagcagaggggatgaaatggttgctgatgtccagcagcccctgtcgcagattccttcagatacagcctctcctcttctcatacttccacctcctgttcccaatcctagtcctactctccggccagttgaaacaccagttgtaggtgctcctggtatgggcagtgtttccacagaacctgatgatgaagaaggtctcaaacatttggagcagcaagctgagaaaatggtggcttatctccaagacagtgcactagatgatgaaagattggcatcaaaactgcaagagcacagagctaaaggagtgtcgattccattgatgcatgaagcaatgcagaagtggtattacaaagatcctcagggagaaattcaaggtcccttcaataatcaggagatggcagaatggtttcaggcgggctattttactatgtctttattggtgaagagagcgtgtgatgaaagcttccaacctcttggcgatatcatgaaaatgtggggaagggttcccttttctccaggtccagctccccctcctcatatgggagagctggaccaggaacgactgaccaggcagcaagaactcacagccttataccagatgcagcacctgcagtaccagcagtttttaatacaacaacaatatgcacaggttttggcccaacagcagaaagcagcactgtcttcccagcagcagcagcagttggcacttcttcttcaacagtttcagaccttgaagatgagaatatctgatcagaacatcattccctcagtaactaggtctgtgtccgtgccagatactggctctatctgggagcttcagccaacagcttcacagcctacagtttgggaaggtggtagtgtatgggatcttcctctggacaccacgacaccaggccctgccctggaacagcttcagcagctagagaaggccaaagctgcaaagctagagcaagagagaagagaggcagaaatgagggcaaaacgggaagaggaagagcgaaagaggcaggaagaactccgaagacaacaggaggaaattcttcggcgacagcaggaagaagaaaggaaaaggcgagaggaagaagaacttgcccgaaggaaacaggaagaggctctgcgtcgccagcgggagcaagaaattgcattaaggcgacagcgagaagaggaagaaagacagcagcaagaagaagctcttagaagactggaagagaggagaagagaagaggaagaaaggcggaagcaggaagaattgttacgcaaacaggaagaggaggctgcaaaatgggcccgggaagaagaagaagcccagcgtcgattagaggagaaccggctgcggatggaagaggaggcagccagactccggcatgaggaagaagaacggaagagaaaggagctggaggtccagcggcagaaggagttaatgcgccagaggcagcagcagcaagaggctctccggaggttgcagcagcagcagcagcaacaacagctggcgcagatgaagcttccttcttcttcaacgtggggccagcagtccaatacaacagcatgtcagtcccaggccacgctgtcgttggctgaaatccaaaaactagaggaagaacgagaacggcagcttcgagaagagcaaaggcgccagcagagggagttgatgaaagctcttcagcagcagcagcaacagcaacagcagaaactctcaggttgggggaatgtcagcaaaccttcaggtaccacgaaatctcttctggagatccagcaggaagaggccaggcaaatgcaaaagcagcagcagcagcagcagcaacaccagcaaccaaacagagctcgtaacaatacgcattccaacctgcacaccagcattgggaattctgtttggggctctataaatactggtcctcctaaccagtgggcatctgacctagtcagtagtatttggagtaatgctgacactaaaaactccaacatgggattctgggatgatgcagtgaaagaggtgggacctaggaattcaacaaataaaaataaaaacaacgccagtctcagtaaatctgtaggtgtgtctaaccggcagaataagaaagtagaagaagaagaaaagttgctgaagctctttcagggagtaaataaagcccaagatggatttacgcagtggtgtgaacagatgcttcatgcccttaatacggcaaataacttggatgttcccacatttgtttctttcctgaaagaagtagaatctccttatgaggtccatgattatatcagggcctatttaggagatacttctgaggccaaggagtttgccaagcagttccttgagcgccgtgccaaacagaaagccaaccagcagcgtcagcagcagcagctgccacagcagcagcagcagcagccgccacagcagccgccacagcagccacaacagcaggactctgtgtgggggatgaaccacagtacactccattcagtatttcagaccaatcaaagcaacaaccaacaatccaattttgaggctgtgcagagtggcaagaagaagaaaaagcagaagatggtccgagcagatcccagtttattaggattttcagtcaatgcatcatcggagcgactcaacatgggtgaaatcgagacgttggatgactactgagcacctgccagtggactggccatccctctcctgtctgccgactatggagtctccacctttggacacaacacttactcaccatttactctttatcactctgcaacaaatcacagaaccgatcatctcaggctttttcttctggccctttgtgtccaagattctttaatccatttttgttggtgaacatctcagactatagataagtggactggaccctgtgtcttgggggtggcagttgggattactccccaacaaggctgattttaggcagcatgtgttcactgtgctgtgatttcatctactgtctcccagaaagtgtgttgggatcggccattagcagcttgctttctcttgtcactttttttcttctattttgttttttcttcttctttttccccccatcagggcaaatggtctaactggtgcaatcatgaagagagttaatggttaacagacattggccaataacaaaacaccccatggactgtgactcgagtatccaacaggcagtcagagctctcccggtctgaaagttgcattgccactgctaactttgggattgcatcagagaggccctgagtggggttgagatgaggttggtttggtttgatgttacacactcctcacctgttctttctgagtgtcctttctctgaaaggatttatgtttttcttcgttagatagtgacttctgagcaagctgatctcccctggcatgctccaacctgattggacaaaggaagctctatggcctgggagagagactattcttaatttttctttcttacaaaaactgatttttcccataaatatttttacttcagaggactaggaccattttgttttgggcccttctgctgaaaatttgtctcgtttaagaggcagctagaatctttaccatatgtatgaatttgtataatttcatttttggatagggataaacttttgcttctgataaaagcctggaatttcatctggtcctcagagcattgcgtgtgtgtcttgctgtagcccggaaaaggttttgtgtaaagattctgggatggcaagttgtttgccttttctgaaaagagaacatacagaacctgtccatctttaagaccttcatccatggaatctactatacaggaggatgcagtgggctggaggggatgggcgaaaatgggagcaggaagcctggcctggcttctggtcatggcctcctaaaaccttaaacttcaagtagaaatgtactcaagccctatttataaacaaatacttttcctgcctccaccaaacccctacagaacatcacctggaattgccactcacactgggttggagtcattgggcagctgtgcctgtgcgagaggtgctgtggtctgggcagcccctggaaaagcacctttgctgcctgtcattgttgcctgaagaaggctggagttgctctgagagcagtttgggtttggagtattatatttggcttctatttttattattttggatcaccattctccctatcccttcttgcctccctcccttctaaacatgtgtaataactatacagagactgctacaaaattgtatatagtttttggatcaaatagcatgaggggagaggaaaccattaaaagttggggctcctactctcctttgctttgtaaattcaaaagttgggggtgggtaagagggatagttaaaatgtttacaaaactttaggctccctcggaacttttgccagtgtggaggaaaataaaaaagaacttaaat

SEQ ID NO: 1670 - protein, 1329 aa, Homo sapiens
KSIVKIRNRMAAETQTLNFGPEWLRALSSGGSITSPPLSPALPKYKLADYRYGREEMLALFLKDNKIPSDLLDKEFLPILQEEPLPPLALVPFTEEEQRNFSMSVNSAAVLRLTGRGGGGTVVGAPRGRSSSRGRGRGRGECGFYQRSFDEVEGVFGRGGGREMHRSQSWEERGDRRFEKPGRKDVGKKNGYYCMYSPVLLLGQPLCQGRPNFEEGGPTSVGRKHEFIRSESENWRIFREEQNGEDEDGGWRLAGSRRDGERWRPHSPDGPRSAGWREHMERRRRFEFDFRDRDDERGYRRVRSGSGSIDDDRDSLPEWCLEDAEEEMGTFDSSGAFLSLKKVQKEPIPEEQEMDFRPVDEGEECSDSEGSHNEEAKEPDKTNKKEGEKTDRVGVASEETPQTSSSSARPGTPSDHQSQEASQFERKDEPKTEQTEKAEEETRMENSLPAKVPSRGDEMVADVQQPLSQIPSDTASPLLILPPPVPNPSPTLRPVETPVVGAPGMGSVSTEPDDEEGLKHLEQQAEKMVAYLQDSALDDERLASKLQEHRAKGVSIPLMHEAMQKWYYKDPQGEIQGPFNNQEMAEWFQAGYFTMSLLVKRACDESFQPLGDIMKMWGRVPFSPGPAPPPHMGELDQERLTRQQELTALYQMQHLQYQQFLIQQQYAQVLAQQQKAALSSQQQQQLALLLQQFQTLKMRISDQNIIPSVTRSVSVPDTGSIWELQPTASQPTVWEGGSVWDLPLDTTTPGPALEQLQQLEKAKAAKLEQERREAEMRAKREEEERKRQEELRRQQEEILRRQQEEERKRREEEELARRKQEEALRRQREQEIALRRQREEEERQQQEEALRRLEERRREEEERRKQEELLRKQEEEAAKWAREEEEAQRRLEENRLRMEEEAARLRHEEEERKRKELEVQRQKELMRQRQQQQEALRRLQQQQQQQQLAQMKLPSSSTWGQQSNTTACQSQATLSLAEIQKLEEERERQLREEQRRQQRELMKALQQQQQQQQQKLSGWGNVSKPSGTTKSLLEIQQEEARQMQKQQQQQQQHQQPNRARNNTHSNLHTSIGNSVWGSINTGPPNQWASDLVSSIWSNADTKNSNMGFWDDAVKEVGPRNSTNKNKNNASLSKSVGVSNRQNKKVEEEEKLLKLFQGVNKAQDGFTQWCEQMLHALNTANNLDVPTFVSFLKEVESPYEVHDYIRAYLGDTSEAKEFAKQFLERRAKQKANQQRQQQQLPQQQQQQPPQQPPQQPQQQDSVWGMNHSTLHSVFQTNQSNNQQSNFEAVQSGKKKKKQKMVRADPSLLGFSVNASSERLNMGEIETLDDY

SEQ ID NO: 1671 - DNA, 1251 bp, Homo sapiens
acgccgcctgggtcccagtccccgtcccatcccccggcggcctaggcagcgtttccagccccgagaactttgttctttttgtcccgccccctgcgcccaaccgcctgcgccgccttccggcccgagttctggagactcaacatgaagctaccggccagggttttctttactctggggtcccggctgccctgtggcctcgctcctcggaggtttttcagttatgggacaaaaatattatatcaaaacactgaagctttgcaatctaaattcttttcacctcttcaaaaagcgatgctaccacctaatagttttcaaggaaaagtggcattcattactgggggaggtactggccttggtaaaggaatgacaactcttctgtccagcctaggtgctcagtgcgtgatagccagccggaagatggatgttttgaaagctaccgcagaacaaatttcttctcaaactggaaataaggttcatgcaattcagtgtgatgtgagggatcctgatatggttcaaaacactgtgtcagaactgatcaaagttgcaggacatcctaatattgtgataaacaatgcagcagggaattttatttctcctactgaaagactttctcctaatgcttggaaaaccataactgacatagttctaaatggcacagccttcgtgacactagaaattggaaaacaactaattaaagcacagaaaggagcagcatttctttctattactactatctatgctgagactggttcaggttttgtagtaccaagtgcttctgccaaagcaggtgtggaagccatgagcaagtctcttgcagctgaatggggtaaatatggaatgcgattcaatgtgattcaaccagggcctataaaaaccaaaggtgcctttagccgtctggacccaactggaacatttgagaaagaaatgattggcagaattccctgtggtcgcctggggactgtagaagaactcgcaaatcttgctgctttcctttgtagtgattatgcttcttggattaatggagcagtcattaaatttgacggtggagaggaagtacttatttcaggggaattcaacgacctgagaaaggtcaccaaggagcagtgggacaccatagaagaactcatcaggaagacaaaaggttcctaagaccactttggccttcatcttggttacagaaaagggaatagaaatgaaacaaattatctctcatcttttgactatttcaagtctaataaattcttaattaac

SEQ ID NO: 1672 - protein, 335 aa, Homo sapiens
MKLPARVFFTLGSRLPCGLAPRRFFSYGTKILYQNTEALQSKFFSPLQKAMLPPNSFQGKVAFITGGGTGLGKGMTTLLSSLGAQCVIASRKMDVLKATAEQISSQTGNKVHAIQCDVRDPDMVQNTVSELIKVAGHPNIVINNAAGNFISPTERLSPNAWKTITDIVLNGTAFVTLEIGKQLIKAQKGAAFLSITTIYAETGSGFVVPSASAKAGVEAMSKSLAAEWGKYGMRFNVIQPGPIKTKGAFSRLDPTGTFEKEMIGRIPCGRLGTVEELANLAAFLCSDYASWINGAVIKFDGGEEVLISGEFNDLRKVTKEQWDTIEELIRKTKGS

SEQ ID NO: 1673 - DNA, 1878 bp, Homo sapiens
gcttcggagcggccggtactgttgaaagcgacaagtggaggcgccgctctagcggccgggactctgaactatggcggctagtgatacagagcgagatggactagccccagaaaagacatcaccagatagagataagaaaaaagagcagtcagaagtatctgtttctcctagagcttcaaaacatcattattcaagatcacgatcaaggtcaagagaaagaaaacgaaagtcagataatgaaggaagaaaacacaggagccggagcagaagcaaagagggaagaagacatgaatccaaagataaatcctctaagaaacataagtctgaggaacataatgacaaagaacattcttctgataaaggaagagagcgactaaattcatctgaaaatggtgaggacaggcacaaacgcaaagaaagaaagtcatcaagaggcagaagtcactcaagatctaggtctcgtgaaagacgccatcgtagtagaagcagggagcggaagaagtctcgatccaggagtagggagcggaagaaatcgagatccagaagcagagagaggaagaaatcgagatccagaagcagggaaagaaaacggcggatcaggtctcgttcccgctcaagatcaagacacaggcataggactagaagcaggagtaggacaaggagtaggagtcgagatagaaagaagagaattgaaaagccgagaagatttagcagaagtttaagccggactccaagtccacctcccttcagaggcagaaacacagcaatggatgcacaggaagctttagctagaaggttggaaagggcaaagaaattacaagaacagcgagaaaaggaaatggttgaaaaacaaaaacaacaagaaatagctgcagctgcagctactggaggttctgttctcaatgttgctgccctgttggcatcaggaacacaagtaacacctcagatagccatggcagctcagatggcagccctgcaagctaaagctttggcagagacaggaatagctgttcctagctactataacccagccgctgttaatccaatgaaatttgctgaacaagagaaaaaaaggaaaatgctttggcagggcaagaaagaaggggacaaatcccaatctgctgaaatatgggaaaaattgaattttggaaacaaggaccaaaatgtcaaatttaggaaattgatgggtattaagagtgaagatgaagctggatgtagctcagttgatgaagaaagttacaagactctgaagcagcaggaagaagtatttcgaaatttagatgctcagtatgaaatggcaagatcacaaacccacacacaaagaggaatgggtttgggtttcacatcttcaatgcgaggaatggatgcagtttgaaaatgatcacacttgtaaagtttgggacttatagacttcttgttctgatgtcacgtccttgttcaccaaacagctagcactctagcttgcatgggtgttgcattgactttaatttattgaaaaatacaaatttttgtaaatatcagatcagtgatactggtgttagtgttgtaatcaggttaaacccacttccattaaacttgacaggactatagaaggataatattttttagttcatgaattctacttttcaaatatataaaagctgcaggtggggataaaatctcatacatggattttttcgtgtccgctgtcttgtgtacttttgtacttaaccttgtacagttattttcatctcttgaaacatgaaagaaatgttatgtagatgttctttagaagatctggccatttggtacataatccagcacagataagctgggtggtaatgataataaaaatggttttctcaaaaaaaaaaaaaaaaaaaaaaaaaaaaaaaaaaa

SEQ ID NO: 1674 - protein, 202 aa, Homo sapiens
MDAQEALARRLERAKKLQEQREKEMVEKQKQQEIAAAAATGGSVLNVAALLASGTQVTPQIAMAAQMAALQAKALAETGIAVPSYYNPAAVNPMKFAEQEKKRKMLWQGKKEGDKSQSAEIWEKLNFGNKDQNVKFRKLMGIKSEDEAGCSSVDEESYKTLKQQEEVFRNLDAQYEMARSQTHTQRGMGLGFTSSMRGMDAV

SEQ ID NO: 1675 - DNA, 3647 bp, Homo sapiens
agtgaatcggaaaggaggcgccggctgtggcggcggcgggagctgctcggaagctacacctcgcaagggctcccccctttccccaccccctcccccgacccttttcccctccccgggccacccagcccgcccaactcccagcggagagcaaggttttcttctgttttcatagccagccagaacaatgttctacgcacattttgttctcagtaaaagagggcctctggccaaaatttggctagcggcccattgggataagaagctaaccaaagcccatgtgttcgagtgtaatttagagagcagcgtggagagtatcatctcaccaaaggtgaaaatggcattacggacatcaggacatctcttactgggagtagttcgaatctatcacaggaaagccaaataccttcttgcagactgtaatgaagcattcattaagataaagatggcttttcggccaggtgtggttgacctgcctgaggaaaatcgggaagcagcttataatgccattactttacctgaagaatttcatgactttgatcagccactgcctgacttagatgacatcgatgtggcccagcagttcagcttgaatcagagtagagtggaagagataaccatgagagaagaagttgggaacatcagtattttacaagaaaatgattttggtgattttggaatggatgatcgtgagataatgagagaaggcagtgcttttgaggatgacgacatgttagtaagcactactacttctaacctcctattagagtctgaacagagcaccagcaatctgaatgagaaaattaaccatttagaatatgaagatcaatataaggatgataattttggagaaggaaatgatggtggaatattagatgacaaacttattagtaataatgatggcggtatctttgatgatccccctgccctctctgaggcaggggtgatgttgccagagcagcctgcacatgacgatatggatgaggatgataatgtatcaatgggtgggcctgatagtcctgattcagtggatcccgttgaaccaatgccaaccatgactgatcaaacaacacttgttccaaatgaggaagaagcatttgcattggagcctattgatataactgttaaagaaacaaaagccaagaggaagaggaagctaattgttgacagtgtcaaagagttggatagcaagacaattagagcccaacttagtgattattcagatattgttactactttggatctggcaccgcccaccaagaaattgatgatgtggaaagagacaggaggagtagaaaaactgttttctttacctgctcagcctttgtggaataacagactactgaagctctttacacgctgtcttacaccgcttgtaccagaagaccttagaaaaaggaggaaaggaggagaggcagataatttggatgaattcctcaaagaatttgaaaatccagaggttcctagagaggaccagcaacagcagcatcagcagcgtgatgttatcgatgagcccattattgaagagccaagccgcctccaggagtcagtgatggaggccagcagaacaaacatagatgagtcagctatgcctccaccaccacctcagggagttaagcgaaaagctggacaaattgacccagagcctgtgatgcctcctcagcaggtagagcagatggaaataccacctgtagagcttcccccagaagaacctccaaatatctgtcagctaataccagagttagaacttctgccagaaaaagagaaggagaaagagaaggaaaaagaagatgatgaagaggaagaggatgaagatgcatcagggggcgatcaagatcaggaagaaagaagatggaacaaaaggactcagcagatgcttcatggtcttcagcgtgctcttgctaaaactggagctgaatctatcagtttgcttgagttatgtcgaaatacgaacagaaaacaagctgccgcaaagttctacagcttcttggttcttaaaaagcagcaagctattgagctgacacaggaagaaccgtacagtgacatcatcgcaacacctggaccaaggttccatattatataaggagctagaagcattatagctagtgtttgattcactagtgcttacaaattgcccccatgtgtaggggacacagaaccctttgagaaaacttagatttttgtctgtacaaagtctttgcctttttccttcttcatttttttccagtacattaaatttgtcaatttcatctttgagggaaactgattagatgggttgtgtttgtgttctgatggagaaaacagcaccccaaggactcagaagatgattttaacagttcagaacagatgtgtgcaatattggtgcatgtaataatgttgagtggcagtcaaaagtcatgatttttatcttagttcttcattactgcattgaaaaggaaaacctgtctgagaaaatgcctgacagtttaatttaaaactatggtgtaagtctttgacaagaaaaaaaaacaaacaaacacttctttccatcagtaacactggcaatcttcctgttaaccactctccttagggatggtatctgaaacaacaatggtcaccctcttgagattcgttttaagtgtaattccataatgagcagaggtgtacgcgaaattgtgttatgactgatagccttcagctacaaaaagataggactgacctggtttaaagtgttctattttgtaaatcattccatttgagtctttctgatgaacttggctatactgaaatctgttattttagtgaggctccaaaatgagcaaagctaggcctgattagagtagagtgactattaaaaaacataactttctaggagctataaatcaaagttttaaaaagatgtttggatatatttgagtattccgatcatgaaaacagaaattgccctgcctactacaaggacagactgatgggaaattatgcacctggtcaacttagcttttaagcagacgatgctgtaaaaactaacggcttctctgatatttattgtaagttttagtactgatctccttttccagtgctgcacactcctggtttggaactttaatagcgttgcaacgaaatcctatatccagtttcctgtaatttaattgaagaaaaatacatccaaataaagactttattattaacagaccagatagcatcagaaatcatgtgactgttatgattatcagaatatgtcttaactttttagggcaaagttaacactgaaagttctagcttaagtgttgaaacttttgtgggaaaaaaaaatcacttttgaaactcagacttcagtgtatacccaataatttaaaattatgtgaaatgttttaaatttgtgaactcgtaattactgttttaatgattcagtttcttcagagtggtaattgtataaaattgctattgcagctttatattcaatatgatgtgcctgtaaaccaaggagttttccccgtttgtaaaaagacattgtagataattgaatgtttgattttagaaaggtcattagtttcttgttacacattttgttagtctggtttttgttgcttatcgggtttaatattgttcttgaaaatagttgatgctatgttatgtataacttttctaataaaagttgtgttataagctgt

SEQ ID NO: 1676 - protein, 631 aa, Homo sapiens
MFYAHFVLSKRGPLAKIWLAAHWDKKLTKAHVFECNLESSVESIISPKVKMALRTSGHLLLGVVRIYHRKAKYLLADCNEAFIKIKMAFRPGVVDLPEENREAAYNAITLPEEFHDFDQPLPDLDDIDVAQQFSLNQSRVEEITMREEVGNISILQENDFGDFGMDDREIMREGSAFEDDDMLVSTTTSNLLLESEQSTSNLNEKINHLEYEDQYKDDNFGEGNDGGILDDKLISNNDGGIFDDPPALSEAGVMLPEQPAHDDMDEDDNVSMGGPDSPDSVDPVEPMPTMTDQTTLVPNEEEAFALEPIDITVKETKAKRKRKLIVDSVKELDSKTIRAQLSDYSDIVTTLDLAPPTKKLMMWKETGGVEKLFSLPAQPLWNNRLLKLFTRCLTPLVPEDLRKRRKGGEADNLDEFLKEFENPEVPREDQQQQHQQRDVIDEPIIEEPSRLQESVMEASRTNIDESAMPPPPPQGVKRKAGQIDPEPVMPPQQVEQMEIPPVELPPEEPPNICQLIPELELLPEKEKEKEKEKEDDEEEEDEDASGGDQDQEERRWNKRTQQMLHGLQRALAKTGAESISLLELCRNTNRKQAAAKFYSFLVLKKQQAIELTQEEPYSDIIATPGPRFHII

SEQ ID NO: 1677 - DNA, 1691 bp, Homo sapiens
tgcggccgcgtttccgtggagacagccgagcctgcggaaggcggcggcggcggcacctgcgatcagcggctggggcaggttatggtagtgcggactgcggtgtgagcagagcggccacggggcccgccatgcgccggcggccctgacatgggcgccagcgggtccaaagctcggggcctgtggcccttcgcctcggcggccggaggcggcggctcagaggcagcaggagctgagcaagctttggtgcggcctcggggccgagctgtgccccccttcgtattcacgcgccgcggctctatgttctatgatgaggatggggatctggctcacgagttctatgaggagacaatcgtcaccaagaacgggcagaagcgggccaagctgaggcgagtgcataagaatctgattcctcagggcatcgtgaagctggatcacccccgcatccacgtggatttccctgtgatcctctatgaggtgtgaccctgggaggtggcagacagaagcaccccctgccccggcaagaaactcccaggctcaatcaaggtgtggcttccattgaggagcccaggctggggccacaaccctgaataaactctgttggcccataaccttcagctgtgagcgggtcggtcccacagtattggttgggtgttggtttgtgtgtggacaagaggtggttggtgggtggtgaaggctaatggcagagttagcaccccactctcccaagccacccctgcaagcagcatagcagggcatataccagtcaggaatgcccgttacctggttccttgcctggtctgctttcttccaagtttgcctggggcctagccctgctagaggctacagcactttacaagcaaggtatgctttcttccagcccctaggctgtgggcactgtatacaagtaggaacttcctttccttcacttcccttttaacccctagtcagagcatttcagccgtttgctacctcgattcctcctgtgttggacagaggctgggggcagtgccagcctgattcttccgacctacctgccatttgttcccgccttcagatggatggacagtttgctggctattgataggagtggggactgggtgggggcttctccctctacccagggctgggctgatccccctactgcaactaactgttgccccccaaccccgaacccccagttgaggagttgagagagtgcaggctggggtcaggacaggctgcggatgcttgtgcctatggggagttactccaacccacctattctgtctaatctccatggctttgcaccaaatcctccacccctccaattgggaggggactgttcaccaccttgtggtaagggacaacaccctaaggctggtgccagtagttatgagtagcctaccaccccctcccttacagtaacccccaccccttcaggatcagtcaagggaaagcactagaacccctgggtagggaaagaaaggagggaaaaaccataaaaggaatacttataatgtgaaggtttgtaaatagtccatgatgatgtcgtggcagagtctgatttctatatagaggtgactttttttttaagtactgtgcaagctctgtgcttctataatgtgggaaatggcttggggaggatggcccctagcttaggaagactgttgtgttatttgttcaatttcaataaaatgatttgtagatcctgc

SEQ ID NO: 1678 - protein, 110 aa, Homo sapiens
MGASGSKARGLWPFASAAGGGGSEAAGAEQALVRPRGRAVPPFVFTRRGSMFYDEDGDLAHEFYEETIVTKNGQKRAKLRRVHKNLIPQGIVKLDHPRIHVDFPVILYEV

SEQ ID NO: 1679 - DNA, 799 bp, Homo sapiens
cgggcgaagcagcgcgggcagcgagatgcagcaccgaggcttcctcctcctcaccctcctcgccctgctggcgctcacctccgcggtcgccaaaaagaaagataaggtgaagaagggcggcccggggagcgagtgcgctgagtgggcctgggggccctgcacccccagcagcaaggattgcggcgtgggtttccgcgagggcacctgcggggcccagacccagcgcatccggtgcagggtgccctgcaactggaagaaggagtttggagccgactgcaagtacaagtttgagaactggggtgcgtgtgatgggggcacaggcaccaaagtccgccaaggcaccctgaagaaggcgcgctacaatgctcagtgccaggagaccatccgcgtcaccaagccctgcacccccaagaccaaagcaaaggccaaagccaagaaagggaagggaaaggactagacgccaagcctggatgccaaggagcccctggtgtcacatggggcctggccacgccctccctctcccaggcccgagatgtgacccaccagtgccttctgtctgctcgttagctttaatcaatcatgccctgccttgtccctctcactccccagccccacccctaagtgcccaaagtggggagggacaagggattctgggaagcttgagcctcccccaaagcaatgtgagtcccagagcccgcttttgttcttccccacaattccattactaagaaacacatcaaataaactgactttttccccccaataaaagctcttcttttttaatataaaaaaaaaaaaa

SEQ ID NO: 1680 - protein, 143 aa, Homo sapiens
MQHRGFLLLTLLALLALTSAVAKKKDKVKKGGPGSECAEWAWGPCTPSSKDCGVGFREGTCGAQTQRIRCRVPCNWKKEFGADCKYKFENWGACDGGTGTKVRQGTLKKARYNAQCQETIRVTKPCTPKTKAKAKAKKGKGKD

SEQ ID NO: 1681 - DNA, 2132 bp, Homo sapiens
gcgactctcccgggctgccagccgggacgcgcggccgccgccgctgcagacgacgagtccgccctcgtcccgcgcccccggggctcgcggagccaggtctccacctctgggcaggagagttgccgaccacctcgggggtgctttctctgcgcttgaacatctatagctgcttctgaggggctgggagccgggcccctgggagagacgagccatgaaccccccacagcctctgcatttggggacctcaccttaggagagtgccatttacagcttccgccagggcaaaggagctgagcagccatcccaagcccagcccacctccctcccccggcccctggtaggcatggactagcagctgtgagcagccagagctgatgcccggcccccaggggggcagaggcgccgccaccatgagcctgggcaagctctcgcctgtgggctgggtgtccagttcacagggaaagaggcggctgactgcagacatgatcagccacccactcggggacttccgccacaccatgcatgtgggccgtggcggggatgtcttcggggacacgtccttcctcagcaaccacggtggcagctccgggagcacccatcgctcaccccgcagcttcctggccaagaagctgcagctggtgcggagggtgggggcgcccccccggaggatggcatctccccctgcaccctccccggctccaccggccatctcccccatcatcaagaacgccatctccctgccccagctcaaccaggccgcctacgacagcctcgtggttggcaagctcagcttcgacagcagccccaccagctccacggacggccactccagctacggcctggactctgggttctgcaccatctcccgcctgccccgctcggaaaagccgcatgaccgagaccgggatggttccttcccctctgagcccgggcttcgccgctctgactctctcttgtccttccgcctggacctcgaccttgggccctcactcctcagcgagctgctaggggtcatgagcctcccagaagcccctgcagctgagactccagcccccgctgcaaaccccccagcccctactgcaaaccccacgggtcctgctgcaaaccccccagccactactgcaaaccccccagcacctgccgcaacccccacgggtcctgctgcaaatcccccagcccctgccgcaagctccacaccccatggacactgtcccaatggggtaacagctgggttgggcccagtggctgaggtgaagtccagcccagtgggagggggtccccgaggacctgctggccctgccctcggcaggcactggggagcaggctgggatggcggccaccactacccagagatggatgcgcggcaggagcgggtggaggtgctgccccaagcccgggcctcctgggagagcctggacgaagagtggagggcgccccaggcaggcagcaggaccccagtgcccagcacagtgcaagcaaacacctttgaatttgcggatgctgaggaggatgatgaggtcaaggtgtgaggggctggggcacggtcccagggccccacctaggtgcagagccggcccctcacctaacagctggttcctaccagaccggagaggggagaagtcatgttgcccctaaacccctccccacctctgcaggacagacatgggagggaggacagggaaggccaggcttgctctgggacttttatgctcccagaggccctgccaaactgaccacctcccccgactgccactctggacctaatagctgttccttaggccccactccatgccacccccaccagctggaggacccagcctcacagtgtgtcctttgtgccagaccaagcggcccgtggggggtggggggcagggagtgtaccacacagggccattgtctcacctcccaaagggaccgcctgcccccagctcatcccagagcgtccctgctgcaaccctgacagccgtctcccaggccgcttccccaacatccccgccccagcctccctcttaccccagaaaggtcaggtatgacctcccggggaggaatcccacctgcctgtataccccagacttgcctctggggcctgattaaataaggctgttttgataaaaaaaaaaaaaaaaaaaaaa

SEQ ID NO: 1682 - protein, 384 aa, Homo sapiens
MPGPQGGRGAATMSLGKLSPVGWVSSSQGKRRLTADMISHPLGDFRHTMHVGRGGDVFGDTSFLSNHGGSSGSTHRSPRSFLAKKLQLVRRVGAPPRRMASPPAPSPAPPAISPIIKNAISLPQLNQAAYDSLVVGKLSFDSSPTSSTDGHSSYGLDSGFCTISRLPRSEKPHDRDRDGSFPSEPGLRRSDSLLSFRLDLDLGPSLLSELLGVMSLPEAPAAETPAPAANPPAPTANPTGPAANPPATTANPPAPAATPTGPAANPPAPAASSTPHGHCPNGVTAGLGPVAEVKSSPVGGGPRGPAGPALGRHWGAGWDGGHHYPEMDARQERVEVLPQARASWESLDEEWRAPQAGSRTPVPSTVQANTFEFADAEEDDEVKV

SEQ ID NO: 1683 - DNA, 2135 bp, Homo sapiens
gcgactctcccgggctgccagccgggacgcgcggccgccgccgctgcagacgacgagtccgccctcgtcccgcgcccccggggctcgcggagccaggtctccacctctgggcaggagagttgccgaccacctcgggggtgctttctctgcgcttgaacatctatagctgcttctgaggggctgggagccgggcccctgggagagacgagccatgaaccccccacagcctctgcatttggggacctcaccttaggagagtgccatttacagcttccgccagggcaaaggagctgagcagccatcccaagcccagcccacctccctcccccggcccctggtaggcatggactagcagctgtgagcagccagagctgatgcccggcccccaggggggcagaggcgccgccaccatgagcctgggcaagctctcgcctgtgggctgggtgtccagttcacagggaaagaggcggctgactgcagacatgatcagccacccactcggggacttccgccacaccatgcatgtgggccgtggcggggatgtcttcggggacacgtccttcctcagcaaccacggtggcagctccgggagcacccatcgctcaccccgcagcttcctggccaagaagctgcagctggtgcggagggtgggggcgcccccccggaggatggcatctccccctgcaccctccccggctccaccggccatctcccccatcatcaagaacgccatctccctgccccagctcaaccaggccgcctacgacagcctcgtggttggcaagctcagcttcgacagcagccccaccagctccacggacggccactccagctacggcctggactctgggttctgcaccatctcccgcctgccccgctcggaaaagccgcatgaccgagaccgggatggttccttcccctctgagcccgggcttcgccgctctgactctctcttgtccttccgcctggacctcgaccttgggccctcactcctcagcgagctgctaggggtcatgagcctcccagaagcccctgcagctgagactccagcccccgctgcaaaccccccagcccctactgcaaaccccacgggtcctgctgcaaaccccccagccactactgcaaaccccccagcgcctgctgcaaacccctcagcacctgccgcaacccccacgggtcctgctgcaaatcccccagcccctgccgcaagctccacaccccatggacactgtcccaatggggtaacagctgggttgggcccagtggctgaggtgaagtccagcccagtgggagggggtccccgaggacctgctggccctgccctcggcaggcactggggagcaggctgggatggcggccaccactacccagagatggatgcgcggcaggagcgggtggaggtgctgccccaagcccgggcctcctgggagagcctggacgaagagtggagggcgccccaggcaggcagcaggaccccagtgcccagcacagtgcaagcaaacacctttgaatttgcggatgctgaggaggatgatgaggtcaaggtgtgaggggctggggcacggtcccagggccccacctaggtgcagagccggcccctcacctaacagctggttcctaccagaccggagaggggagaagtcatgttgcccctaaacccctccccacctctgcaggacagacatgggagggaggacagggaaggccaggcttgctctgggacttttatgctcccagaggccctgccaaactgaccacctcccccgactgccactctggacctaatagctgttccttaggccccactccatgccacccccaccagctggaggacccagcctcacagtgtgtcctttgtgccagaccaagcggcccgtggggggtggggggcagggagtgtaccacacagggccattgtctcacctcccaaagggaccgcctgcccccagctcatcccagagcgtccctgctgcaaccctgacagccgtctcccaggccgcttccccaacatccccgccccagcctccctcttaccccagaaaggtcaggtatgacctcccggggaggaatcccacctgcctgtataccccagacttgcctctggggcctgattaaataaggctgttttgataaaa

SEQ ID NO: 1684 - protein, 391 aa, Homo sapiens
MPGPQGGRGAATMSLGKLSPVGWVSSSQGKRRLTADMISHPLGDFRHTMHVGRGGDVFGDTSFLSNHGGSSGSTHRSPRSFLAKKLQLVRRVGAPPRRMASPPAPSPAPPAISPIIKNAISLPQLNQAAYDSLVVGKLSFDSSPTSSTDGHSSYGLDSGFCTISRLPRSEKPHDRDRDGSFPSEPGLRRSDSLLSFRLDLDLGPSLLSELLGVMSLPEAPAAETPAPAANPPAPTANPTGPAANPPATTANPPAPAANPSAPAATPTGPAANPPAPAASSTPHGHCPNGVTAGLGPVAEVKSSPVGGGPRGPAGPALGRHWGAGWDGGHHYPEMDARQERVEVLPQARASWESLDEEWRAPQAGSRTPVPSTVQANTFEFADAEEDDEVKV

SEQ ID NO: 1685 - DNA, 595 bp, Homo sapiens
gggcaaggctgggccgggaagggcgtgggttgaggagaggctccagacccgcacgccgcgcgcacagagctctcagcgccgctcccagccacagcctcccgcgcctcgctcagctccaacatggcaaaaatctccagccctacagagactgagcggtgcatcgagtccctgattgctgtcttccagaagtatgctggaaaggatggttataactacactctctccaagacagagttcctaagcttcatgaatacagaactagctgccttcacaaagaaccagaaggaccctggtgtccttgaccgcatgatgaagaaactggacaccaacagtgatggtcagctagatttctcagaatttcttaatctgattggtggcctagctatggcttgccatgactccttcctcaaggctgtcccttcccagaagcggacctgaggaccccttggccctggccttcaaacccaccccctttccttccagcctttctgtcatcatctccacagcccacccatcccctgagcacactaaccacctcatgcaggccccacctgccaatagtaataaagcaatgtcacttttttaaaacatgaaa

SEQ ID NO: 1686 - protein, 105 aa, Homo sapiens
MAKISSPTETERCIESLIAVFQKYAGKDGYNYTLSKTEFLSFMNTELAAFTKNQKDPGVLDRMMKKLDTNSDGQLDFSEFLNLIGGLAMACHDSFLKAVPSQKRT

SEQ ID NO: 1687 - DNA, 2999 bp, Homo sapiens
agttacccgggcagcctcgggaccggtcaccggccggcaaccgtccagcggcctcgaccaccgcctctagcctccgttcccggtcctttctcccgggccgagagacagcgtcgccgacaggggctcattcccctccggttctcctcggtgactcacctcgggcgggccgttttgtctttaggggccgccttggtggggcgaggtttccgtgacgaatctcctggggccgtccgtgccggctcgggccgtcgtggcgactcgagctcctggaacttgctcaggctccggaggtccgaggccctcgaagttatgcgtcgcctccaggcggttgcggcgggcgcgggctcctaaagggcgtcacacccggactccgccgactaggcaacctccattcatctttccactgcgcctccagcgcccccgccttctccggtcccctcctcggagtcattttttcctgttccccctctgccgccctttcctcacgccccgggtgaggcaattctcttggaagcgaaggtgtcggctatgagccggagcctccttccttgaatttctccgtggaggacccgccgcgccccccggcatgggggtgaacgccgtgcactggttccgaaaggggctccggctccacgacaaccccgccctgaaggagtgcattcagggcgccgacaccatccgctgcgtctacatcctggacccctggttcgccggctcctccaatgtgggcatcaacaggtggcgatttttgcttcagtgtcttgaggatcttgatgccaatctacgaaaattaaactcccgtctgtttgtgattcgtggacaaccagcagatgtgtttcccaggcttttcaaggaatggaacattactaaactttcaattgagtatgattctgagccctttggaaaggaacgagacgcagctattaagaaactggcgactgaagctggagtagaagtcattgtaagaatttcacatacattatatgacctagacaagatcatagaactcaatggtggacaaccgcctctaacttataaaagattccagactctcatcagcaaaatggaaccactagagataccagtagagacaattacttcagaagtgatagaaaagtgcacaactcctctgtctgatgaccatgatgagaaatatggagtcccttcactggaagagctaggttttgatacagatggcttatcctctgcagtgtggccaggcggagaaactgaagcacttactcgtttggaaaggcatttggaaagaaaagcttgggtggcaaattttgaaagacctcgaatgaatgcgaattctctgcttgcaagccctactggacttagtccttatctccgatttggttgtttgtcatgtcgactgttttacttcaaactaacagatctctacaaaaaggtaaagaagaacagttcccctcccctttccctttatgggcaactgttatggcgtgaatttttctatacagcagcaacaaataatccacgctttgataaaatggaaggaaaccctatctgtgttcagattccttgggataaaaatcctgaggctttagccaaatgggcggaaggccggacaggctttccatggattgatgccatcatgacacagcttcgtcaggagggttggattcatcatctagccaggcatgcagttgcttgcttcctgacacgaggggacctgtggattagttgggaagaaggaatgaaggtatttgaagaattattgcttgatgcagattggagcataaatgctggaagttggatgtggctgtcttgtagttccttttttcaacagttttttcactgctattgccctgttggttttggtaggagaacagatcccaatggagactatatcaggcgttatttgcctgtcctaagaggcttccctgcaaaatatatctatgatccctggaatgcaccagaaggtatccaaaaggtagccaaatgtttgataggagttaattatcctaaaccaatggtgaaccatgctgaggcaagccgtttgaatatcgaaaggatgaaacagatctatcagcagctttcacgatatagaggactaggtcttctggcatcagtaccttctaatcctaatgggaatggaggcttcatgggatattctgcagaaaatatcccaggttgtagcagcagtggaagttgctctcaagggagtggtattttacactatgctcatggcgacagtcagcaaactcacctgttgaagcaaggaagaagctccatgggcactggtctcagtggtgggaaacgtcctagtcaggaagaggacacacagagtattggtcctaaagtccagagacagagcactaattagaaaacattcaggaggaatactgttgcagctgaaattggtggggagttcaatagcttttcaattaagttatttaaaaatattcttcattgatggaaagcagttacatattgaaatatgttgtttctaatgacatttctgtggtttttaactttttaatgaatttcacagaggacaattggtaatttgtatataaagaacttggcaagagaatttgcttaatgtaaatataaacagtcacaattagtatagacccatcgatatatttttgataatttttcatgtatggtaaagttaaaatgacaaattgatattctgatataaaactcaaagtttgaagtcagtgggaaaaaaggaggtttttagactttcttaaaagacgttaaaattttaggacagaattttcttgatgttgtttaatctaactttgcactctttgataataatgttttagataatgtcgtaatccaaattggtattgtagcctctgttaacacagacagtatatgttttaaactttgatgtaaacctttttagacccaaacttgtggaagtatcatgtgttaagttctctgtctctgtttctttgttcatttattactaaaatgaacttgttattaaagtatatgcaaatatgaaaaaaaaaaaaaaaaaa

SEQ ID NO: 1688 - protein, 586 aa, Homo sapiens
MGVNAVHWFRKGLRLHDNPALKECIQGADTIRCVYILDPWFAGSSNVGINRWRFLLQCLEDLDANLRKLNSRLFVIRGQPADVFPRLFKEWNITKLSIEYDSEPFGKERDAAIKKLATEAGVEVIVRISHTLYDLDKIIELNGGQPPLTYKRFQTLISKMEPLEIPVETITSEVIEKCTTPLSDDHDEKYGVPSLEELGFDTDGLSSAVWPGGETEALTRLERHLERKAWVANFERPRMNANSLLASPTGLSPYLRFGCLSCRLFYFKLTDLYKKVKKNSSPPLSLYGQLLWREFFYTAATNNPRFDKMEGNPICVQIPWDKNPEALAKWAEGRTGFPWIDAIMTQLRQEGWIHHLARHAVACFLTRGDLWISWEEGMKVFEELLLDADWSINAGSWMWLSCSSFFQQFFHCYCPVGFGRRTDPNGDYIRRYLPVLRGFPAKYIYDPWNAPEGIQKVAKCLIGVNYPKPMVNHAEASRLNIERMKQIYQQLSRYRGLGLLASVPSNPNGNGGFMGYSAENIPGCSSSGSCSQGSGILHYAHGDSQQTHLLKQGRSSMGTGLSGGKRPSQEEDTQSIGPKVQRQSTN

SEQ ID NO: 1689 - DNA, 847 bp, Homo sapiens
gcgagcggcttccgccgggctgctccgcgggcgcgtcggccatgagcgagttgccgggcgacgtgcgggcgtttctgcgggagcacccgagcctgcggctccagacggacgcccgcaaggtgaggtgcatcctgacaggtcacgagctgccctgccgcctgccggagctccaggtctacacccgcggcaaaaagtaccagcggctggtccgcgcctccccggccttcgactatgcagagttcgagccgcacatcgtgcccagcaccaagaacccgcaccagttgttctgcaaactcaccctgcggcacatcaacaagtgcccagaacacgtgctgaggcacacccagggccggcggtaccagcgagctctgtgtaaatatgaagaatgtcagaagcaaggggtggagtacgtgcctgcctgcctggtgcaccggaggaggaggagggaggaccagatggacggtgacgggcctcgcccgcgggaagccttctgggagcccacatccagtgatgaggggggagctgcaagtgatgacagcatgacagacctgtacccacctgagctattcaccagaaaggaccttggaagcacggaggatggggatggcactgatgactttttgacagacaaagaggatgagaaggcaaagcccccaagagagaaggccactgatgagggcaggagagagacgaccgtgtaccgagggctggtccagaagcgcgggaagaagcagttgggctcgttgaaaaagaagttcaagagtcatcaccgcaaacccaagagcttcagctcctgtaaacagccaggttaataaaagcacatgccgtgaaaaaaaaaaaaaaaaaa

SEQ ID NO: 1690 - protein, 256 aa, Homo sapiens
MSELPGDVRAFLREHPSLRLQTDARKVRCILTGHELPCRLPELQVYTRGKKYQRLVRASPAFDYAEFEPHIVPSTKNPHQLFCKLTLRHINKCPEHVLRHTQGRRYQRALCKYEECQKQGVEYVPACLVHRRRRREDQMDGDGPRPREAFWEPTSSDEGGAASDDSMTDLYPPELFTRKDLGSTEDGDGTDDFLTDKEDEKAKPPREKATDEGRRETTVYRGLVQKRGKKQLGSLKKKFKSHHRKPKSFSSCKQPG

SEQ ID NO: 1691 - DNA, 2885 bp, Homo sapiens
gcattcccccgcgcggagccgaagcagccgcaacgagccgggagctgagccgcgctgcgctgcggtgcgaagagccgggcggcggccagagccctccccgcgctgccagtgggacgcggagccagggatccccggctttgccccggggctggggtgcaacagactcttaacttggtcctcgcgccccgccaaccgcccccgggcaggaaacggccagaaccaccaccgcgccgcgctccacaaaagccccgggagttccaagacgggagggatcgggcgcgctccagaggcaggagggtcccccacaccctcaggctcatgcccagctcccccatcggacagcccccagccccatgaggaccctcaggcccggggcgagagcccggcacagcccggaccgaaattttgccgctgccttagagcgttagacaggatgtggctgggccgccgggccctgtgcgctctggtccttctgctcgcctgcgcctcgctggggctcctgtacgcgagcacccgggacgcgcccggcctccggctacctcttgcgccgtgggcgcccccgcaaagcccccgcaggcccgagctgccagatcttgctcctgagccccgctacgcacacatcccggtcaggatcaaggagcaagtagtggggctgctggcttggaacaactgcagttgtgagtccagtggggggggcctccccctccccttccagaaacaagtccgagctattgacctcaccaaggcctttgaccctgcagagctgagggctgcctctgccacaagagagcaggagttccaggcctttctgtcgaggagccagtccccagctgaccagctgctcatagcccctgccaactccccgctccagtaccccctacagggtgtggaagttcagcccctcaggagcatcttggtgccagggctgagccttcaggcagcttctggtcaggaggtataccaggtgaacctgactgcctccctaggcacctgggacgtggcaggggaagtgactggagttactctcactggagagggtcaggcagatctcacccttgtcagcccagggctggaccaactcaacaggcaactacaactggtcacttacagcagccgaagctaccagaccaacacagcagacacagtccggttctccaccgagggacatgaggctgctttcactatccgcataagacacccgcccaaccctcggctgtacccacctgggtctctaccccagggagcccagtacaacatcagcgctctagtcacgattgccaccaagaccttcctccgttatgatcggctacgggctctcatcaccagtatccgccgcttctacccaacggttaccgtggtcatcgctgacgacagcgacaagccagagcgcgttagtggcccctacgtggaacactatctcatgcccttcggcaagggctggttcgcaggccggaacctggccgtgtctcaagtaaccaccaagtacgtgctgtgggtggacgacgacttcgtcttcacggcgcggacgcggctggagaggcttgtggacgtgctggagcggacgccgctggacctggtggggggcgcggtgcgcgagatctccggctttgccaccacttatcggcagctgctgagcgtggagcccggcgccccaggcctcgggaactgcctccggcaaaggcgcggcttccaccacgagctcgtcggcttcccaggctgcgtggtcaccgacggcgtggttaacttcttcctggcgcggactgacaaggtgcgcgaggtcggtttcgacccccgcctcagccgcgtggctcatctggaattcttcttggatgggcttggttcccttcgggttggctcctgctccgacgtcgtggtggatcatgcatccaaactgaagctgccttggacatcaagggatgccggagcagagacttacgcccggtaccgttacccaggatcactggacgagagccagatggccaaacaccggctgctcttcttcaaacaccggctgcagtgcatgacctcccagtgatggcccgctggggatttctgactgtcaggctgggcctgcctccttgtccctgccaggaatttccaacaaaccccaccaccctgtgagcactctactggctgtccctgagcctctagttcctcactcttccttttcagaacctgatgcccagtaggggttgtcctggtgacacccctcctttttccagtgcccagaggcctggtggagccataacctctcccacagccagtgccaagtcctccccctgcccattctcatggggcaggaaatggggggatcactttccaagtgccaaagagcccagagggactctaagaacctaaggtggaaacactgtcctctcatcttgggaccgagggggtggggaagttccccaacacataatcccaagactgtgcccctcatctgcatcttcagatccagtactctgtgtacctgctccagccccacccccacagagagaacttgtggctctggggctggggtgagggctggtggttggtgaaagccattcttagttgtgtctctgcaatgctgtgggcacaaaagaaggggcaccagagtccctgtgcaaacacctagactcacttcatggattccaaagctctcagcttcattttattagttacgttaggtaagggggttcaagggtcatggtcctcatcacacacatgtcatcagggccctcctgcactccacatgatgaggtcagacccacacggtgcaaatctttgggtcagtgagctcctggagaagagaggagacatgtcaggaatagattaggcacccctcttccttaatgaaatgtggcagtcctctcaggggtaccccacctacttagggatctgag

SEQ ID NO: 1692 - protein, 533 aa, Homo sapiens
MWLGRRALCALVLLLACASLGLLYASTRDAPGLRLPLAPWAPPQSPRRPELPDLAPEPRYAHIPVRIKEQVVGLLAWNNCSCESSGGGLPLPFQKQVRAIDLTKAFDPAELRAASATREQEFQAFLSRSQSPADQLLIAPANSPLQYPLQGVEVQPLRSILVPGLSLQAASGQEVYQVNLTASLGTWDVAGEVTGVTLTGEGQADLTLVSPGLDQLNRQLQLVTYSSRSYQTNTADTVRFSTEGHEAAFTIRIRHPPNPRLYPPGSLPQGAQYNISALVTIATKTFLRYDRLRALITSIRRFYPTVTVVIADDSDKPERVSGPYVEHYLMPFGKGWFAGRNLAVSQVTTKYVLWVDDDFVFTARTRLERLVDVLERTPLDLVGGAVREISGFATTYRQLLSVEPGAPGLGNCLRQRRGFHHELVGFPGCVVTDGVVNFFLARTDKVREVGFDPRLSRVAHLEFFLDGLGSLRVGSCSDVVVDHASKLKLPWTSRDAGAETYARYRYPGSLDESQMAKHRLLFFKHRLQCMTSQ

SEQ ID NO: 1693 - DNA, 4407 bp, Homo sapiens
tttcgactcgcgctccggctgctgtcacttggctctctggctggagcttgaggacgcaaggagggtttgtcactggcagactcgagactgtaggcactgccatggcccctgtgctcagtaaggactcggcggacatcgagagtatcctggctttaaatcctcgaacacaaactcatgcaactctgtgttccacttcggccaagaaattagacaagaaacattggaaaagaaatcctgataagaactgctttaattgtgagaagctggagaataattttgatgacatcaagcacacgactcttggtgagcgaggagctctccgagaagcaatgagatgcctgaaatgtgcagatgccccgtgtcagaagagctgtccaactaatcttgatattaaatcattcatcacaagtattgcaaacaagaactattatggagctgctaagatgatattttctgacaacccacttggtctgacttgtggaatggtatgtccaacctctgatctatgtgtaggtggatgcaatttatatgccactgaagagggacccattaatattggtggattgcagcaatttgctactgaggtattcaaagcaatgagtatcccacagatcagaaatccttcgctgcctcccccagaaaaaatgtctgaagcctattctgcaaagattgctctttttggtgctgggcctgcaagtataagttgtgcttcctttttggctcgattggggtactctgacatcactatatttgaaaaacaagaatatgttggtggtttaagtacttctgaaattcctcagttccggctgccgtatgatgtagtgaattttgagattgagctaatgaaggaccttggtgtaaagataatttgcggtaaaagcctttcagtgaatgaaatgactcttagcactttgaaagaaaaaggctacaaagctgctttcattggaataggtttgccagaacccaataaagatgccatcttccaaggcctgacgcaggaccaggggttttatacatccaaagactttttgccacttgtagccaaaggcagtaaagcaggaatgtgcgcctgtcactctccattgccatcgatacggggagtcgtgattgtacttggagctggagacactgccttcgactgtgcaacatctgctctacgttgtggagctcgccgagtgttcatcgtcttcagaaaaggctttgttaatataagagctgtccctgaggagatggagcttgctaaggaagaaaagtgtgaatttctgccattcctgtccccacggaaggttatagtaaaaggtgggagaattgttgctatgcagtttgttcggacagagcaagatgaaactggaaaatggaatgaagatgaagatcagatggtccatctgaaagccgatgtggtcatcagtgcctttggttcagttctgagtgatcctaaagtaaaagaagccttgagccctataaaatttaacagatggggtctcccagaagtagatccagaaactatgcaaactagtgaagcatgggtatttgcaggtggtgatgtcgttggtttggctaacactacagtggaatcggtgaatgatggaaagcaagcttcttggtacattcacaaatacgtacagtcacaatatggagcttccgtttctgccaagcctgaactacccctcttttacactcctattgatctggtggacattagtgtagaaatggccggattgaagtttataaatccttttggtcttgctagcgcaactccagccaccagcacatcaatgattcgaagagcttttgaagctggatggggttttgccctcaccaaaactttctctcttgataaggacattgtgacaaatgtttcccccagaatcatccggggaaccacctctggccccatgtatggccctggacaaagctcctttctgaatattgagctcatcagtgagaaaacggctgcatattggtgtcaaagtgtcactgaactaaaggctgacttcccagacaacattgtgattgctagcattatgtgcagttacaataaaaatgactggacggaacttgccaagaagtctgaggattctggagcagatgccctggagttaaatttatcatgtccacatggcatgggagaaagaggaatgggcctggcctgtgggcaggatccagagctggtgcggaacatctgccgctgggttaggcaagctgttcagattcctttttttgccaagctgaccccaaatgtcactgatattgtgagcatcgcaagagctgcaaaggaaggtggtgccaatggcgttacagccaccaacactgtctcaggtctgatgggattaaaatctgatggcacaccttggccagcagtggggattgcaaagcgaactacatatggaggagtgtctgggacagcaatcagacctattgctttgagagctgtgacctccattgctcgtgctctgcctggatttcccattttggctactggtggaattgactctgctgaaagtggtcttcagtttctccatagtggtgcttccgtcctccaggtatgcagtgccattcagaatcaggatttcactgtgatcgaagactactgcactggcctcaaagccctgctttatctgaaaagcattgaagaactacaagactgggatggacagagtccagctactgtgagtcaccagaaagggaaaccagttccacgtatagctgaactcatggacaagaaactgccaagttttggaccttatctggaacagcgcaagaaaatcatagcagaaaacaagattagactgaaagaacaaaatgtagctttttcaccacttaagagaagctgttttatccccaaaaggcctattcctaccatcaaggatgtaataggaaaagcactgcagtaccttggaacatttggtgaattgagcaacgtagagcaagttgtggctatgattgatgaagaaatgtgtatcaactgtggtaaatgctacatgacctgtaatgattctggctaccaggctatacagtttgatccagaaacccacctgcccaccataaccgacacttgtacaggctgtactctgtgtctcagtgtttgccctattgtcgactgcatcaaaatggtttccaggacaacaccttatgaaccaaagagaggcgtacccttatctgtgaatccggtgtgttaaggtgatttgtgaaacagttgctgtgaactttcatgtcacctacatatgctgatctcttaaaatcatgatccttgtgttcagctctttccaaattaaaacaaatatacattttctaaataaaaatatgtaatttcaaaatacatttgtaagtgtaaaaaatgtctcatgtcaatgaccattcaattagtggcataaaatagaataattcttttctgaggatagtagttaaataactgtgtggcagttaattggatgttcactgccagttgtcttatgtgaaaaattaactttttgtgtggcaattagtgtgacagtttccaaattgccctatgctgtgctccatatttgatttctaattgtaagtgaaattaagcattttgaaacaaagtactctttaacatacaagaaaatgtatccaaggaaacattttatcaataaaaattacctttaattttaatgctgtttctaagaaaatgtagttagctccataaagtacaaatgaagaaagtcaaaaattatttgctatggcaggataagaaagcctaaaattgagtttgtggactttattaagtaaaatccccttcgctgaaattgcttatttttggtgttggatagaggatagggagaatatttactaactaaataccattcactactcatgcgtgagatgggtgtacaaactcatcctcttttaatggcatttctctttaaactatgttcctaaccaaatgagatgataggatagatcctggttaccactcttttactgtgcacatatgggccccggaattctttaatagtcaccttcatgattatagcaactaatgtttgaacaaagctcaaagtatgcaatgcttcattattcaagaatgaaaaatataatgttgataatatatattaagtgtgccaaatcagtttgactactctctgttttagtgtttatgtttaaaagaaatatattttttgttattattagataatatttttgtatttctctattttcataatcagtaaatagtgtcatataaactcatttatctcctcttcatggcatcttcaatatgaatctataagtagtaaatcagaaagtaacaatctatggcttatttctatgacaaattcaagagctagaaaaataaaatgtttcattatgcacttttagaaatgcatatttgccacaaaacctgtattactgaataatatcaaataaaatatcataaagcatttt

SEQ ID NO: 1694 - protein, 1025 aa, Homo sapiens
MAPVLSKDSADIESILALNPRTQTHATLCSTSAKKLDKKHWKRNPDKNCFNCEKLENNFDDIKHTTLGERGALREAMRCLKCADAPCQKSCPTNLDIKSFITSIANKNYYGAAKMIFSDNPLGLTCGMVCPTSDLCVGGCNLYATEEGPINIGGLQQFATEVFKAMSIPQIRNPSLPPPEKMSEAYSAKIALFGAGPASISCASFLARLGYSDITIFEKQEYVGGLSTSEIPQFRLPYDVVNFEIELMKDLGVKIICGKSLSVNEMTLSTLKEKGYKAAFIGIGLPEPNKDAIFQGLTQDQGFYTSKDFLPLVAKGSKAGMCACHSPLPSIRGVVIVLGAGDTAFDCATSALRCGARRVFIVFRKGFVNIRAVPEEMELAKEEKCEFLPFLSPRKVIVKGGRIVAMQFVRTEQDETGKWNEDEDQMVHLKADVVISAFGSVLSDPKVKEALSPIKFNRWGLPEVDPETMQTSEAWVFAGGDVVGLANTTVESVNDGKQASWYIHKYVQSQYGASVSAKPELPLFYTPIDLVDISVEMAGLKFINPFGLASATPATSTSMIRRAFEAGWGFALTKTFSLDKDIVTNVSPRIIRGTTSGPMYGPGQSSFLNIELISEKTAAYWCQSVTELKADFPDNIVIASIMCSYNKNDWTELAKKSEDSGADALELNLSCPHGMGERGMGLACGQDPELVRNICRWVRQAVQIPFFAKLTPNVTDIVSIARAAKEGGANGVTATNTVSGLMGLKSDGTPWPAVGIAKRTTYGGVSGTAIRPIALRAVTSIARALPGFPILATGGIDSAESGLQFLHSGASVLQVCSAIQNQDFTVIEDYCTGLKALLYLKSIEELQDWDGQSPATVSHQKGKPVPRIAELMDKKLPSFGPYLEQRKKIIAENKIRLKEQNVAFSPLKRSCFIPKRPIPTIKDVIGKALQYLGTFGELSNVEQVVAMIDEEMCINCGKCYMTCNDSGYQAIQFDPETHLPTITDTCTGCTLCLSVCPIVDCIKMVSRTTPYEPKRGVPLSVNPVC

SEQ ID NO: 1695 - DNA, 3500 bp, Homo sapiens
cacgtggctgcagcggggccagagcagcaatggcggcgggcggcggcggtagctgcgaccccctggcccctgctggggtcccttgcgccttctccccgcacagccaggcctacttcgctttggcctctaccgacggtcacttacgagtatgggagacggccaacaaccggctgcaccaggagtacgtgccttccgcgcacctcagtggtacctgcacctgtctggcctgggcgccagcgcggctgcaggccaaggaaagtccccagaggaaaaaaaggaaatcagaagctgtaggaatgagtaaccagactgacttattggctcttggcacagcagttggtagcattttattatacagcacagtaaaaggagagttacacagtaaattaataagtggtggacatgacaacagagtcaactgcatacagtggcatcaagacagtggctgtttatatagttgttcagatgataaacatattgtggaatggaacgtacagacatgcaaagtaaagtgcaaatggaaaggggacaatagcagtgtcagttccctatgtatcagcccagatggaaagatgttgctttcagctggtcgaacaatcaaactatgggttttggagaccaaagaagtctacaggcatttcacaggacatgcaacgccagtttcgtcactgatgttcactaccatcagacctcctaatgagagccagccctttgatggaattacaggtctttatttcttatctggagcagtacatgaccggttacttaatgtctggcaggtccgatcagaaaacaaagaaaagagtgcagtgatgtcatttacagttaccgatgaacctgtctatattgacttaactttgtcagaaaacaaagaagagcctgtcaagttggctgttgtttgcagagatggtcaagtccatctttttgaacacatattaaatgggtactgcaaaaagcctttgacttcaaactgcacaattcagatagcaacacctgggaaaggcaagaagtcaacaccaaaacccatccctattctagctgctggtttttgctcagacaaaatgtcattgttgcttgtatatggcagttggtttcagcctactattgagcgagtggctttaaactccagagaacctcatatgtgtttagtaagagatatttcaaactgctgggcccccaaagtagaaacagctataacaaaggtgaggacaccagtgatgaattctgaagcaaaagttctggtgcctgggattcctggtcatcatgcagctatcaagcccgctcctccacaaaccgagcaagtagagagcaagaggaagtcagggggaaatgaggttagcattgaagaacgtctgggagcaatggatatagacacacacaaaaaaggaaaggaagacctccagacgaatagctttccagttcttcttacccagggcttagaaagtaacgattttgaaatgctaaataaagtacttcaaactaggaatgtaaaccttataaagaagactgtattaaggatgcccctgcatactattattccgttgttacaagagcttacaaagaggttacaaggacatcctaatagtgctgtgctaatggttcagtggctaaaatgtgtgttaacagttcatgcatcatacctgtccacgttgcctgacctggtaccccagctggggacactctaccagttaatggaaagcagagtcaaaacttttcagaaactttcacaccttcatggaaagcttattcttctaattacacaagtaacagcatcagagaagacaaagggagcaacttcccctggacagaaggcaaagttggtgtatgaagaagagtcttctgaagaggagtctgatgatgaaatagcagataaggattctgaagataattgggatgaagatgaggaggagagtgaaagtgaaaaagatgaggacgttgaagaggaagatgaggatgccgaaggaaaagatgaagaaaatggcgaggacagagatacagcaagtgaaaaagaattaaatggagattctgacttagatcctgaaaatgaaagtgaagaagaatgaagacagcaaagcaagccggtcaaactatataaactctggctcaccttgcccagtggtgagggctgcctctgtgccaggatgccaaggaccgctgcacatttccaaattcacagcagtggatcccatgccactttgctgtcctgagcaccccagacttgactgtgtaaataagagtgtttcattcaaatgttaataaactttacacagtatatagacacattttctgcaatgtactgacatcagtgtccaatatatggtatatttttataatataatatcctagtatgattggttatatcaagaattgacaagtgcagataaagacctttcccataggagttcaagaactggactgttgtgaagaagtcagctcttatctcaggttggtatctttcatcaaatccagatgcaaagcagcactagtgaaaatttttttaatttagtacatttaatttggtacattttcataaaatatgaagggataactacaaactggagtaaaaatgatggtaattaaaaaaaatcctcagtatccctagcttgtctattaactgtgataatctgacttgagtcagattgaatatttggagtgcttccccagaataaccacttatttttgaagctatcatgtgaagtatttttttaaaacaaaacaaaaattatggtcattaaaaaactagagaattagccatattaaggatttttcttgactgcaaattacttctaaagaatcatcagtgtatagattagaagtgctcattacctgcaacttttaaaaaaaattcagttatagctgcttttgaagaggtttccatttttatttaaattactaatggatcaaagaacaattgtttattttttctctttggttttagatattaatgataaccttgttggaattttttttccaaagaaaatatttttataattaaataatttaatgtttttcttccttttcattacctactcttggcagtgttagggtatctgtttacctttaaaatgataagtctcactcaagattttttatctatgtataaatattttggtgtgctacaaaagcctttacaaattatcagtagtagtttttttttttttttttttttttaaagaatgagccgatattggcttagtgctcactaggggacatgcacatggaagctcacctctaagaaagggctgggcagatggatttattttttcccacctgtgaatatgtaaaacaaaaccattatctttgagggagtttttaataccaatgacagaacagagatttgtgtgctcatcttaagagccagagccatataagcatcttgggaaagcaagtttgaaccagctgctggtgtaatgtacagttatatttgtctataaatggagctgtttatggcaatttaataccattctctttgtaaagtgaataaatattcatcttttccc

SEQ ID NO: 1696 - protein, 686 aa, Homo sapiens
RGCSGARAAMAAGGGGSCDPLAPAGVPCAFSPHSQAYFALASTDGHLRVWETANNRLHQEYVPSAHLSGTCTCLAWAPARLQAKESPQRKKRKSEAVGMSNQTDLLALGTAVGSILLYSTVKGELHSKLISGGHDNRVNCIQWHQDSGCLYSCSDDKHIVEWNVQTCKVKCKWKGDNSSVSSLCISPDGKMLLSAGRTIKLWVLETKEVYRHFTGHATPVSSLMFTTIRPPNESQPFDGITGLYFLSGAVHDRLLNVWQVRSENKEKSAVMSFTVTDEPVYIDLTLSENKEEPVKLAVVCRDGQVHLFEHILNGYCKKPLTSNCTIQIATPGKGKKSTPKPIPILAAGFCSDKMSLLLVYGSWFQPTIERVALNSREPHMCLVRDISNCWAPKVETAITKVRTPVMNSEAKVLVPGIPGHHAAIKPAPPQTEQVESKRKSGGNEVSIEERLGAMDIDTHKKGKEDLQTNSFPVLLTQGLESNDFEMLNKVLQTRNVNLIKKTVLRMPLHTIIPLLQELTKRLQGHPNSAVLMVQWLKCVLTVHASYLSTLPDLVPQLGTLYQLMESRVKTFQKLSHLHGKLILLITQVTASEKTKGATSPGQKAKLVYEEESSEEESDDEIADKDSEDNWDEDEEESESEKDEDVEEEDEDAEGKDEENGEDRDTASEKELNGDSDLDPENESEEE

SEQ ID NO: 1697 - DNA, 778 bp, Homo sapiens
gagatgggtgcccccatccgcacactgtcctttggccaccggacatcatgcctcccaagaaggatgttcccgtgaagaaaccagcagggccctccatctccaaacctgctgctaagccagcagcagcaggggctcctccagccaagaccaaagctgagccagctgtcccccaggcccctcagaaaacccaggagcctccagtcgatctctccaaagtggtgatcgagtttaacaaggaccagctggaggagttcaaggaggccttcgagctgtttgaccgagtgggggatggcaagatcctgtacagccagtgtggggacgtgatgagggccctgggccagaaccccaccaacgccgaggtgctcaaggtcctggggaaccccaagagtgatgagctgaagtcgcggcgtgtggactttgagactttcctgcccatgctccaggcagtggccaagaaccgaggccaaggcacatatgaggactacttggaggggtttcgtgtgtttgacaaggaggggaacggcaaagtcatgggagcagagctcagacatgttctcaccacccttggagagaagatgactgaggaggaggtggagaccgttctggcaggacacgaggacagcaacggctgcatcaactacgaggccttcttgaaacacatcctaagcgtctgagtgctgcagatccagtggggtccggacactgggccccgcaggcgaaagcacgttccagccaccaggaggccacctattgtttcaaaataaagactgggttcctc

SEQ ID NO: 1698 - protein, 208 aa, Homo sapiens
MPPKKDVPVKKPAGPSISKPAAKPAAAGAPPAKTKAEPAVPQAPQKTQEPPVDLSKVVIEFNKDQLEEFKEAFELFDRVGDGKILYSQCGDVMRALGQNPTNAEVLKVLGNPKSDELKSRRVDFETFLPMLQAVAKNRGQGTYEDYLEGFRVFDKEGNGKVMGAELRHVLTTLGEKMTEEEVETVLAGHEDSNGCINYEAFLKHILSV

SEQ ID NO: 1699 - DNA, 756 bp, Homo sapiens
  misc_feature (1)..(7): n is a, c, g, or t
  misc_feature (10)..(11): n is a, c, g, or t
  misc_feature (13)..(14): n is a, c, g, or t
  misc_feature (25)..(26): n is a, c, g, or t
  misc_feature (373)..(373): n is a, c, g, or t
  misc_feature (515)..(515): n is a, c, g, or t
  misc_feature (524)..(524): n is a, c, g, or t
  misc_feature (526)..(526): n is a, c, g, or t
  misc_feature (533)..(533): n is a, c, g, or t
  misc_feature (536)..(536): n is a, c, g, or t
  misc_feature (543)..(543): n is a, c, g, or t
  misc_feature (580)..(580): n is a, c, g, or t
  misc_feature (607)..(607): n is a, c, g, or t
  misc_feature (617)..(617): n is a, c, g, or t
  misc_feature (633)..(633): n is a, c, g, or t
  misc_feature (635)..(635): n is a, c, g, or t
  misc_feature (673)..(673): n is a, c, g, or t
  misc_feature (678)..(678): n is a, c, g, or t
  misc_feature (681)..(681): n is a, c, g, or t
  misc_feature (684)..(684): n is a, c, g, or t
  misc_feature (691)..(692): n is a, c, g, or t
  misc_feature (697)..(697): n is a, c, g, or t
  misc_feature (706)..(706): n is a, c, g, or t
  misc_feature (708)..(708): n is a, c, g, or t
  misc_feature (714)..(714): n is a, c, g, or t
  misc_feature (720)..(720): n is a, c, g, or t
  misc_feature (727)..(728): n is a, c, g, or t
  misc_feature (737)..(737): n is a, c, g, or t
  misc_feature (745)..(754): n is a, c, g, or t
nnnnnnnttnncnnaagtcccgctnnaattgacaagctgctcaagactgcagtgacaggcagccttagtgagaatgacccacttcgttttaagcctcatcccagcaatatgatgagcaagttgagctctgaggatgaggaggaagatgaagcagaagatgaccagtctgaggcttcagggaagaaatctgtgaagggagtgtctaagaaatatgttcctccacgcttggttccagtacattatgatgaaacagaagctgagcgggagaagaagcgtctagaacgagccaagagacgggcattgagcagctctgtcattcgtgaacttaaggagcagtactcagatgctccagaggaaatccgtgatgctcggnatccccatgttacccgccagagtcaggaggaccaacacaggattaactatgaggagagcatgatggtgcgtttgagcgtcaagtaagcgagagaaaggacggggaaaaacgagcaaattgtcatgagctcacaacttccatncccttacananttcaagnganatcaagngctttggcaagggggggacttgtccaacttggatganggtcaagattccttttaagaagggggnggagtttccncaaaaaagggcgggangnaaaaagggtttccggggggggggggggatttggggggncaaanttnggnttttttnnggggnaacccgaantnctcttntccttnggggttnncccccgggncccccccnnnnnnnnnncc

SEQ ID NO: 1700 - DNA, 779 bp, Homo sapiens
cccgctggcccaatggcagcgtcctacagtgtagcctccgcctcccgattgactggcctgcttggcaaggcaagtagcggcggcgcttcaagatgcgctgcctgaccacgcctatgctgctgcgggccctggcccaggctgcacgtgcaggacctcctggtggccggagcctccacagcagtgcagtggcagccacctacaagtatgtgaacatgcaggatcccgagatggacatgaagtcagtgactgaccgggcagcccgcaccctgctgtggactgagctcttccgaggcctgggcatgaccctgagctacctgttccgggaaccggccaccatcaactacccgttcgagaagggcccgctgagccctcgcttccgtggggagcatgcgctgcgccggtacccatccggggaggagcgttgcattgcctgcaagctctgcgaggccatctgccccgcccaggccatcaccatcgaggctgagccaagagctgatggcagccgccggaccacccgctatgacatcgacatgaccaagtgcatctactgcggcttctgccaggaggcctgtcccgtggatgccatcgtcgagggccccaactttgagttctccacggagacccatgaggagctgctgtacaacaaggagaagttgctcaacaacggggacaagtgggaggccgagatcgccgccaacatccaggctgactacttgtatcggtgacgccccaccggcctgcagcccctgctgcccaataaaaccactccgaccccacgg

SEQ ID NO: 1701 - protein, 210 aa, Homo sapiens
MRCLTTPMLLRALAQAARAGPPGGRSLHSSAVAATYKYVNMQDPEMDMKSVTDRAARTLLWTELFRGLGMTLSYLFREPATINYPFEKGPLSPRFRGEHALRRYPSGEERCIACKLCEAICPAQAITIEAEPRADGSRRTTRYDIDMTKCIYCGFCQEACPVDAIVEGPNFEFSTETHEELLYNKEKLLNNGDKWEAEIAANIQADYLYR

SEQ ID NO: 1702 - DNA, 2500 bp, Homo sapiens
gggggagtgagggtagcacgctgagctgaaggctgtgcggagcggcgcggcacagagcctgttgttgagctcagtatgtcgtgggaatccggggccgggccaggtctaggttcccaggggatggatctcgtgtggagtgcgtggtacggaaagtgcgttaaagggaaagggtcgttgccactctcggcccacggcatcgtggtcgcctggctcagcagggccgagtgggaccaggtgacggtttatctgttctgtgacgaccataagttgcagcggtacgcgcttaaccgcatcacggtgtggaggagcaggtcaggcaacgaactccctctggcagtggcttctactgctgacctgatacgctgtaagctcttggatgtaactggtggcttgggcactgatgaacttagactgctctatggcatggcattggtcaggtttgtgaatcttatctcagagaggaagacaaagtttgccaaggtccccctcaagtgtctggctcaagaggtaaatattccggattggattgttgaccttcgccatgagttgacccacaagaaaatgccccatataaatgactgccgcagaggctgctactttgtcctggattggctccagaagacctattggtgccgccaactggagaacagcctgagagagacctgggagttggaggagttcagggaagggatagaggaagaggatcaagaggaagataagaacattgttgttgatgacatcacagaacagaaaccagagcctcaggatgatgggaaaagtacggagtcagatgtaaaggccgatggagacagcaaaggcagcgaagaggtggattctcattgcaaaaaggccctgagtcataaagagctatatgaaagagcccgagaactgctggtatcatacgaagaggagcagtttacggtgctggagaaatttaggtatttacctaaggccattaaggcgtggaataacccgtccccacgtgtagaatgtgtcctggcagagctcaagggcgttacatgcgagaacagggaggctgtgctggatgcttttctggatgatggcttccttgtccccacatttgaacagttggcagctttgcagatagaatatgaagatggtcagactgaggtccagagaggggaaggtactgacccaaagtcacacaaaaacgtggacttgaatgacgtcctggtgccaaagccgttctctcagttctggcagcccctgctcaggggcctgcactcccagaacttcacgcaggccctattggagaggatgctctctgaactgccagccttggggatcagcgggatccggcctacctacatcctcagatggaccgttgaactgatcgtggccaacaccaagactggacggaatgctcgccgattttctgcaggccagtgggaagcaagaaggggctggaggctgttcaactgctccgcctcccttgactggccccggatggttgagtcctgcttgggctcaccttgctgggccagcccccaactccttcggatcatcttcaaagccatggggcagggcctgccagacgaggagcaggagaagctgctgcgcatctgttccatttatacccagagtggagaaaacagcctggtgcaggagggctctgaggcctcccccattgggaagtctccatatacactagacagcctgtattggagcgtcaagccagccagctccagcttcgggtctgaagcaaaggcccagcaacaggaggagcagggcagtgttaatgatgtcaaggaagaggagaaggaggagaaagaggtcttgccagaccaggtagaggaggaggaagaaaatgatgaccaagaggaggaagaggaggatgaagatgatgaagatgatgaagaggaagacagaatggaggtggggcctttctctacagggcaagagtcccccactgccgagaatgctaggcttctggcccagaaaagaggagctttgcagggctctgcatggcaggttagctcagaagacgtgcgatgggacacatttcccctaggccgaatgccaggtcagaccgaggacccagcagagctcatgctggagaattatgacaccatgtatcttttggaccagcctgtgctagagcagcggctggaaccctcaacatgcaagactgacaccttgggcctgagctgtggtgtcggcagtggcaactgcagcaacagcagcagcagcaacttcgagggccttctctggagccaggggcagctgcatgggctcaaaactggcctgcagctcttctgatggccatccctggtgcaagtgttcatccagccgtgccagggcaacagcccaccccctagtacaactgatgctccctgagacaacctgggagacagcctggatcagccacatcaactcagttgtccaccacaggggaattttgaatgtcttttgtttttgttttgttttgaaaaataataaacaggcacccaaaaaaaaaaaaaaaaaaaaaaaaaaaaaa

SEQ ID NO: 1703 - protein, 734 aa, Homo sapiens
MSWESGAGPGLGSQGMDLVWSAWYGKCVKGKGSLPLSAHGIVVAWLSRAEWDQVTVYLFCDDHKLQRYALNRITVWRSRSGNELPLAVASTADLIRCKLLDVTGGLGTDELRLLYGMALVRFVNLISERKTKFAKVPLKCLAQEVNIPDWIVDLRHELTHKKMPHINDCRRGCYFVLDWLQKTYWCRQLENSLRETWELEEFREGIEEEDQEEDKNIVVDDITEQKPEPQDDGKSTESDVKADGDSKGSEEVDSHCKKALSHKELYERARELLVSYEEEQFTVLEKFRYLPKAIKAWNNPSPRVECVLAELKGVTCENREAVLDAFLDDGFLVPTFEQLAALQIEYEDGQTEVQRGEGTDPKSHKNVDLNDVLVPKPFSQFWQPLLRGLHSQNFTQALLERMLSELPALGISGIRPTYILRWTVELIVANTKTGRNARRFSAGQWEARRGWRLFNCSASLDWPRMVESCLGSPCWASPQLLRIIFKAMGQGLPDEEQEKLLRICSIYTQSGENSLVQEGSEASPIGKSPYTLDSLYWSVKPASSSFGSEAKAQQQEEQGSVNDVKEEEKEEKEVLPDQVEEEEENDDQEEEEEDEDDEDDEEEDRMEVGPFSTGQESPTAENARLLAQKRGALQGSAWQVSSEDVRWDTFPLGRMPGQTEDPAELMLENYDTMYLLDQPVLEQRLEPSTCKTDTLGLSCGVGSGNCSNSSSSNFEGLLWSQGQLHGLKTGLQLF

SEQ ID NO: 1704 - DNA, 2452 bp, Homo sapiens
cgcagccgtggctgaggagcctgtggcggcagcggcgatggaaccagcggagcagccgagcgagttagtgtcagccgagggccgaaaccggaaggcggtgctgtgccagcgttgcggctcccgggtgctgcagccagggaccgctctcttctctcgccgacagcttttccttccctccatgagaaagaagccagctctgtctgacggcagcaatcctgacggcgatctcctccaggaacactggctggttgaggacatgttcatttttgagaatgtgggcttcaccaaggacgtgggcaacatcaagtttctggtctgcgcagactgtgaaattggaccaattggctggcattgcctagatgacaagaacagtttctatgtggccttggaacgagtttcccatgagtaactgaggggaggggtactcagctccatctccaaagataaacctactccccacaagaactggcctttaatgtggtataactgttccgctgccttcttgtctgtgctaatataaatactgagtaccagcatgtccatttgaacatgcagagggttaatcctgcttcctaaagcctcaagtacatgcctcctgcttagttcactttgtatcacatttcctaagctcccttttcccccagttttgggacactgtgcttacctccaaaaatctcatctcttccctggcattctccctaggctctgttttgcccaggggctcccgctttttcttgctctagaagagcagtattcaaccttttagctatgatgacacataacaaaagatgcttatgtactaatagttgaaatctgcctttttctcattcaagaaggcatacaaatatctgagagtgactttgttgtatggctacccttgtgatctacagtaatttattctttctaaaagtaaagcattttcaaaactcagtatttaaaccactaaccagaaacattactttggatgcatctctaataccatgtttgagcacctctgctctaggttgagaatgacattttattgtgaagatgggtgtggtccctcttcccttgaaatcttgtagtttctttttatattagctcctcactgctacagcctagaaggtgagaagcagattttaaccccatctggcagccattcaaggaaaacccagccctggctgtttactcaggctctcttagaatgagagtggagggtgtaggatatgagggttaggcctttgccacattatacaaaagtttataatttgccacacctggacaagtaactttcttcttttgttcataggcaagacttctttaatggatagtatcatttactgaacctactgggcatggtcctcatggagttttggttcaactggaatctctgtgccaacccaggatacaaacttccatccagatgcatggatacaaatttccatagctccggggctgctctaacagtttgatatcagcagacgtgtttaagccttcaacttgatttccaattattccatcatttctattctgaaatgactcactgtcgtagaaggaagtttattatataaccaaggtttcaggtatcctcctgtcaccacctctactattcaggaggcctaaaattgaaataagtactaaacagaaaccttaccatctgaagtcccttccattgttttctagttgcttcctcattcctttacccccaaactttctaagggctccccgactgcagtgcaaggtggccttgggcacagttttgcaaccaacctactcccctggaaagatggcttccttctccaattagcctgaatgagctttagtaagcaattgagagaactgtgtttttccgacaaacggtcacatgtccatcgttatggcatgtgcagaaaaacagagttatccacacaagtcaggagcaaaacccaagtagatgcctctaggggcacatggcccctcacatcacaagccagaacctaagctaagcattttttaaattgagtttgagactagcctgggcaacatggtgagaccccatctctatttaaaaaatgaacaaaattacctgggcatagtggtgtatgcctgtagtccctgctacttgggaggctcaggtgggaggatcacttgagccccaaagatggtggctgcagtaagccaagatcacaccactggcactccagcctgggcaacagagtgagaccctgtctcaaacaaacaacaacagtaacaacaaaaaaatatatagcgacttgaataggaaaccatagtatttcattgttttaatttgcatttattttatttctagtgaaacttttatatacgtatcggtcatttctatttccttttttgagaactgccaaatgttgccctagtagccaaaaatatcaggttgctattctgccttttcagtttgatctgaaagaaataaaggcatttaagcaatggaaaaaaaaaaaaaaaaaaaaaaaaa

SEQ ID NO: 1705 - protein, 123 aa, Homo sapiens
MEPADEPSELVSAEGRNRKAVLCQRCGSRVLQPGTALFSRRQLFLPSMRKKPALSDGSNPDGDLLQEHWLVEDMFIFENVGFTKDVGNIKFLVCADCEIGPIGWHCLDDKNSFYVALERVSHE

SEQ ID NO: 1706 - DNA, 4069 bp, Homo sapiens
ggcgtctgggaagtgaggagcgtctctgcctggcagaggctgcaatctctgcactttggggggccaaggcaggcgctgagaaggacgcgcagtccatctctctcaggttagtgaaatgaggctctccgcggggccggcccggggacagtgcgctgctggtcccagcatgaatgcgggccccggctgtgaaccctgcaccaaagcgacccgctggggcgccgctacaacttcgccggctgcttcggacgcccggagctttccgagcaggcagaggcgcgtcctcgaccccaaggacgctcacgtgcagttcagggtcccaccgtcctcgccagcctgcgtcccagggcaggcgggacagcacagaggcagcgccacctcgcttgttttcaaacaaaagactattaccagttggatggacactaaaggaatcaagacagcggaatcagaaagtttggatagtaaagaaaacaacaatacaagaatagaatccatgatgagttctgtacaaaaagataacttttaccaacataatgtagaaaaattagtaaatgtttctcagctaagtcttgataagtcactcactgaaaaaagtacacagtatttgaaccagcatcagactgcagcaatgtgtaagtggcaaaatgaagggaaacacacggagcagcttttggaaagtgaacctcaaacagtaaccctggtaccagagcagtttagtaatgctaacattgatcggtcacctcaaaatgatgatcacagtgacacagatagtgaagagaatagagacaatcaacagtttctcacaactgtaaagcttgcaaatgcaaagcagactacggaagatgaacacgccagagaagccaaaagccaccagaagtgcagcaagtcttgccatcctggggaagactgtgcaagttgtcagcaagatgagatagacgtggtgccaaagagtccattgtcagatgttggctctgaggatgttggtactgggtcaaaaaatgacaacaaattgattagacaagaaagttgcctaggaaattctcctccatttgagaaggaaagtgaacccgaatcaccgatggatgtggataattctaaaaatagttgtcaagactcagaagcagatgaggagacaagtccaggttttgatgaacaagaagatggtagttcctcccaaacagcaaataaaccttcaaggttccaagcaagagacgctgacattgaatttaggaaacggtactctactaagggcggtgaagttagattacatttccaatttgaaggaggagagagtcgcactggaatgaatgatttaaatgctaaactacctggaaatatttctagcctgaatgtagaatgcagaaattctaagcaacatggaaaaaaggattctaaaatcacagatcatttgatgagactgcccaaagcagaggacagaagaaaagaacagtgggaaaccaaacatcaaagaacagaaaggaagatccctaaatacgttccacctcacctttctccagataagaagtggcttggaactcccattgaggagatgagaagaatgcctcggtgtgggatccggctgcctctcttgagaccatctgccaatcacacagtaactattcgggtagatcttttgcgagcaggagaagttcctaaaccttttccaacacattataaagatttgtgggataacaagcatgttaaaatgccttgttcagaacaaaatttgtacccagtggaagatgagaatggtgagcgaactgcggggagccggtgggagctcattcagactgcacttctcaacaaatttacacgaccccaaaacttgaaggatgctattctgaaatacaatgtggcatattctaagaaatgggactttacagctttgatcgatttctgggataaggtacttgaagaagcagaagctcaacatttatatcagtccatcttgcctgatatggtgaaaattgcactctgtctgccaaatatttgcacccagccaataccactcctgaaacagaagatgaatcattccatcacaatgtcgcaggaacagattgccagtcttttagctaatgctttcttctgcacatttccacgacgaaatgctaagatgaaatcggagtattctagttacccagacattaacttcaatcgattgtttgagggacgttcatcaaggaaaccggagaaacttaaaacgctcttctgctactttagaagagtcacagagaaaaaacctactgggttggtgacatttacaagacagagtcttgaagattttccagaatgggaaagatgtgaaaaacccttgacacgattgcatgtcacttacgaaggtaccatagaagaaaatggccaaggcatgctacaggtggattttgcaaatcgttttgttggaggtggtgtaaccagtgcaggacttgtgcaagaagaaatccgctttttaatcaatcctgagttgattatttcacggctcttcactgaggtgctggatcacaatgaatgtctaattatcacaggtactgagcagtacagtgaatacacaggctatgctgagacatatcgttggtcccggagccacgaagatgggagtgaaagggacgactgcgagcggcgctgcactgagatcgttgccatcgatgctcttcacttcagacgctacctcgatcagtttgtgcctgagaaaatgagacgcgagctgaacaaggcttactgtggatttctccgtcctggagtttcttcagagaatctttctgcagtggccacaggaaactggggctgtggtgcctttgggggtgatgccaggttaaaagccttaatacagatattggcagctgctgcagctgagcgagatgtggtttatttcacctttggggactcagaattgatgagagacatttacagcatgcacattttccttactgaaaggaaactcactgttggagatgtgtataagctgttgctacgatactacaatgaagaatgcagaaactgttccacccctggaccagacatcaagctttatccattcatataccatgctgtcgagtcctgtgcagagaccgctgaccattcagggcaaaggacagggacctgaggagccgagcgaatagcatctcctcccacctcccaccagagacgtcctgtttgagctgtcaggtgtaatatatgaattgacttaagttaatataaatgtgtacataatccacatttgtagtcaaggacgcaatctcttccacacatgtgcagttgtcagttggtacatctaaactccctccatcctgactcacgtggacttagatatgttttgtttctattttcttctatttcagtttttcattctttgatgtttatttcttttgtccatcagatctcttgtgaaatcccatggaaggttgtgctcagctgtcgggtctctttcttcctgcccatatattataccagttgcttctgcagcccgcagatgcccagcgatgcccaggaaacaagttgaaatcccaggaatctctttaactgattttgctaaaaatctccctgtgagccttccactcaactcttaatatgcttgcattgtttaagtttttaaattctgaaaattaataattagggtttttttcatatgtgttgcataatgcaaacctcctaggttaaaatagtttctttatttaagatagaataatttccagaaattgtacttttgaggtatcatttttatctgtaatggtttgtctgtcttttttcctctgatcagtatttttttataccagttttggagactgcctgagatgaaaggaaatgtggaataaaaggaggttttcctgatgtggtgtaaagaaaacagattccaagagaattgaagattttttttgtttccttggtacttttttctttttaaattaggactaatgtttcttttgtggtgcttgaggcatattcatataaccaaagtttgagaactgggaacttcatgctgatttgtacatattgaagtttctctggtattcaaaggttatatagtgaatgaattttcattaataaatcactttgtcagaaaaaaaaaaaaaaaaaa

SEQ ID NO: 1707 - protein, 976 aa, Homo sapiens
MNAGPGCEPCTKATRWGAATTSPAASDARSFPSRQRRVLDPKDAHVQFRVPPSSPACVPGQAGQHRGSATSLVFKQKTITSWMDTKGIKTAESESLDSKENNNTRIESMMSSVQKDNFYQHNVEKLVNVSQLSLDKSLTEKSTQYLNQHQTAAMCKWQNEGKHTEQLLESEPQTVTLVPEQFSNANIDRSPQNDDHSDTDSEENRDNQQFLTTVKLANAKQTTEDEHAREAKSHQKCSKSCHPGEDCASCQQDEIDVVPKSPLSDVGSEDVGTGSKNDNKLIRQESCLGNSPPFEKESEPESPMDVDNSKNSCQDSEADEETSPGFDEQEDGSSSQTANKPSRFQARDADIEFRKRYSTKGGEVRLHFQFEGGESRTGMNDLNAKLPGNISSLNVECRNSKQHGKKDSKITDHLMRLPKAEDRRKEQWETKHQRTERKIPKYVPPHLSPDKKWLGTPIEEMRRMPRCGIRLPLLRPSANHTVTIRVDLLRAGEVPKPFPTHYKDLWDNKHVKMPCSEQNLYPVEDENGERTAGSRWELIQTALLNKFTRPQNLKDAILKYNVAYSKKWDFTALIDFWDKVLEEAEAQHLYQSILPDMVKIALCLPNICTQPIPLLKQKMNHSITMSQEQIASLLANAFFCTFPRRNAKMKSEYSSYPDINFNRLFEGRSSRKPEKLKTLFCYFRRVTEKKPTGLVTFTRQSLEDFPEWERCEKPLTRLHVTYEGTIEENGQGMLQVDFANRFVGGGVTSAGLVQEEIRFLINPELIISRLFTEVLDHNECLIITGTEQYSEYTGYAETYRWSRSHEDGSERDDCERRCTEIVAIDALHFRRYLDQFVPEKMRRELNKAYCGFLRPGVSSENLSAVATGNWGCGAFGGDARLKALIQILAAAAAERDVVYFTFGDSELMRDIYSMHIFLTERKLTVGDVYKLLLRYYNEECRNCSTPGPDIKLYPFIYHAVESCAETADHSGQRTGT

SEQ ID NO: 1708 - DNA, 1471 bp, Homo sapiens
gtggccgcgcaggaggacggagccctaaccgcaacccgcgccgcgccgcgccgatttgatttgtatccactgtcaccagcactgctcacttaggactttctggatccagacccaggcagcgcacactggactcttgaggaagaaggagactctaattttggattccttggtggaggaaaataaaacactctggtcttgccgccaacgatgcaagtgtgactgctggcgtcttcatgagctccagaggtcacagcacgctaccaaggactctcatggcccctcggatgatttccgagggagacataggaggcattgctcaaatcacctcctctctattcctgggcagaggcagtgtggcctccaatcggcacctcctccaggctcgtggcatcacctgcattgttaatgctaccattgagatccctaatttcaactggccccaatttgagtatgttaaagtgcctctggctgacatgccgcatgcccccattggactgtactttgacaccgtggctgacaagatccacagtgtgagcaggaagcacggggccaccttggtgcactgtgctgcaggggtgagccgctcagccacgctgtgtatcgcgtacctgatgaaattccacaacgtgtgcctgctggaggcatacaactgggtgaaagcccggcgacctgtcatcaggcccaacgtaggcttctggaggcaactgatagactacgagcgccagctctttgggaagtcgacagttaaaatggtacagacaccttatggcatagttcccgacgtctatgagaaggagtcccgacacctgatgccttactgggggatttagtgccactgaagcctgcgtcagcagcccgagcggggccggcatctgctccccgccgtctgctccctctccactctcttctcaaatggctgacttctggttctccctcaagtgttttttacactgggtgttcaaatttattttaagagatagggagggaggggacataaagggaatgcatacattgctagtcacatttttaaaattaacattttggaatagtgtttatggaaatctttagcttttaatcatttttaccaatttgaacagtttaataaactggttctgctctcttctgaatctcatgcctttggcaccttggtaggtgcaggaggagctcagtgcaaaaatcactttggggcctcattaaccctttagagacaagctttgccccaggctgcggaccagacagatgcttagggaaggttgataccagcttcagtctctactggattagccctactctttcctttcccctccattatttagtgactctgtaagtaagttaaatacacccttattatttagctgttaagtaactataatgaaatctgctgcaaaatctctcttggaatccatgtgcccaggattatattagcattatttttaataaatctatatgcttaaaaaaaaaaaaaaaaaaa

SEQ ID NO: 1709 - protein, 198 aa, Homo sapiens
MSSRGHSTLPRTLMAPRMISEGDIGGIAQITSSLFLGRGSVASNRHLLQARGITCIVNATIEIPNFNWPQFEYVKVPLADMPHAPIGLYFDTVADKIHSVSRKHGATLVHCAAGVSRSATLCIAYLMKFHNVCLLEAYNWVKARRPVIRPNVGFWRQLIDYERQLFGKSTVKMVQTPYGIVPDVYEKESRHLMPYWGI

SEQ ID NO: 1710 - DNA, 2142 bp, Homo sapiens
gccaggccgagcgggagctgaccaggcttgactcgggtacagaacgaggcaccagtccccttgcgaaccgaagggcctcgcagtggatggaggaggcccagccctgaggtcaacgccaaccaggctagcctggcacggggcctacagggtgggtaggcgggcgtgccgcagccgtccagggccttccctcaggtcccgggcgaggggcctacgctgcggcccggcaacaaggcccgactcggcccctcgggaccagagccccacccgatcggaagcggatcctttaccagggccataggccagtgactaggccgggcctgggcctcccatcggggccggactaggacgaggccccggggaggcccctggcctaccagacccttttctcaggccgacagccgccaggaagatgcaacgtgccctgccaggcgcccgccagcacttgggggccattctggccagcgccagcgtggtggtgaaggctctgtgtgcggcggtactattcctctacctgctctccttcgccgtggacacaggctgcctggcggtcaccccgggctacctctttcctcccaacttctggatctggaccctggccacccatgggctgatggagcagcatgtgtgggacgtggccatcagcctgacaacggtggtggtggccgggcgtttgctggagcccctctggggggccttggagctgctcatcttcttctcagtggtgaatgtgtctgtagggctgctgggggccttcgcctacctcctcacctacatggcttccttcaacctggtctacctgttcactgtccgtatccacggcgccttgggcttcctaggtggcgtcctggtggcactcaagcaaaccatgggggactgtgtggtcctgcgagtgccccaggtgcgcgtcagtgtgatgcccatgctgctgctggcgctgctgctcctgctgcggctcgccacgctgctccagagcccggcgctggcttcctatggcttcgggctgctctccagttgggtatatcttcgcttctaccagcgccatagccggggccgaggggacatggctgaccactttgctttcgccactttcttccctgagatcctgcagcctgtggtgggtttgctggcgaacttggtgcacagcctcctggtgaaggtaaagatatgccagaagacggtgaagcgctacgatgtgggtgccccatcctccatcaccatcagcctgccaggcacagaccctcaagacgccgagcggagaaggcaactggccctgaaggcactcaatgagcggctgaagagagtggaagaccagtccatctggcccagcatggatgatgatgaagaggagtctggggccaaggtggacagccccctgccctcagacaaagctcccacacccccagggaagggggctgccccagaatccagtctaatcaccttcgaggcagctcccccgacgctgtaactccagaccaccttgagtgtggcacctcccctcccaagccccccttgacatcctctcagctactccagggcacctgactgctctgaggagagggaagaaggcctgctggggctttccatggccttctgctgtttctcgccaacactacccaggactcttgctacctggttccaactccagacaaccactatgccaggcccggagcctctgaggcatcggccagtccaggccctcatctgaggtaagaatgtacatcagctggcagccccaagcaagtggctgcagggacactgatgccacagctcctgggccggccctcacatctgaaactggttgccgagagccctgagccaaggcaaggatttgccaaaaatgttctgggggcccagcaaatgcaggagccgacctggggctgcacatccctgcccatccccagaaagactgttcctgtcaggatttgtttccctctgctgtggcggtgactgcttctggaccagaacagctccagctcccaggtattttctacaggaccacttgagtgggcagccaagcccaggctcgcagtatcaataaagcagttctctgaggaatgacaaaaaaaaaaaaaaaaaaaaaaaaaaaaaaaaaaaaaaaaaaaaaaaaaaaaaaaaaaaaaaaaaaaaaaaaaaaaaaaaaaa

SEQ ID NO: 1711 - protein, 351 aa, Homo sapiens
MQRALPGARQHLGAILASASVVVKALCAAVLFLYLLSFAVDTGCLAVTPGYLFPPNFWIWTLATHGLMEQHVWDVAISLTTVVVAGRLLEPLWGALELLIFFSVVNVSVGLLGAFAYLLTYMASFNLVYLFTVRIHGALGFLGGVLVALKQTMGDCVVLRVPQVRVSVMPMLLLALLLLLRLATLLQSPALASYGFGLLSSWVYLRFYQRHSRGRGDMADHFAFATFFPEILQPVVGLLANLVHSLLVKVKICQKTVKRYDVGAPSSITISLPGTDPQDAERRRQLALKALNERLKRVEDQSIWPSMDDDEEESGAKVDSPLPSDKAPTPPGKGAAPESSLITFEAAPPTL

SEQ ID NO: 1712 - DNA, 2740 bp, Homo sapiens
cgctgccatgcggctggcgctgctctgggccctggggctcctgggcgcgggcagccctctgccttcctggccgctcccaaatataggtggcactgaggagcagcaggcagagtcagagaaggccccgagggagcccttggagccccaggtccttcaggacgatctcccaattagcctcaaaaaggtgcttcagaccagtctgcctgagcccctgaggatcaagttggagctggacggtgacagtcatatcctggagctgctacagaatagggagttggtcccaggccgcccaaccctggtgtggtaccagcccgatggcactcgggtggtcagtgagggacacactttggagaactgctgctaccagggaagagtgcggggatatgcaggctcctgggtgtccatctgcacctgctctgggctcagaggcttggtggtcctgaccccagagagaagctataccctggagcaggggcctggggaccttcagggtcctcccattatttcgcgaatccaagatctccacctgccaggccacacctgtgccctgagctggcgggaatctgtacacactcagacgccaccagagcaccccctgggacagcgccacattcgccggaggcgggatgtggtaacagagaccaagactgtggagttggtgattgtggctgatcactcggaggcccagaaataccgggacttccagcacctgctaaaccgcacactggaagtggccctcttgctggacacattcttccggcccctgaatgtacgagtggcactagtgggcctggaggcctggacccagcgtgacctggtggagatcagcccaaacccagctgtcaccctcgaaaacttcctccactggcgcagggcacatttgctgcctcgattgccccatgacagtgcccagctggtgactggtacttcattctctgggcctacggtgggcatggccattcagaactccatctgttctcctgacttctcaggaggtgtgaacatggaccactccaccagcatcctgggagtcgcctcctccatagcccatgagttgggccacagcctgggcctggaccatgatttgcctgggaatagctgcccctgtccaggtccagccccagccaagacctgcatcatggaggcctccacagacttcctaccaggcctgaacttcagcaactgcagccgacgggccctggagaaagccctcctggatggaatgggcagctgcctcttcgaacggctgcctagcctaccccctatggctgctttctgcggaaatatgtttgtggagccgggcgagcagtgtgactgtggcttcctggatgactgcgtcgatccctgctgtgattctttgacctgccagctgaggccaggtgcacagtgtgcatctgacggaccctgttgtcaaaattgccagctgcgcccgtctggctggcagtgtcgtcctaccagaggggattgtgacttgcctgaattctgcccaggagacagctcccagtgtccccctgatgtcagcctaggggatggcgagccctgcgctggcgggcaagctgtgtgcatgcacgggcgttgtgcctcctatgcccagcagtgccagtcactttggggacctggagcccagcccgctgcgccactttgcctccagacagctaatactcggggaaatgcttttgggagctgtgggcgcaaccccagtggcagttatgtgtcctgcacccctagagatgccatttgtgggcagctccagtgccagacaggtaggacccagcctctgctgggctccatccgggatctactctgggagacaatagatgtgaatgggactgagctgaactgcagctgggtgcacctggacctgggcagtgatgtggcccagcccctcctgactctgcctggcacagcctgtggccctggcctggtgtgtatagaccatcgatgccagcgtgtggatctcctgggggcacaggaatgtcgaagcaaatgccatggacatggggtctgtgacagcaacaggcactgctactgtgaggagggctgggcaccccctgactgcaccactcagctcaaagcaaccagctccctgaccacagggctgctcctcagcctcctggtcttattggtcctggtgatgcttggtgccggctactggtaccgtgcccgcctgcaccagcgactctgccagctcaagggacccacctgccagtacagggcagcccaatctggtccctctgaacggccaggacctccgcagagggccctgctggcacgaggcactaagtctcaggggccagccaagcccccacccccaaggaagccactgcctgccgacccccagggccggtgcccatcgggtgacctgcccggcccaggggctggaatcccgcccctagtggtaccctccagaccagcgccaccgcctccgacagtgtcctcgctctacctctgacctctccggaggttccgctgcctccaagccggacttagggcttcaagaggcgggcgtgccctctggagtcccctaccatgactgaaggcgccagagactggcggtgtcttaagactccgggcaccgccacgcgctgtcaagcaacactctgcggacctgccggcgtagttgcagcgggggcttggggaggggctgggggttggacgggattgaggaaggtccgcacagcctgtctctgctcagttgcaataaacgtgacatcttgggagcgttaaaaaaaaaaaaaaa

SEQ ID NO: 1713 - protein, 814 aa, Homo sapiens
MRLALLWALGLLGAGSPLPSWPLPNIGGTEEQQAESEKAPREPLEPQVLQDDLPISLKKVLQTSLPEPLRIKLELDGDSHILELLQNRELVPGRPTLVWYQPDGTRVVSEGHTLENCCYQGRVRGYAGSWVSICTCSGLRGLVVLTPERSYTLEQGPGDLQGPPIISRIQDLHLPGHTCALSWRESVHTQTPPEHPLGQRHIRRRRDVVTETKTVELVIVADHSEAQKYRDFQHLLNRTLEVALLLDTFFRPLNVRVALVGLEAWTQRDLVEISPNPAVTLENFLHWRRAHLLPRLPHDSAQLVTGTSFSGPTVGMAIQNSICSPDFSGGVNMDHSTSILGVASSIAHELGHSLGLDHDLPGNSCPCPGPAPAKTCIMEASTDFLPGLNFSNCSRRALEKALLDGMGSCLFERLPSLPPMAAFCGNMFVEPGEQCDCGFLDDCVDPCCDSLTCQLRPGAQCASDGPCCQNCQLRPSGWQCRPTRGDCDLPEFCPGDSSQCPPDVSLGDGEPCAGGQAVCMHGRCASYAQQCQSLWGPGAQPAAPLCLQTANTRGNAFGSCGRNPSGSYVSCTPRDAICGQLQCQTGRTQPLLGSIRDLLWETIDVNGTELNCSWVHLDLGSDVAQPLLTLPGTACGPGLVCIDHRCQRVDLLGAQECRSKCHGHGVCDSNRHCYCEEGWAPPDCTTQLKATSSLTTGLLLSLLVLLVLVMLGAGYWYRARLHQRLCQLKGPTCQYRAAQSGPSERPGPPQRALLARGTKSQGPAKPPPPRKPLPADPQGRCPSGDLPGPGAGIPPLVVPSRPAPPPPTVSSLYL

SEQ ID NO: 1714 - DNA, 1182 bp, Homo sapiens
ggtttccgggtcagggtgacctctggggtgaggaaactgcgactgggagcgggacccaggcgtgcagcattcgccatgctccgctcacgcgtgggagactgggctgtggggtaccggcccggaaagcacgcagcctccaaagccgccttcctcagggaaatttgcgtgaccttactgccctccgtctacaggccttgtacctctccaggccgatttttccacaatttaaatcccagttcacctggtatccagctccagcaacttagagcgtttcacgtcacgccgggcgccaggcgtcggcttgtataacctgaaaacgctcctgtttttctcatctgtgcagtgggttttgattcccaccatggccatcacccagtttcggttatttaaattttgtacctgcctagcaacagtattctcattcctaaagagattaatatgcagatctggcagaggacggaaattaagtggagaccaaataactttgccaactacagttgattattcatcagttcctaagcagacagatgttgaagagtggacttcctgggatgaagatgcacccaccagtgtaaagatcgaaggagggaatgggaatgtggcaacacaacaaaattctttggaacaactggaacctgactattttaaggacatgacaccaactattaggaaaactcagaaaattgttattaagaagagagaaccattgaattttggcatcccagatgggagcacaggtttctctagtagattagcagctacacaagatctgccttttattcatcagtcttctgaattaggtgacttagatacctggcaggaaaataccaatgcatgggaagaagaagaagatgcagcctggcaagcagaagaagttctgagacagcagaaactagcagacagagaaaagagagcagccgaacaacaaaggaagaaaatggaaaaggaagcacaacggctaatgaagaaggaacaaaacaaaattggtgtgaaactttcataacacatgttcaaattttatcatgccagtaggagaaatctcagctccacaacccaagcaacatttgtatggatttaagagtattttaagaagacatactgcttgattttaatacattgatcaggccatccaggacaccacgattctcccaaagtaccttgaactcttagtgattgagactc

SEQ ID NO: 1715 - protein, 213 aa, Homo sapiens
MAITQFRLFKFCTCLATVFSFLKRLICRSGRGRKLSGDQITLPTTVDYSSVPKQTDVEEWTSWDEDAPTSVKIEGGNGNVATQQNSLEQLEPDYFKDMTPTIRKTQKIVIKKREPLNFGIPDGSTGFSSRLAATQDLPFIHQSSELGDLDTWQENTNAWEEEEDAAWQAEEVLRQQKLADREKRAAEQQRKKMEKEAQRLMKKEQNKIGVKLS

SEQ ID NO: 1716 - DNA, 6969 bp, Homo sapiens
tcctgccgctgccctccacgcctccaatcccccacctccaccccctctcctttctctcttctcttccttcctctcctcctcctcccctccagccgctgggagccgcgggtcggacgagccgcagcctccttctctgcgtccatgtatgaggggaagaagacgaagaacatgttcctgacccgggctctggagaagatattggccgacaaggaagtgaagaaggcgcatcactcccagctgcgcaaagcttgcgaggtggcgttagaggaaataaaagcggaaactgaaaaacagagtcctcctcatggagaagcaaaagctggatcaagcacccttccaccagtgaaatcaaagacaaattttattgaagcagacaagtacttcttgccttttgagttggcatgccagtccaaatgtcctcgcatagttagtacatctctagattgcttacagaaacttattgcttatgggcacttgactggcaatgctccagatagtacaacaccaggcaaaaaattaattgatagaattattgaaacaatatgtggctgctttcagggccctcagacagatgaaggagttcagctgcagataataaaggctttacttactgcagtaacatcacaacacatagaaattcatgaagggactgtactgcaagctgtgagaacatgttacaatatctacttagcaagcaaaaatctcatcaatcagacaacagccaaagctactctcactcagatgctaaatgttatctttgcacgcatggaaaaccaagcattacaggaagcaaaacaaatggaaaaagaaaggcatcggcagcatcatcatctgttaccgtctccagtaagccatcacgagcctgaatcacctcaacttagatatttgccacctcagactgttgatcatatatcccaagaacacgaaggggaccttgacctccatacaaatgatgtagataaaagtcttcaggatgacacagagcctgaaaatggatctgatatttccagtgcagaaaatgaacagactgaagctgatcaggcaactgcagctgaaacattatctaaaaatgaagtgttatatgacggagaaaaccatgattgtgaggaaaagccacaagacattgtacagaacattgtagaagaaatggtgaacattgttgttggagatatgggagaagggactactataaatgcaagtgcagatggcaacattggaactatagaggatggtagtgacagtgaaaatattcaagcaaatggaattccaggaacaccaatttctgttgcatatacaccatccttacctgatgatagattgtcagtctcttccaatgatactcaggaatctggaaattcttcaggaccttcacctggtgctaagttttcccacattttacaaaaggatgcctttctagtattcaggtcattgtgtaaactgtcaatgaaaccactgtcagatggaccaccagatccaaagtctcatgaactacgatccaagattctttcattgcagttacttctatccattctgcagaatgcaggacctattttcaggacaaatgagatgtttattaatgctattaagcagtatctttgtgttgcactctcaaaaaatggagtctcatctgttccagaggtttttgagctttctctttctatatttcttactttgttgtcaaatttcaagacacatctgaagatgcaaattgaggtgttctttaaagaaattttcttatacattttggaaacttctaccagctcatttgatcacaaatggatggttattcagacactgacgaggatttgtgcagatgctcagagtgtagtggatatttatgtaaactatgactgtgacttaaatgcagccaatatatttgaaagactagtaaatgatctatcaaaaattgctcaaggaaggggcagtcaagaacttggtatgagtaatgttcaggaattgagcctgaggaaaaaaggtttagaatgcttagtgtcgatttcgaagtgtatggttgaatggagtaaggatcagtatgtgaatcccaactcccagacaactcttggtcaggaaaaaccctcagagcaagagatgagtgaaatcaaacaccctgagacaataaacagatacggaagtttaaattccctggagtcaacatcatcatcaggaataggcagctacagtacacagatgtctggcactgataatccagaacaatttgaggtcctaaagcaacaaaaagaaataatagaacaagggatagatttatttaataagaaaccaaagagaggaatacagtacctccaagaacaagggatgcttggcaccacacctgaagatattgcccaattcttacatcaagaggaaagattagactctactcaagtgggtgagttcctgggagataatgataaatttaacaaagaagtcatgtatgcatatgtggaccaacatgacttttcaggaaaagacttcgtttcagcccttcgtatgtttctagaaggatttcgtcttccaggggaagctcagaaaatcgatcgattaatggaaaaatttgctgcaagatacctagaatgcaaccaaggacaaactctctttgctagtgcggatacagcttatgttttggcttattcaattatcatgttgaccacagaccttcacagtccacaggtgaaaaataaaatgacaaaggaacaatacattaagatgaatagaggtatcaatgacagtaaagaccttcctgaagagtatctatcagccatctataatgaaatagctgggaaaaagatatcaatgaaagaaacaaaagaactaacaatccctacaaaatcaagtaaacagaatgtagccagtgaaaaacaaagaagacttctgtataacttagaaatggagcagatggccaagacagctaaagcactcatggaggccgtgagccatgttcaggcaccctttacaagtgcaacacatttggagcatgtgaggcccatgtttaagttggcttggacgccttttctggctgcattcagtgtgggtctacaagattgtgatgatactgaagtagcctctctttgcctggaaggtataagatgtgcaatcagaattgcatgcattttcagcattcagctggagagagatgcatatgtccaggcactagcaagatttaccttactcacagtgagttccggtattactgaaatgaaacagaagaacattgacacaataaaaacacttatcacagtggctcatacagatggaaattatttaggaaattcatggcatgagattctgaagtgcatcagtcagttgaagctggcacagcttataggaactggagtgaaacctcgatacatttctggaacagtgcgaggcagagaaggatctcttactggaacaaaagatcaggctcctgatgaatttgtgggtttagggctagttggaggaaatgtggactggaaacagatagcaagtattcaggaatccattggagaaaccagttctcagagtgttgttgttgctgtagatagaatattcacaggatctacaaggctagatggaaatgccattgtggattttgtccgttggctctgtgctgtgtctatggatgaattactttccacgacacacccaagaatgtttagtctacaaaaaatagtagaaatatcatattacaacatgggaagaataagattacagtggtctcgaatttgggaagttattggagatcattttaataaggttgggtgtaatcctaatgaagatgtagctatttttgcagtagactccttgaggcagttgtcaatgaagttcttagagaaaggggagcttgctaacttcagattccagaaggatttcttaagaccttttgaacatataatgaaacggaacaggtctccaacaattcgagatatggttgtacggtgtatagcacagatggttaattctcaagctgctaacattcgatctggatggaagaacattttctctgtatttcatctagctgcatctgatcaagatgaaagcatagtggaacttgcattccaaacaaccgggcacattgtcacccttgtatttgaaaaacactttccagcgaccattgattctttccaggatgcagtgaagtgtttgtctgaatttgcgtgcaatgcagctttcccagacacaagtatggaagcaattcgacttattcgccattgtgcaaaatatgtgtctgatagacctcaggctttcaaggaatacacaagcgatgatatgaacgtagcacctgaagacagggtgtgggtgagaggatggttcccaattctctttgagttatcctgtatcatcaatagatgcaaattagatgtaagaaccaggggtttaacagtaatgtttgaaataatgaaaacatatggccacacttatgagaaacactggtggcaggatttatttagaattgttttcagaatctttgacaatatgaaattgccagaacaacagacagagaaagctgaatggatgacaacaacttgcaatcatgcactttatgcaatctgtgatgtattcactcagtatttagaagtactcagtgatgtacttttggatgacatttttgctcagctctactggtgtgtgcagcaagacaatgagcagttagcgcgatctggtacaaactgtttagagaatgttgttattctgaatggtgaaaaatttaccctagaaatctgggataaaacttgcaactgcacactggatatcttcaaaaccacaatcccacatgcgctgttgacctggcgacccaattctggagaaactgcccccccacctccatctcctgtaagtgaaaagccattggatacaatatcacagaagtctgtagatattcatgattctattcaaccaaggtctgtggataacagaccacaagcaccactggtttctgcgtctgctgttaatgaagaagtcagcaaaattaaatctacagcaaaatttccagaacaaaaattgtttgctgccctgttgattaaatgtgttgtgcagctggaactcatccagactatcgacaacattgtcttcttcccagccacaagtaagaaagaagatgcagaaaacttagctgcagcacagagagatgcggtggactttgatgttcgcgttgatactcaagaccaaggaatgtaccgctttttaacatcacaacaactttttaagctactggactgcttattagagtcacatagatttgcaaaagcgtttaattccaacaacgaacagaggactgccctgtggaaagcaggattcaaaggcaaatccaagcccaaccttctgaagcaggagaccagcagcctggcctgtgggctgcgcattctcttccggatgtacatggatgagagccgcgttagtgcctgggaggaggtccagcagaggcttttgaatgtctgcagtgaagcactaagttacttcctcactctaacatcagaaagtcatcgagaagcctggactaacttactgcttttgtttctaactaaagttctaaagataagtgataataggtttaaagctcatgcatcattctactaccctctcttatgtgaaattatgcaatttgacttgattcctgaacttcgtgctgttcttagaagattttttctgcgaatcggagtagtttttcagatatcacaaccacctgaacaggaacttggtattaacaaacagtgatgggaacttaatatttttgttggcatttacatccctctgctctttaaaaggacgctggagctgaggtttcctacctgaaaaatgatttctctggattgcagtgtctgagttactggtaaagatgcttagaagtcttactcaaacttgcaacactccagtcccttttagtgctggtggattttgtgtgttatattggcctcatgttgagcagaaagcctgtttaaacagtgtcagctcatgctcacgggtccttccctgtcttccacggcaggaaaagccccacgtttttggcaggtgtggaagtgaaacttacccaaagaactatagatgtaaagattgaacttctacaagaagtacaactcagggagagctgtattttgaaggataaaatgtttataattggggagtggggagagaagaagaaattattgttcatggtaaaagatatttagcaactatggtattcttattctgaagatttttgcacactcaggctatctgagatactggtaatcatcctgtgaaaaatgtacagagatgcaggtctgtaatataaaaatcttaaaacattatatagttcttcctgcactgttttctttattttcttattcatttgctaaatacccataatattttgtcaaatgcactaaacatttgggtggaactttcttttttattttatagggatttttagttttgccctttttggtaggtggtgattttgaggctgtaacatgcccagaagctgttgtggccgacacttcaacaatagggaaaaaaaggtagaaaatatccctactgacagtaactacctgtcacatatttctcttaggacttttaaagatgagccattaaaatagaatgatcctttatggaccaaaacttgaatcactgcaaaatgaatccagattgctgtcattttcttttcttttgggtggtggggcttgatgtagattttactctatgtacagaatttaacgttgaatatattaaaataacaaatctggcatggtttgcggaggttagatttactggaaatgtattcatactgtgaattgtgctctgatggttaaaagacaagattgtcaagcattccgtattaacagtggatgtagaaaattttttcagatggacaaaatgtatatggtacagatgtaaagttttctatgtaaaaaattctgtacaactttctgtacaatattgattcccatctggcatattctaatcaggttataggtcaataaagtttttgaattataaaaaaaaaaaaaaaaaaaa

SEQ ID NO: 1717 - protein, 1849 aa, Homo sapiens
MYEGKKTKNMFLTRALEKILADKEVKKAHHSQLRKACEVALEEIKAETEKQSPPHGEAKAGSSTLPPVKSKTNFIEADKYFLPFELACQSKCPRIVSTSLDCLQKLIAYGHLTGNAPDSTTPGKKLIDRIIETICGCFQGPQTDEGVQLQIIKALLTAVTSQHIEIHEGTVLQAVRTCYNIYLASKNLINQTTAKATLTQMLNVIFARMENQALQEAKQMEKERHRQHHHLLPSPVSHHEPESPQLRYLPPQTVDHISQEHEGDLDLHTNDVDKSLQDDTEPENGSDISSAENEQTEADQATAAETLSKNEVLYDGENHDCEEKPQDIVQNIVEEMVNIVVGDMGEGTTINASADGNIGTIEDGSDSENIQANGIPGTPISVAYTPSLPDDRLSVSSNDTQESGNSSGPSPGAKFSHILQKDAFLVFRSLCKLSMKPLSDGPPDPKSHELRSKILSLQLLLSILQNAGPIFRTNEMFINAIKQYLCVALSKNGVSSVPEVFELSLSIFLTLLSNFKTHLKMQIEVFFKEIFLYILETSTSSFDHKWMVIQTLTRICADAQSVVDIYVNYDCDLNAANIFERLVNDLSKIAQGRGSQELGMSNVQELSLRKKGLECLVSISKCMVEWSKDQYVNPNSQTTLGQEKPSEQEMSEIKHPETINRYGSLNSLESTSSSGIGSYSTQMSGTDNPEQFEVLKQQKEIIEQGIDLFNKKPKRGIQYLQEQGMLGTTPEDIAQFLHQEERLDSTQVGEFLGDNDKFNKEVMYAYVDQHDFSGKDFVSALRMFLEGFRLPGEAQKIDRLMEKFAARYLECNQGQTLFASADTAYVLAYSIIMLTTDLHSPQVKNKMTKEQYIKMNRGINDSKDLPEEYLSAIYNEIAGKKISMKETKELTIPTKSSKQNVASEKQRRLLYNLEMEQMAKTAKALMEAVSHVQAPFTSATHLEHVRPMFKLAWTPFLAAFSVGLQDCDDTEVASLCLEGIRCAIRIACIFSIQLERDAYVQALARFTLLTVSSGITEMKQKNIDTIKTLITVAHTDGNYLGNSWHEILKCISQLKLAQLIGTGVKPRYISGTVRGREGSLTGTKDQAPDEFVGLGLVGGNVDWKQIASIQESIGETSSQSVVVAVDRIFTGSTRLDGNAIVDFVRWLCAVSMDELLSTTHPRMFSLQKIVEISYYNMGRIRLQWSRIWEVIGDHFNKVGCNPNEDVAIFAVDSLRQLSMKFLEKGELANFRFQKDFLRPFEHIMKRNRSPTIRDMVVRCIAQMVNSQAANIRSGWKNIFSVFHLAASDQDESIVELAFQTTGHIVTLVFEKHFPATIDSFQDAVKCLSEFACNAAFPDTSMEAIRLIRHCAKYVSDRPQAFKEYTSDDMNVAPEDRVWVRGWFPILFELSCIINRCKLDVRTRGLTVMFEIMKTYGHTYEKHWWQDLFRIVFRIFDNMKLPEQQTEKAEWMTTTCNHALYAICDVFTQYLEVLSDVLLDDIFAQLYWCVQQDNEQLARSGTNCLENVVILNGEKFTLEIWDKTCNCTLDIFKTTIPHALLTWRPNSGETAPPPPSPVSEKPLDTISQKSVDIHDSIQPRSVDNRPQAPLVSASAVNEEVSKIKSTAKFPEQKLFAALLIKCVVQLELIQTIDNIVFFPATSKKEDAENLAAAQRDAVDFDVRVDTQDQGMYRFLTSQQLFKLLDCLLESHRFAKAFNSNNEQRTALWKAGFKGKSKPNLLKQETSSLACGLRILFRMYMDESRVSAWEEVQQRLLNVCSEALSYFLTLTSESHREAWTNLLLLFLTKVLKISDNRFKAHASFYYPLLCEIMQFDLIPELRAVLRRFFLRIGVVFQISQPPEQELGINKQ

SEQ ID NO: 1718 - DNA, 3737 bp, Homo sapiens
agcagcggcccgaggctcccggagcatcgcgctgggagaagacttcgccgctcggggccgcagcctggtgagctcagcccccttcgggccctcccctgcatcccagccggggcctctccgagccggcgctgatcgatgccgacacaccccggggaccctatcgcgactccatcgcgccatatcgcgacaccatcgtgccctgtcgagactccattttgtcacagcccttttcaatatatatctttttttttttaatttgccctgtcatctttgggggctgtctcccatgtcgtgattttgacgtgatctctccgtgacatcaccgcgccatcgtgaagtgtgatctcatcgccgccctgtcgtgacttcatcaatgtcgtgttgtgacctggctgcggcgggacagttgggcaaggcgagcatcatggcctcggattgcgagccagctctgaaccaggcagagggccgaaaccccaccctggagcgctacctgggagccctccgtgaggccaagaatgacagcgagcagtttgcagccctgctgctagtgaccaaggcagtcaaagcaggtgacatagatgccaaaactcggcggcggatcttcgatgctgtcggcttcaccttccccaatcgtctcctgaccaccaaggaggcgccggatggctgccctgaccatgttctgcgggctttgggtgtggccctgctggcctgcttctgcagtgaccctgaactggccgcccatccccaagtcctgaacaagattcccattcttagcaccttcctcacagcccggggggacccggacgatgctgcccgccgctccatgattgatgacacctaccagtgcctgacggctgtagcaggcacacccagagggcctcggcacctcattgctggtggcaccgtgtctgccctatgccaggcatacctggggcacggctatggctttgaccaggccctggcactcctggtggggctgctggctgctgccgagacacagtgctggaaggaggcggagcccgacctgctggccgtgttgcggggcctcagtgaggatttccagaaagctgaggatgccagcaagtttgagctctgccagctgctgcccctctttttgcccccgacaaccgtgccccctgaatgctaccgggatctgcaggccgggctggcacgcatcctgggaagcaagctgagctcctggcagcgcaaccctgcactgaagctggcagcccgcctggcacacgcctgcggctccgactggatcccggcgggcagctccgggagcaagttcctggccctgctggtgaatctggcgtgcgtggaagtgcggctggcactggaggagacgggcacggaggtgaaagaggatgtggtgaccgcctgctatgccctcatggagttggggatccaggaatgcactcgctgtgagcagtcactgcttaaggagccacagaaggtgcagctcgtgagcgtcatgaaggaggccataggggctgttatccactacctgctgcaggtggggtcagagaagcagaaggagccctttgtgtttgcctcggtgcggatcctgggtgcctggctggccgaggagacctcatccttgcgtaaggaggtgtgccagctgctgcccttcctcgtccgctatgccaagaccctctacgaggaggccgaggaggccaatgacctttcccagcaggtggccaacctggccatctcccccaccaccccagggcccacctggccaggagacgctctccggctcctcctgcctggctggtgccacctgaccgttgaagatgggccccgggagatcctgatcaaggaaggggccccctcgcttctgtgcaagtatttcctgcagcagtgggaactcacatcccctggccacgacacctcggtgctgcctgacagcgtggagattggcctgcagacctgctgccacatcttcctcaacctcgtggtcaccgcaccggggctgatcaagcgtgacgcctgcttcacatctctaatgaacaccctcatgacgtcgctaccagcactagtgcagcaacagggaaggctgcttctggctgctaatgtggccaccctggggctcctcatggcccggctccttagcacctctccagctcttcagggaacaccagcatcccgagggttcttcgcagctgccatcctcttcctatcacagtcccacgtggcgcgggccaccccgggctcagaccaggcagtgctagccctgtcccctgagtatgagggcatctgggccgacctgcaggagctctggttcctgggcatgcaggccttcaccggctgtgtgcctctgctgccctggctggcccccgctgccctgcgctcccgctggccgcaggagctgctccagctgctaggcagtgtcagccccaactctgtcaagcccgagatggtggccgcctatcagggtgtcctggtggagctggcgcgggccaaccggctgtgccgggaggccatgaggctgcaggcgggcgaggagacggccagccactaccgcatggctgccttggagcagtgcctgtcagagccctgaggggtgtccaccggggacagacccaggggcgggcagagagggaaggagggaggaggcatcttccctgaagcccccaatctggcccccccctccccagacttcctccccaaaacaccccagctttctggcttttctgagggcaagggcatggtgcccacccctcaagtgtaaggaactgcgttccgcccctcaggcccccatgggggcagggatcggcttggaaatcaacgtggttgtccccgccaggccggggaaggttggagcagcccccagggaggggggcactaggtgtcattgtgcccgatgtctggctcccctgcaggagggaggctccagggtaagacagggctggcaggagcagactgcctcagcccatgtgccctgccggccagggcgtgggctcccctcggctgtggtgcctcctctggccccccaggtccacgtcctttaaattggccctttggctcttgcccttggctcccttgggcagacagcaggcttaggccattgatatcgcagttcttcctatcagcttcagtgacccagggtctgaactgcctccatcctagggcaacctggggcagacaggcctggtggggggtggggaaacctccttccacctgagcttgcttgaagggacccagagtctttgggcccagatctttaaacctttgtgtcgtgttgcagcagagtgacgatgggggttggggggttatttattttgcctgtccttatccctgcttggacacctgagcatctgattcctgtccccctggtgccatctggcctggctggagccaggaacaggagggacacttccccagaatccgcatgtttccccagtgattacactccactgccaccgtggtgcctggctttaactcccacccctgctatgactcctctctgcagagacgcgactggcggctccagcagggactacctttcttataaacccagggggaccacacacacacacacacacacacacacacacacacacacacacacacacacacacacacactcttgatcccttgcttccctcccccagtgcgttctgtgatcgccaagttcaaagctgtgcacatgtggacactcaataaatgttcattggtgaaaaaaaaaaaaaaaaaaaaaaaaaaaaaaaaaaaaaaaaaaaaaaaaaaaaaaa

SEQ ID NO: 1719 - protein, 729 aa, Homo sapiens
MSCCDLAAAGQLGKASIMASDCEPALNQAEGRNPTLERYLGALREAKNDSEQFAALLLVTKAVKAGDIDAKTRRRIFDAVGFTFPNRLLTTKEAPDGCPDHVLRALGVALLACFCSDPELAAHPQVLNKIPILSTFLTARGDPDDAARRSMIDDTYQCLTAVAGTPRGPRHLIAGGTVSALCQAYLGHGYGFDQALALLVGLLAAAETQCWKEAEPDLLAVLRGLSEDFQKAEDASKFELCQLLPLFLPPTTVPPECYRDLQAGLARILGSKLSSWQRNPALKLAARLAHACGSDWIPAGSSGSKFLALLVNLACVEVRLALEETGTEVKEDVVTACYALMELGIQECTRCEQSLLKEPQKVQLVSVMKEAIGAVIHYLLQVGSEKQKEPFVFASVRILGAWLAEETSSLRKEVCQLLPFLVRYAKTLYEEAEEANDLSQQVANLAISPTTPGPTWPGDALRLLLPGWCHLTVEDGPREILIKEGAPSLLCKYFLQQWELTSPGHDTSVLPDSVEIGLQTCCHIFLNLVVTAPGLIKRDACFTSLMNTLMTSLPALVQQQGRLLLAANVATLGLLMARLLSTSPALQGTPASRGFFAAAILFLSQSHVARATPGSDQAVLALSPEYEGIWADLQELWFLGMQAFTGCVPLLPWLAPAALRSRWPQELLQLLGSVSPNSVKPEMVAAYQGVLVELARANRLCREAMRLQAGEETASHYRMAALEQCLSEP

SEQ ID NO: 1720 - DNA, 3433 bp, Homo sapiens
ggcacgagggcgagctgtcaggccgagtgtcaggccgggcaggtacgcggcgcgcgcccccggcgccccccgctccccgccgggacgccccgcgccgagccggaggccgcgtggacccgaaagccgctgggaaaagtttacccaaggtccagcctagcccctaggcaccatgtcggacagtgatctaggtgaggacgaaggcctcctctccctggcgggcaaaaggaagcgcagggggaacctgcccaaggagtcggtgaagatcctccgggactggctgtacttgcaccgctacaacgcctacccctcagagcaggagaagctgagcctttctggacagaccaacctgtcagtgctgcaaatatgtaactggttcatcaatgcccggcggcggcttctcccagacatgcttcggaaggatggcaaagaccctaatcagtttaccatttcccgccgcgggggtaaggcctcagatgtggccctcccccgtggcagcagcccctcagtgctggctgtgtctgtcccagcccccaccaatgtgctctccctgtctgtgtgctccatgccgcttcactcaggccagggggaaaagccagcagcccctttcccacgtggggagctggagtctcccaagcccctggtgacccctggtagcacacttactctgctgaccagggctgaggctggaagccccacaggtggactcttcaacacgccaccacccacacccccagagcaggacaaagaggacttcagcagcttccagctgctggtggaggtggcgctacagagggctgctgagatggagcttcagaagcagcaggacccatcactcccattactgcacactcccatccctttagtctctgaaaatccccagtaggcatctgccaagaagggtgctgaaggctccagccagctgtcctgggtttccgttttggttccctttcatacagagggttttctatggatcactgccaaacattgggatcatctcctctgtccagaggtcttcaacaggaagatgccagctggcaccactgcactgtgatgggggccctctcctctgctgactctgccgtttctccaggcctccgctcagtgatgagaccaagagatcggagacaagcatggtgctgctgcttctgctgcttctccagaaaatccctgggacacctttgttccagcctggtttcctgggctgggctcaggaaagctgccaaattcagtcctatgttgggtccaagctgcccctgtgctgtttctgtcaagccaggtgtggacattccaagttcatatgcgtgaacaaaagaaaagaggaacccagtggatgtaacagaaccgactccagttgaatgtttagatttttgctaaactgttttctttttccctttttttgctgtggtttgcattcacggcagtagttagcccaggtgtggggaacgagagtgcactgcatgatagcgttctggtgagctgggaaggacccaccactgccactgaggattgttttggaagaaaggaatatttttatcttggggaccagctaagtctctgcagtagtgtgaaattccaaatggttgttttatcattggtttggtttaccaaaaaaaaggcagggaaaaaaaaaaaaaaacaaccgtatgagcgcattggcttgtctgccgcaggcacagaagggtagaaagccacagcagggggcagtccagcagactctgactcaactttctaggcacctagcagagaaagataagatcaaaaggtgtttggtttttcttttaatttttattgtagtttttttgggtgggtgggggaagtaaactagactgaagcgatggatttttttttttcttttttttctttagtgtttttccctttgttcttgaacacttttgccctgcagcctcagttttgaattcttttagcaacttggattagaggggcccatatgtcagaagctcccagcacctcctacttgggagaaaagtgagccatctgctggtcaggaagtcctccagagaggcagcttttcccacaatggtggcaggaaactttggggaaagcaggaatggtgtccactgctgcggaggaactgccttcagagaaggtggggctggaaaagggttagaagcctcctagctgggattgtctttgtttcacctttctttaaattagaattacagaagcccctgcccagtgaacagataacaattggtcttatgctcctccctttcccccattttttcttttgctgttttgttttttgttttttgtttgtttgtttgtttttttgagacagagtcatgctctgtcacccgggctggagtgcagtggtgcgatctcagctcactgtactccagcccgggttcaagcaattatttgcctcagcctcccgagtagctgggattataggcacccgccaccatgtctggcttttagtagagacggggtttcaccatcttggccaggctggtcttggaactcctgacctcgtgagccaccacgcccagcctcttttgctgtttcattgctgacagtgttcaacaatatgccccatctttatatatcctaagaaacactaatcctaggttattgctagccaaaatatttttgtcctgagtagtgtcactgggccaaaagatagatcaggacgacagcctttagttttcctgaaatcaccaggtcaggcacaaggagaaaaggttcctggatactgactaacttgggtgggtctagccaggagaaagacagtaacatgtgttctgtactttctgggaagatccctgaagccatcacagaggctccccaacttctgagtcgcccatctgttgctgtgggagtgtgaacggatcgctgaaggagagggagctttgctctctctaggtgggcaagtttcctgggctctctgtgttgcctccctctggcttcttcctcccgtgccctctccccgtgtgccccagggggatcagggatcctcaccctcctgaggcccagtggggaagaatgaacatggcttcatccaggttaactgatgctgccatttgcccagcctcttccatcccagccctgtcagtgagcccaggtctggtgcaactgctgcaggatgcctgtagtagggaactctggaagtgtattgggctgaggtgggattttccctccccccagtgcactgagcaatggagggtggtgagggagccatgctgctgaattctggttggcatttccccattatgtaaaatggggtgttgggtagggcagactctgcttgggtttggttgtaagataaacctggaggagaagcacagttgtcccattgaattatttgagcaaaaactactgtaaataacttttttgtcttttgtcaaataaaatttttttttgtttttttaagcagaaaaaaaaaaaaaaaaaaaaaaaaaaaaaaaaaaaaaaa

SEQ ID NO: 1721 - protein, 237 aa, Homo sapiens
MSDSDLGEDEGLLSLAGKRKRRGNLPKESVKILRDWLYLHRYNAYPSEQEKLSLSGQTNLSVLQICNWFINARRRLLPDMLRKDGKDPNQFTISRRGGKASDVALPRGSSPSVLAVSVPAPTNVLSLSVCSMPLHSGQGEKPAAPFPRGELESPKPLVTPGSTLTLLTRAEAGSPTGGLFNTPPPTPPEQDKEDFSSFQLLVEVALQRAAEMELQKQQDPSLPLLHTPIPLVSENPQ

SEQ ID NO: 1722 - DNA, 5473 bp, Homo sapiens
ggaggtgcgagcccctgccgggtcccccctgcgccggaccatgtattcggcccacaggcccctgatgcccgcgtccagcgcggcctcccgtggcctcggcatgttcgtgtggacgaatgtggaacctcgctctgtggctgtgttcccttggcactccttagtccccttcctggcacccagccagcctgacccctccgtgcagccgagcgaggcccagcaacctgccagccacccagtggcctccaaccagagcaaagaacctgctgagtcggcagctgttgctcatgaacggccaccaggtgggacagggagtgctgaccctgagcggccccctggagccacatgccctgagagcccaggacccggacccccacaccctttgggggtggtggaatctggtaagggtccgcctcccaccacggaggaggaggcctccggccccccaggagagccccggctggacagtgagacagagagtgaccatgatgatgccttcctctccatcatgtctcctgagatccagttgcctctaccgcccggaaaacgtcggacccagtccctcagtgccctacccaaggaacgggactcatcttctgagaaggatggacgcagccccaacaagcgggagaaggaccacatccggcggcccatgaatgccttcatgatcttcagcaagcggcaccgggccctggtccaccagcgtcatcccaaccaggacaaccggaccgtcagcaagatcctgggcgagtggtggtatgccctggggcccaaggagaagcagaagtaccacgacctggccttccaggtgaaggaggcccacttcaaggcccacccagattggaagtggtgcaacaaggaccgaaagaagtccagctcagaggccaagcccacgagcctggggctggcaggagggcacaaggagacgcgggagcggagcatgtcggagacgggcactgctgctgcccctggggtgtcctctgagctcctgtccgttgcagcccagacactcctgagctcagacaccaaggctccggggagcagctcctgtggggcagaacggctacacacagttgggggacctggctcagcccggccccgagctttctcccacagcggggtacacagcctggacggcggagaagtagacagtcaggcgctacaggaactgacgcagatggtgtctggccctgcatcgtactctggcccaaagccttctacccagtatggagctccaggaccctttgcagcccctggtgagggaggtgccttggcggccactgggcggcccccgctgctgcccacccgagcttctcgttctcagcgtgcggccagtgaggacatgacgagtgatgaggagcgcatggtcatctgtgaggaggaaggggatgatgatgtcattgctgacgatggcttcggcaccactgacattgatctcaagtgcaaggagcgggtgaccgacagcgagagtggggacagctctggggaggacccagagggcaacaagggctttggtcggaaggtgttttcacctgtgatccgttcctcctttacccactgccgccccccactggaccctgagcccccagggcccccggatcctcctgtagcctttggcaaaggctatggttccgccccatcctcctctgcgtcctcgcctgcttcctcctcagcctcggcagccacctccttctcactgggctcaggaaccttcaaggcccaggagtctggtcagggcagcacagcgggccccctacggcccccaccccctggggctgggggtccagcgacaccttccaaggcaacccggttcctcccaatggatcctgccaccttccggcgcaagagacccgaaagtgtgggtggcctggagccaccaggcccctcagtcatcgcggcccctcccagcggaggaggaaacatcctgcagacactggtgctgcccccaaacaaggaggagcaagagggcggcggagccagagtgccctccgcccccgccccatcactggcctatggggccccagcagctcccctgtcccgtcctgccgccaccatggtcaccaatgtggtgcggcctgtcagcagcactcctgtgcccatcgcctctaagcccttccccacctctggccgggctgaggcgtctccaaatgacacagcaggtgccaggactgaaatgggcactgggtctcgggtgcctgggggctccccgctgggtgtcagcttagtgtattcggacaagaagtcggcagcagccacctcaccagccccacacttggtggctggacccctgctgggcactgtggggaaggcgcctgccactgtcactaacctactggtgggcaccccggggtatggggcccctgcgccccctgctgtccagttcattgcccagggggcccctggtggtgggaccactgcgggctcaggagcaggtgctgggagtggccccaatgggccagtacccctgggcatcctgcaaccaggtgccctgggcaaggctgggggaatcacccaggtacagtacatcctgcccacgctgccccagcagcttcaggtggcacctgccccagcaccagcccctgggaccaaggcagcggctcccagcggccctgcacccaccaccagcatccgtttcaccctcccaccgggcacttccaccaacggcaaagtcctggctgccactgcacccactcctggcatccccatcctgcagtctgtaccctccgccccaccccccaaagcccagtcagtttctcccgtgcaggccccgcccccgggtggctcagcccagctgctgcctgggaaggtcctagtgcctctggccgcccctagcatgtcagtgcggggtggaggggccggccagccactgccactggtgagcccgcccttctcagtacctgtgcagaatggtgcccagccccccagcaagatcatccagctgaccccggtgcctgtgagcacacccagcggcctggtgccgcccctgggcccagccacactccctggacccacctctcagcctcagaaggtcctgttgccctcctccaccagaatcacctatgtgcagtcagcgggcgggcacgcgctgcccctgggtaccagccctgcgtccagccaggctggaacagtcacctcgtacgggcccacgagctctgtagctctaggcttcacctcgctggggcccagcggccccgccttcgtgcagcccctgctctcagcaggccaagccccactgctggctcccggtcaggtgggcgtgtcacctgtgcccagtccccagctgccgcctgcctgtgcagcccccggaggtcctgtcataacagcattttactctggcagccctgcacccacctcctcagcacccctggcccagccatcccaggcccccccaagcctggtctacactgtggccaccagcacaaccccacctgcagccaccattctgcccaagggcccgccagcccctgccactgccaccccagccccgactagccctttccccagcgccacagcaggttccatgacctacagcttagtggcccccaaggcccagcggcccagcccgaaggccccccagaaagtgaaggcagccatcgccagcattcccgtggggtcctttgaggcaggtgcctctgggcggcctggccctgcaccccggcagcctctggagcctggcccagtccgagagccaactgccccagagtctgagcttgaggggcagcccacaccaccagcccctccacccctgccagagacctggactcccacggcccggagcagccccccactgcccccacctgctgaggagcggaccagcgccaagggccctgagaccatggccagcaaattccccagctcatcttcagactggcgcgtccctgggcagggcctggagaatcgtggggagcctcccactcctcccagcccggccccagctccagctgtagcccctggtggcagcagcgagagcagcagtgggcgggcagccggggacaccccggagcgcaaggaggcggctggtactggcaagaaggtgaaggtgcggcccccgcccctgaagaagacctttgactctgtggacaacagggtcctgtcagaagtggacttcgaagagcgctttgctgagttgcctgagtttcggcctgaggaggtgctgccctcccccaccctgcagtctctggccacctcaccccgggccatcctgggctcttaccgcaagaagaggaagaactccacggacctggattcagcacccgaggaccccacctcgcccaagcgcaagatgagaagacgctccagctgcagctcggagcccaacacccccaagagtgccaagtgcgagggggacatcttcacctttgaccgtacaggtacagaagccgaggacgtgcttggggagctagagtatgacaaggtgccatactcctccctgcggcgcaccctggaccagcgccgggccctggtcatgcagctctttcaggaccatggcttcttcccgtcagcccaggccacagccgccttccaggcccgctatgcagacatctttccctccaaggtttgtctgcagttgaagatccgtgaggtgcgccagaagatcatgcaggctgccactcccacggagcagccccctggagctgaggctcctctccctgtaccgccccccactggcaccgctgctgcccctgcccccactcccagccccgcagggggccctgaccccacctcacccagctcggactctggcacggcccaggctgccccgccactgcctccacccccagagtcggggcctggacagcctggctgggagggggctccccagccctcccccccacccccaggtccctccacagctgccacaggcaggtgagggacccctgagaagatgccaggacttatagtaccccctcaggacatggacagtatgtgggggcaggaaggttatctcctcccgggtaaagccatttcgtcctctccagtttggggcggaatgaggcctgctcctcttgtaaatacccccttccctcgaagctccctcccggtgctggggggcagctgaggggctgcaggggcagtctccctcctccaagcccctgtacataacctggagcgtgtgaccttcagagcttttcactttatgcaaaatggctcctgtgagggctgcaagctggagggtggtgcaggccttgggccacagggaggcgcctgtggaatagggggagttcatgcaccccttttttccccagaggggctggactcaggttagtttgggggtgggggctcctgcactttgccacaggcacggggagggttttctcctcaccccctctgccctcccaacttgggttgtactttctaagaaggtgattccccctgcccttgcccccttccccagaacaaaacatgttgatcatgtgcaatatttcttactgtgccgagaagccgcaatgagcgagattaaagctgtttaacacac

SEQ ID NO: 1723 - protein, 1608 aa, Homo sapiens
MYSAHRPLMPASSAASRGLGMFVWTNVEPRSVAVFPWHSLVPFLAPSQPDPSVQPSEAQQPASHPVASNQSKEPAESAAVAHERPPGGTGSADPERPPGATCPESPGPGPPHPLGVVESGKGPPPTTEEEASGPPGEPRLDSETESDHDDAFLSIMSPEIQLPLPPGKRRTQSLSALPKERDSSSEKDGRSPNKREKDHIRRPMNAFMIFSKRHRALVHQRHPNQDNRTVSKILGEWWYALGPKEKQKYHDLAFQVKEAHFKAHPDWKWCNKDRKKSSSEAKPTSLGLAGGHKETRERSMSETGTAAAPGVSSELLSVAAQTLLSSDTKAPGSSSCGAERLHTVGGPGSARPRAFSHSGVHSLDGGEVDSQALQELTQMVSGPASYSGPKPSTQYGAPGPFAAPGEGGALAATGRPPLLPTRASRSQRAASEDMTSDEERMVICEEEGDDDVIADDGFGTTDIDLKCKERVTDSESGDSSGEDPEGNKGFGRKVFSPVIRSSFTHCRPPLDPEPPGPPDPPVAFGKGYGSAPSSSASSPASSSASAATSFSLGSGTFKAQESGQGSTAGPLRPPPPGAGGPATPSKATRFLPMDPATFRRKRPESVGGLEPPGPSVIAAPPSGGGNILQTLVLPPNKEEQEGGGARVPSAPAPSLAYGAPAAPLSRPAATMVTNVVRPVSSTPVPIASKPFPTSGRAEASPNDTAGARTEMGTGSRVPGGSPLGVSLVYSDKKSAAATSPAPHLVAGPLLGTVGKAPATVTNLLVGTPGYGAPAPPAVQFIAQGAPGGGTTAGSGAGAGSGPNGPVPLGILQPGALGKAGGITQVQYILPTLPQQLQVAPAPAPAPGTKAAAPSGPAPTTSIRFTLPPGTSTNGKVLAATAPTPGIPILQSVPSAPPPKAQSVSPVQAPPPGGSAQLLPGKVLVPLAAPSMSVRGGGAGQPLPLVSPPFSVPVQNGAQPPSKIIQLTPVPVSTPSGLVPPLGPATLPGPTSQPQKVLLPSSTRITYVQSAGGHALPLGTSPASSQAGTVTSYGPTSSVALGFTSLGPSGPAFVQPLLSAGQAPLLAPGQVGVSPVPSPQLPPACAAPGGPVITAFYSGSPAPTSSAPLAQPSQAPPSLVYTVATSTTPPAATILPKGPPAPATATPAPTSPFPSATAGSMTYSLVAPKAQRPSPKAPQKVKAAIASIPVGSFEAGASGRPGPAPRQPLEPGPVREPTAPESELEGQPTPPAPPPLPETWTPTARSSPPLPPPAEERTSAKGPETMASKFPSSSSDWRVPGQGLENRGEPPTPPSPAPAPAVAPGGSSESSSGRAAGDTPERKEAAGTGKKVKVRPPPLKKTFDSVDNRVLSEVDFEERFAELPEFRPEEVLPSPTLQSLATSPRAILGSYRKKRKNSTDLDSAPEDPTSPKRKMRRRSSCSSEPNTPKSAKCEGDIFTFDRTGTEAEDVLGELEYDKVPYSSLRRTLDQRRALVMQLFQDHGFFPSAQATAAFQARYADIFPSKVCLQLKIREVRQKIMQAATPTEQPPGAEAPLPVPPPTGTAAAPAPTPSPAGGPDPTSPSSDSGTAQAAPPLPPPPESGPGQPGWEGAPQPSPPPPGPSTAATGR

SEQ ID NO: 1724 - DNA, 2412 bp, Homo sapiens
ctccactgaccgtcccgacgatgctacgcgcgcccggctgcctcctccggacctccgtagcgcctgccgcggccctggctgcggcgctgctctcgtcgcttgcgcgctgctctcttctagagccgagggacccggtggcctcgtcgctcagcccctatttcggcaccaagactcgctacgaggatgtcaaccccgtgctattgtcgggccccgaggctccgtggcgggaccctgagctgctggaggggacctgcaccccggtgcagctggtcgccctcattcgccacggcacccgctaccccacggtcaaacagatccgcaagctgaggcagctgcacgggttgctgcaggcccgcgggtccagggatggcggggctagtagtaccggcagccgcgacctgggtgcagcgctggccgactggcctttgtggtacgcggactggatggacgggcagctagtagaaaagggacggcaggatatgcgacagctggcgctgcgtctggcctcgctcttcccggcccttttcagccgtgagaactacggccgcctgcggctcatcaccagttccaagcaccgctgcatggatagcagcgccgccttcctgcaggggctgtggcagcactaccaccctggcttgccgccgccggacgtcgcagatatggagtttggacctccaacagttaatgataaactaatgagattttttgatcactgtgagaagtttttaactgaagtagaaaaaaatgctacagctctttatcacgtggaagccttcaaaactggaccagaaatgcagaacattttaaaaaaagttgcagctactttgcaagtgccagtaaatgatttaaatgcagatttaattcaagtagcctttttcacctgttcatttgacctggcaattaaaggtgttaaatctccttggtgtgatgtttttgacatagatgatgcaaaggtattagaatatttaaatgatctgaaacaatattggaaaagaggatatgggtatactattaacagtcgatccagctgcaccttgtttcaggatatctttcagcacttggacaaagcagttgaacagaaacaaaggtctcagccaatttcttctccagtcatcctccagtttggtcatgcagagactcttcttccactgctttctctcatgggctacttcaaagacaaggaacccctaacagcgtacaattacaaaaaacaaatgcatcggaagttccgaagtggtctcattgtaccttatgcctcgaacctgatatttgtgctttaccactgtgaaaatgctaagactcctaaagaacaattccgagtgcagatgttattaaatgaaaaggtgttacctttggcttactcacaagaaactgtttcattttatgaagatctgaagaaccactacaaggacatccttcagagttgtcaaaccagtgaagaatgtgaattagcaagggctaacagtacatctgatgaactatgagtaactgaagaacatttttaattctttaggaatctgcaatgagtgattacatgcttgtaataggtaggcaattccttgattacaggaagcttttatattacttgagtatttctgtcttttcacagaaaaacattgggtttctctctgggtttggacatgaaatgtaagaaaagatttttcactggagcagctctcttaaggagaaacaaatctatttagagaaacagctggccctgcaaatgtttacagaaatgaaattcttcctacttatataagaaatctcacactgagatagaattgtgatttcataataacacttgaaaagtgctggagtaacaaaatatctcagttggaccatccttaacttgattgaactgtctaggaactttacagattgttctgcagttctctcttcttttcctcaggtaggacagctctagcattttcttaatcaggaatattgtggtaagctgggagtatcactctggaagaaagtaacatctccagatgagaatttgaaacaagaaacagagtgttgtaaaaggacaccttcactgaagcaagtcggaaagtacaatgaaaataaatatttttggtatttatttatgaaatatttgaacattttttcaataattcctttttacttctaggaagtctcaaaagaccatcttaaattattatatgtttggacaattagcaacaagtcagatagttagaatcgaagtttttcaaatccattgcttagctaactttttcattctgtcacttggcttcgatttttatattttcctattatatgaaatgtatcttttggttgtttgatttttctttctttctttgtaaatagttctgagttctgtcaaatgccgtgaaagtatttgctataataaagaaaattcttgtgactttaaaaaaaaaaaaaaaaaaa

SEQ ID NO: 1725 - protein, 487 aa, Homo sapiens
MLRAPGCLLRTSVAPAAALAAALLSSLARCSLLEPRDPVASSLSPYFGTKTRYEDVNPVLLSGPEAPWRDPELLEGTCTPVQLVALIRHGTRYPTVKQIRKLRQLHGLLQPRGSRDGGASSTGSRDLGAALRDWPLWYADWMDGQLVEKGRQDMRHVALRLASLFPALFSRENYGRLRLITSSKHRCMDSSAAFLQGLWQHYHPGLPPPDVADMEFGPPTVNDKLMRFFDHCEKFLTEVEKNATALYHVEAFKTGPEMQNILKKVAATLQVPVNDLNADLIQVAFFTCSFDLAIKGVKSPWCDVFDIDDAKVLEYLNDLKQYWKRGYGYTINSRSSCTLFQDIFQHLDKAVEQKQRSQPISSPVILQFGHAETLLPLLSLMGYFKDKEPLTAYNYKKQMHRKFRSGLIVPYASNLIFVLYHCENAKTPKEQFRVQMLLNEKVLPLAYSQETVSFYEDLKNHYKDILQSCQTSEECELARANSTSDEL

SEQ ID NO: 1726 - DNA, 1986 bp, Homo sapiens
atggatctggtgctaaaaagatgccttcttcatttggctgtgataggtgctttgctggctgtgggggctacaaaagtacccagaaaccaggactggcttggtgtctcaaggcaactcagaaccaaagcctggaacaggcagctgtatccagagtggacagaagcccagagacttgactgctggagaggtggtcaagtgtccctcaaggtcagtaatgatgggcctacactgattggtgcaaatgcctccttctctattgccttgaacttccctggaagccaaaaggtattgccagatgggcaggttatctgggtcaacaataccatcatcaatgggagccaggtgtggggaggacagccagtgtatccccaggaaactgacgatgcctgcatcttccctgatggtggaccttgcccatctggctcttggtctcagaagagaagctttgtttatgtctggaagacctggggccaatactggcaagttctagggggcccagtgtctgggctgagcattgggacaggcagggcaatgctgggcacacacaccatggaagtgactgtctaccatcgccggggatcccggagctatgtgcctcttgctcattccagctcagccttcaccattactgaccaggtgcctttctccgtgagcgtgtcccagttgcgggccttggatggagggaacaagcacttcctgagaaatcagcctctgacctttgccctccagctccatgaccccagtggctatctggctgaagctgacctctcctacacctgggactttggagacagtagtggaaccctgatctctcgggcacttgtggtcactcatacttacctggagcctggcccagtcactgcccaggtggtcctgcaggctgccattcctctcacctcctgtggctcctccccagttccaggcaccacagatgggcacaggccaactgcagaggcccctaacaccacagctggccaagtgcctactacagaagttgtgggtactacacctggtcaggcgccaactgcagagccctctggaaccacatctgtgcaggtgccaaccactgaagtcataagcactgcacctgtgcagatgccaactgcagagagcacaggtatgacacctgagaaggtgccagtttcagaggtcatgggtaccacactggcagagatgtcaactccagaggctacaggtatgacacctgcagaggtatcaattgtggtgctttctggaaccacagctgcacaggtaacaactacagagtgggtggagaccacagctagagagctacctatccctgagcctgaaggtccagatgccagctcaatcatgtctacggaaagtattacaggttccctgggccccctgctggatggtacagccaccttaaggctggtgaagagacaagtccccctggattgtgttctgtatcgatatggttccttttccgtcaccctggacattgtccagggtattgaaagtgccgagatcctgcaggctgtgccgtccggtgagggggatgcatttgagctgactgtgtcctgccaaggcgggctgcccaaggaagcctgcatggagatctcatcgccagggtgccagccccctgcccagcggctgtgccagcctgtgctacccagcccagcctgccagctggttctgcaccagatactgaagggtggctcggggacatactgcctcaatgtgtctctggctgataccaacagcctggcagtggtcagcacccagcttatcatgcctggtcaagaagcaggccttgggcaggttccgctgatcgtgggcatcttgctggtgttgatggctgtggtccttgcatctctgatatataggcgcagacttatgaagcaagacttctccgtaccccagttgccacatagcagcagtcactggctgcgtctaccccgcatcttctgctcttgtcccattggtgagaatagccccctcctcagtgggcagcaggtctga

SEQ ID NO: 1727 - protein, 661 aa, Homo sapiens
MDLVLKRCLLHLAVIGALLAVGATKVPRNQDWLGVSRQLRTKAWNRQLYPEWTEAQRLDCWRGGQVSLKVSNDGPTLIGANASFSIALNFPGSQKVLPDGQVIWVNNTIINGSQVWGGQPVYPQETDDACIFPDGGPCPSGSWSQKRSFVYVWKTWGQYWQVLGGPVSGLSIGTGRAMLGTHTMEVTVYHRRGSRSYVPLAHSSSAFTITDQVPFSVSVSQLRALDGGNKHFLRNQPLTFALQLHDPSGYLAEADLSYTWDFGDSSGTLISRALVVTHTYLEPGPVTAQVVLQAAIPLTSCGSSPVPGTTDGHRPTAEAPNTTAGQVPTTEVVGTTPGQAPTAEPSGTTSVQVPTTEVISTAPVQMPTAESTGMTPEKVPVSEVMGTTLAEMSTPEATGMTPAEVSIVVLSGTTAAQVTTTEWVETTARELPIPEPEGPDASSIMSTESITGSLGPLLDGTATLRLVKRQVPLDCVLYRYGSFSVTLDIVQGIESAEILQAVPSGEGDAFELTVSCQGGLPKEACMEISSPGCQPPAQRLCQPVLPSPACQLVLHQILKGGSGTYCLNVSLADTNSLAVVSTQLIMPGQEAGLGQVPLIVGILLVLMAVVLASLIYRRRLMKQDFSVPQLPHSSSHWLRLPRIFCSCPIGENSPLLSGQQV

SEQ ID NO: 1728 - DNA, 3276 bp, Homo sapiens
ggcacgaggaacatacacagggggttggtgaatggtgccgaccgcggccatcgcagttggaggctattttttggggggggtgagtagcgtccatggagttactttgcgcccactcctagcggcaccggcttaggtcctgcgggccgaccgtccccggcggggggcgtggggcctgggacgccgcgggcccggccgcctccctcgccgcgaccccggatggatgcgcgccccccgccctcccgcgccggccccaggagctcccggcttcgggagcatccttcccgcgccggtccctgcagcggcgcgtagtcgagggcagcgcccgtcaggggggcaccgcggagcaagatggaagagaagaggcgaaaatactccatcagcagtgacaactctgacaccactgacagtcatgcgacatctacatccgcatcaagatgctccaaactgcccagcagcaccaagtcgggctggccccgacagaacgaaaagaagccctccgaggttttccggacagacttgatcacagccatgaagatcccggactcataccagctcagcccggatgactactacatcctggcagacccatggcgacaggaatgggagaaaggtgtgcaggtgcctgccggggcagaggccatcccagagcccgtggtgaggatcctcccaccactggaaggcccccctgcccaggcatccccgagcagcaccatgcttggtgagggctcccagcctgattggccagggggcagccgctatgacttggacgagattgatgcctactggctggagctcatcaactcggagcttaaggagatggagaggccggagctggacgagctgacattagagcgtgtgctggaggagctggagaccctgtgccaccagaatatggccagggccattgagacgcaggaggggctgggcatcgagtacgacgaggatgttgtctgcgacgtgtgtcgctctcctgagggcgaggatggcaacgagatggtcttctgtgacaagtgcaacgtctgtgtgcatcaggcatgctacgggatcctcaaggtgcccacgggcagctggctgtgccggacgtgtgccctgggtgtccagccaaagtgcctgctctgccccaagcgaggaggagccttgaagcccactagaagtgggaccaagtgggtgcatgtcagctgtgccctatggattcctgaggtcagcatcggctgcccagagaagatggagcccatcaccaagatctcgcatatcccagccagccgctgggctctgtcctgcagcctctgcaaggaatgcacaggcacctgcatccagtgttccatgccttcctgcgtcacagcgttccatgtcacatgcgcctttgaccacggcctggaaatgcggactatattagcagacaacgatgaggtcaagttcaagtcattctgccaggagcacagtgacgggggcccacgtaatgagcccacatctgagcccacggaacccagccaggctggcgaggacctggaaaaggtgaccctgcgcaagcagcggctgcagcagctagaggaggacttctacgagctggtggagccggctgaggtggctgagcggctggacctggctgaggcactggtcgacttcatctaccagtactggaagctgaagaggaaagccaatgccaaccagccgctgctgacccccaagaccgacgaggtggacaacctggcccagcaggagcaggacgtcctctaccgccgcctgaagctcttcacccatctgcggcaggacctagagagggttagaaatctgtgctacatggtgacaaggcgcgagagaacgaaacacgccatctgcaaactccaggagcagatattccacctgcagatgaaacttattgaacaggatctgtgtcgagcaggcctgtccacctcattccccatcgatggcaccttcttcaacagctggctggcacagtcggtgcagatcacagcagagaacatggccatgagcgagtggccactgaacaatgggcaccgcgaggaccctgctccagggctgctgtcagaggaactgctgcaggacgaggagacactgctcagcttcatgcgggacccctcgctgcgacctggtgaccctgctaggaaggcccgaggccgcacccgcctgcctgccaagaagaaaccaccaccaccaccaccgcaggacgggcctggttcacggacgactccagacaaagcccccaagaagacctggggccaggatgcaggcagtggcaaggggggtcaagggccacctaccaggaagccaccacgtcggacatcttctcacttgccgtccagccctgcagccggggactgtcccatcctagccacccctgaaagccccccgccactggcccctgagaccccggacgaggcagcctcagtagctgctgactcagatgtccaagtgcctggccctgcagcaagccctaagcctttgggccggctccggccaccccgcgagagcaaggtaacccggagattgccgggtgccaggcctgatgctgggatgggaccaccttcagctgtggctgagaggcccaaggtcagcctgcattttgacactgagactgatggctacttctctgatggggagatgagcgactcagatgtagaggccgaggacggtggggtgcagcggggtccccgggaggcaggggcagaggaggtggtccgcatgggcgtactggcctcctaactcacccccttccctgtcccaggccctgccctggtccccccacaaggcctcagcccagtcacaactgccatttccagtctctgctgagtgtcccagaccctcgaggctgccactccgtcgtggttttatttttaatatagagagagttttgaattctacactgttgtctttcctctgtgctggcctaggacattaggattccttccacggctccggccgctaggaccctgccaggtcccgcgcaccatccctgccctgcccacgtggtattgctgggctcctggctagatgcaagcaaggtggacaagagctcaggactccagcccactgccactgggtgacacagactgtcgtttgggcattatttcatggcagatgggccagtccagggcctaccccgccttgcccccagatcccactggggtccatttggggggtcctgctacactccaccgatccccaaggaagtataataaacgatacccagccagagtctaaaaaaaaaaaaaaaaaaaaaaaaaaaaaaaaaaaaaaaaaaaaaaaaaaaaaaaa

SEQ ID NO: 1729 - protein, 246 aa, Homo sapiens
MAMSEWPLNNGHREDPAPGLLSEELLQDEETLLSFMRDPSLRPGDPARKARGRTRLPAKKKPPPPPPQDGPGSRTTPDKAPKKTWGQDAGSGKGGQGPPTRKPPRRTSSHLPSSPAAGDCPILATPESPPPLAPETPDEAASVAADSDVQVPGPAASPKPLGRLRPPRESKVTRRLPGARPDAGMGPPSAVAERPKISLHFDTETDGYFSDGEMSDSDVEAEDGGVQRGPREAGAEEVVRMGVLAS

SEQ ID NO: 1730 - DNA, 3914 bp, Homo sapiens
agcgggtgtgggaagcgcccgcgctttcggcgggttccgttaaaatggcgccctggtggccggcggcgcccgcgccttagcctgtcaggagcagggagcttgcggggcgcaggaagggcgcgggccgcggtccctgcgcgtgcggcggcagtggcggctctgcccggaccaccgtgcacggctccgggcgaggatggcgaccccggaccagaagtcgccgaacgttctgctgcagaacctgtgctgcaggatcctgggcaggagcgaagctgatgtagcccagcagttccagtatgctgtgcgggtgattggcagcaacttcgccccaactgttgaaagagatgaatttttagtagctgaaaaaatcaagaaagagcttattcgacaacgaagagaagcagatgctgcattattttcagaactccacagaaaacttcattcacagggagttttgaaaaataaatggtcaatactctacctcttgctgagcctcagtgaggacccacgcaggcagccaagcaaggtttctagctatgctacgttatttgctcaggccttaccaagagatgcccactcaaccccttactactatgccaggcctcagacccttcccctgagctaccaagatcggagtgcccagtcagcccagagctccggcagcgtgggcagcagtggcatcagcagcattggcctgtgtgccctcagtggccccgcgcctgcgccacaatctctcctcccaggacagtctaatcaagctccaggagtaggagattgccttcgacagcagttggggtcacgactcgcatggactttaactgcaaatcagccttcttcacaagccactacctcaaaaggtgtccccagtgctgtgtctcgcaacatgacaaggtccaggagagaaggggatacgggtggtactatggaaattacagaagcagctctggtaagggacattttgtacgtctttcagggcatagatggcaaaaacatcaaaatgaacaacactgaaaattgttacaaagtagaaggaaaggcaaatctaagtaggtctttgagagacacagcagtcaggctttctgagttgggatggttgcataataaaatcagaagatacacggaccagaggagcctggaccgctcattcggactcgtcgggcagagcttttgtgctgccttgcaccaggaactcagagaatactatcgattgctctctgttttacattctcagctacaactagaggatgaccagggtgtgaatttgggacttgagagtagtttaacacttcggcgcctcctggtttggacctatgatcccaaaatacgactgaagacccttgcggccctagtggaccactgccaaggaaggaaaggaggtgagctggcctcagctgtccacgcctacacaaaaacaggagacccgtacatgcggtctctggtgcagcacatcctcagcctcgtgtctcatcctgttttgagcttcctgtaccgctggatatatgatggggagcttgaggacacttaccacgaattttttgtagcatcagatccaacagttaaaacagatcgactgtggcacgacaagtatactttgaggaaatcgatgattccttcgtttatgacgatggatcagtctaggaaggtccttttgataggaaaatcaataaatttcttgcaccaagtttgtcatgatcagactcccactacaaagatgatagctgtgaccaagtctgcagagtcaccccaggacgctgcagacctattcacagacttggaaaatgcatttcaggggaagattgatgctgcttattttgagaccagcaaatacctgttggatgttctcaataaaaagtacagcttgctggaccacatgcaggcaatgaggcggtacctgcttcttggtcaaggagactttataaggcacttaatggacttgctaaaaccagaacttgtccgtccagctacgactttgtatcagcataacttgactggaattctagaaaccgctgtcagagccaccaacgcacagtttgacagtcctgagatcctgcgaaggctggacgtgcggctgctggaggtctctccaggtgacactggatgggatgtcttcagcctcgattatcatgttgacggaccaattgcaactgtgtttactcgagaatgtatgagccactacctaagagtatttaacttcctctggagggcgaagcggatggaatacatcctcactgacatacggaagggacacatgtgcaatgcaaagctcctgagaaacatgccagagttctccggggtgctgcaccagtgtcacattttggcctctgagatggtccatttcattcatcagatgcagtattacatcacatttgaggtgcttgaatgttcttgggatgagctttggaacaaagtccagcaggcccaggatttggatcacatcattgctgcacacgaggtgttcttagacaccatcatctcccgctgcctgctggacagtgactccagggcacttttaaatcaacttagagctgtgtttgatcaaattattgaacttcagaatgctcaagatgcaatatacagagctgctctggaagaattgcagagacgattacagtttgaagagaaaaagaaacagcgtgaaattgagggccagtggggagtgacggcagcagaggaagaggaggaaaataagaggattggagaatttaaagaatctataccaaaaatgtgctcacagttgcgaatattgacccatttctaccagggtatcgtgcagcagtttttggtgttactgacgaccagctctgacgagagtcttcggtttcttagcttcaggctggacttcaacgagcattacaaagccagggagcccaggctccgtgtgtctctgggtaccagggggcggcgcagctcccacacgtgaagctcgcggtcctcccagggagctgcgggtgatgttcgttgcactgctagacacgaaattcccattgacgtcctgcaggaactgcatgctgcaggtgtcctgcccttccgcccacgagtgcgccatgtttcagcggagcggcgtgtgggagaagccacgtcgtgtttcacatgtcggagtcgaatgcatttgtaaatccctaagtcaagtaggctggctgcactgttcgcatttgtctctaaaagtcttcatcgctaaaagataccataatttgctgaggcttcttaagctttctatgttataatttatatttgtcactttaaaaaatccatttcttttagaaaaaattagggtgataggatattcattagttaagatggtaacgtcattgctatttttttaacatcctctttagaggtaatttttgttaacataaccaaaaattaaattgaaacaaaatgtcccaactaagaaaatatatagagcattttatttttttttagtgttgtaaaatattaacctctgtgagatcctttgtatcttaatgcattacctttacacatatttattcttattttctctcctttcagagtttacatttttatatttaatttactatttcagatttttaaaatagtatagaaaaaagtaggagtgatagagaacaaaaatactcttatacagtgcaacccaaataccgcgaatgcatcagctaaagcagcgtgtaaataggagtgatgagaaagttaatggagtattttattttcaaagttcctgataagcattggaaagaaatcgacatggataatgaagatttcctttttccttgcctattttttcattgtaaatatttatatactactgaccaagatgttggggtgggggggattgttttttgtaaaaatgtcattatcaggtcacataaatctgcctttatgttgcataagtgaaaatttagaaaattaaaagcaattatcttccaaaaaaaaaaaaaaaa

SEQ ID NO: 1731 - protein, 907 aa, Homo sapiens
MATPDQKSPNVLLQNLCCRILGRSEADVAQQFQYAVRVIGSNFAPTVERDEFLVAEKIKKELIRQRREADAALFSELHRKLHSQGVLKNKWSILYLLLSLSEDPRRQPSKVSSYATLFAQALPRDAHSTPYYYARPQTLPLSYQDRSAQSAQSSGSVGSSGISSIGLCALSGPAPAPQSLLPGQSNQAPGVGDCLRQQLGSRLAWTLTANQPSSQATTSKGVPSAVSRNMTRSRREGDTGGTMEITEAALVRDILYVFQGIDGKNIKMNNTENCYKVEGKANLSRSLRDTAVRLSELGWLHNKIRRYTDQRSLDRSFGLVGQSFCAALHQELREYYRLLSVLHSQLQLEDDQGVNLGLESSLTLRRLLVWTYDPKIRLKTLAALVDHCQGRKGGELASAVHAYTKTGDPYMRSLVQHILSLVSHPVLSFLYRWIYDGELEDTYHEFFVASDPTVKTDRLWHDKYTLRKSMIPSFMTMDQSRKVLLIGKSINFLHQVCHDQTPTTKMIAVTKSAESPQDAADLFTDLENAFQGKIDAAYFETSKYLLDVLNKKYSLLDHMQAMRRYLLLGQGDFIRHLMDLLKPELVRPATTLYQHNLTGILETAVRATNAQFDSPEILRRLDVRLLEVSPGDTGWDVFSLDYHVDGPIATVFTRECMSHYLRVFNFLWRAKRMEYILTDIRKGHMCNAKLLRNMPEFSGVLHQCHILASEMVHFIHQMQYYITFEVLECSWDELWNKVQQAQDLDHIIAAHEVFLDTIISRCLLDSDSRALLNQLRAVFDQIIELQNAQDAIYRAALEELQRRLQFEEKKKQREIEGQWGVTAAEEEEENKRIGEFKESIPKMCSQLRILTHFYQGIVQQFLVLLTTSSDESLRFLSFRLDFNEHYKAREPRLRVSLGTRGRRSSHT

SEQ ID NO: 1732 - DNA, 1458 bp, Homo sapiens
tggaacaatgtttacttcaattctgacattccattttatacatatatacctactgtatatctctctcaaatgtcagctagaagcaactttttcagttttctatctaatgaaagcggatatattctgaatgtttttgttacctgaaatttatttttgagtaggttgaaaggaccaagatacttgagtgattaaaggactgtaagtgttctgcttatatgcaggagttacatgattttaaaagtcataataggggaagtagttttatcatctgattactcctattaacctaaaaagtatttctaacataacagattgagcagtggttttgttacacttaggcaagaatttattttcccattaaaatttgaaaaatacacttttctttgcttctacccttgcagtttcccttagttcccctgatttccaagtgatctgaactaaaattaatattacatttactaagaaactatttttgttaattatactgagcaaagtttgctccaaatgaaaagtcattacgaactatgtatagtacccaagaaaaggtcaaattgagtcagaagactgtaagtaccacttttggcgctccagagataaaccttgtacacactgcagtagaacagtgagtagaaaatatgagctataaatagatattatttttagttttgatagctctgtgttgaaatacttttttaatgcagataaaaattatcaggaaattaaccttatggcacagaccaaatacttagtgcatggctgagtttctacaattcaaggagccaagaaaataggttcaagatggaatatagtacatgcatataaggcagatgcacacatgctggttactttaagattgtgtgtgttgattagtcacaatgatagactataacatgagacaatacaaagttacatttttggaccatattaaaactgcaagaagacaggggtcttactgaagatcttttagaaaacttaaatcctgtcacaggatatttagacatgtgtagaatgtagctcaatttttaaaaagtaactgacctagagggtgaaagttgaaactgacacattttcaaattaagattatgcttattttgtacagaaaacaatgtttaaacacaagcagatctgttgtatgtaataagtaacacagagttttaaaacaaattaattatttagctttattgaagtttgtttttttccttccgaacctggagtatcatattataaacagcagtttcacaccagaatagcagtgccctttctttttgtacatactgattggacctttctttactgttacgtggacactttctatgttagttttgatgcataattctttgaatccttttatacaaactagaatgtatgtgtaagaatacctgtccctgcaatgtagtaactacaaacttatttttaaataaatagaaaacttgtttttctaaaaaaaaaaaaaaaaaa

SEQ ID NO: 1733 - DNA, 2714 bp, Homo sapiens
ctttctgggtaaagatggacgtccacgatctctttcgccggctcggcgcgggggccaaattcgacacgagacgcttctcggcagacgcagctcgattccagataggaaaaaggaaatatgactttgattcttcggaggtgcttcagggactggacttttttggaaacaagaagtctgtcccaggtgtgtgtggagcatcacaaacacatcagaagccccaaaatggagagaaaaaagaagagagcctaactgaaaggaagagggagcagagcaagaaaaaaaggaagacgatgacttcagaaattgcttcccaagaagaaggtgctactatacagtggatgtcatctgtagaagcaaagattgaagacaaaaaagttcagagagaaagtaaactaacttccggaaagttggagaatctcagaaaagaaaagataaacttcttgcggaataaacacaaaattcacgtccaaggaaccgatcttcctgacccaattgctacatttcagcaacttgaccaggaatataaaatcaattctcgactacttcagaacattctagatgcaggtttccaaatgcctacgccaatccaaatgcaagccatcccagttatgctgcatggtcgggaacttctggcttctgctccaactggatctggaaaaacattagcttttagcattcctattttaatgcagctgaaacaacccgcaaataaaggcttcagagccctgattatatcaccaacacgagaacttgccagccagattcacagagagttaataaaaatttctgagggaacaggattcaggatacacatgatccacaaagcagcagtggcagccaagaaatttggacctaaatcatctaaaaagtttgatattcttgtgactactccaaatcgactaatctatttattaaagcaagatccccccggaatcgacctagcaagtgttgagtggcttgtagtagacgaatcagataaactgttgaagatgcaaactggttcagagaccagctggcttccattttcctggcctgcacatcccacaaggtccgaagagcctatgttcagtgcaacttttgcatatgatgttgaacagtggtgcaactcaacctggacaatgtcatcagtgtgtccattggaagcaaggaattctgcagtagaaactgtagaacaagagcttctctttgttggatctgagaccggaaaacttctggccgtgagagaacttgttaaaaagggtttcaatccacctgttcttgtttttgttcagtccattgaaagggctaaagaactttttcatgagctcatatatgaaggtattaatgtggatgttattcatgcagagagaacacaacaacagagagataacacagtccacagtttcagagcaggaaaaatctgggttctgatttgtacagccttgctagcaagagggattgattttaaaggtgtgaacttggtgatcaactatgactttccaactagctcagtggaatatatccacaggataggtcgaactggaagagcagggaataagggaaaagcaattacatttttcactgaggatgataagccattattaagaagcgttgctaatgttatacagcaggctgggtgtcctgtaccagaatacataaaaggttttcagaaactactaagcaaacaaaagaaaaagatgattaagaaaccattggaaagggagagcattagtacaactccaaaatgtttcttagaaaaagctaaggataaacagaaaaaggtcactggtcagaacagcaagaagaaagtagctcttgaagacaaaagttaaaaacagactttaaaaatactgtcccagaaatgtaattttatgatccccagcatgaatgttattttcatggaatacttgaagtcttacagtcacctgtaccaaacatttgaaatcaactacaagtacatgggactggtgataaatgatcctaaactatcaagtcagtttcaatttgtaggtgccttttttttttcctgtagagatgagggtcttgccatgttgtccaggctggtcttgaactcctgacctcacacaatcctcctgccttagcctcctgagtaactgagattacaggcacaagctgctgcacccagctctgtaggtgacttttaaatgattatacaatggaaataacattcattgacatttctgtggtttgaatccagagagatacttcttatagaaaaacaaatgtttatgctaaaaataacaccaaaatgtggtgaactcttaaggacttttcccttcaagtgtgaaggaaggtgtgatgaatgctgtggagaggcatctggaacagaaattcaaaataaagccttgacattaaataccccttccactgctcactttgtggatggtagcatgagctgtctaccaagaagaaacctgctgctctcttaattttaatatttcctaatttgttgatggccttttgtgttgtgaaccacaacaaagagaggcctcttttgtggctggttattccagttccctgggattttaaattctttggtctattaagtatccttgtattggatacgtaataccttagtgctgtcataatgttgtacaagatcatgatcagcttctccctttcttcattttctgtgatttaaccatgttctttcctgtctctttccatttaagatattttatttgaatactgataaacattttatcctgataagg

SEQ ID NO: 1734 - protein, 598 aa, Homo sapiens
MDVHDLFRRLGAGAKFDTRRFSADAARFQIGKRKYDFDSSEVLQGLDFFGNKKSVPGVCGASQTHQKPQNGEKKEESLTERKREQSKKKRKTMTSEIASQEEGATIQWMSSVEAKIEDKKVQRESKLTSGKLENLRKEKINFLRNKHKIHVQGTDLPDPIATFQQLDQEYKINSRLLQNILDAGFQMPTPIQMQAIPVMLHGRELLASAPTGSGKTLAFSIPILMQLKQPANKGFRALIISPTRELASQIHRELIKISEGTGFRIHMIHKAAVAAKKFGPKSSKKFDILVTTPNRLIYLLKQDPPGIDLASVEWLVVDESDKLLKMQTGSETSWLPFSWPAHPTRSEEPMFSATFAYDVEQWCNSTWTMSSVCPLEARNSAVETVEQELLFVGSETGKLLAVRELVKKGFNPPVLVFVQSIERAKELFHELIYEGINVDVIHAERTQQQRDNTVHSFRAGKIWVLICTALLARGIDFKGVNLVINYDFPTSSVEYIHRIGRTGRAGNKGKAITFFTEDDKPLLRSVANVIQQAGCPVPEYIKGFQKLLSKQKKKMIKKPLERESISTTPKCFLEKAKDKQKKVTGQNSKKKVALEDKS

SEQ ID NO: 1735 - DNA, 3123 bp, Homo sapiens
gaactgtggcgctttctgggtaaagatggacgtccacgatctctttcgccggctcggcgcgggggccaaattcgacacgagacgcttctcggcagacgcagctcgattccagataggaaaaaggaaatatgactttgattcttcggaggtgcttcagggactggacttttttggaaacaagaagtctgtcccaggtgtgtgtggagcatcacaaacacatcagaagccccaaaatggagagaaaaaagaagagagcctaactgaaaggaagagggagcagagcaagaaaaaaaggaagacgatgacttcagagacagggtttcaccatgttggccagtatggtctcgatctcctgacctcgtgattcacccaccttgggctcccaaagtgctgggattacagatgtgagccaccacgcccagccagaaattgcttcccaagaagaaggtgctactatacagtggatgtcatctgtagaagcaaagattgaagacaaaaaagttcagagagaaagtaaactaacttccggaaagttggagaatctcagaaaagaaaagataaacttcttgcggaataaacacaaaattcacgtccaaggaaccgatcttcctgacccaattgctacatttcagcaacttgaccaggaatataaaatcaattctcgactacttcagaacattctagatgcaggcttccaaatgcctacgccaatccaaatgcaagccatcccagttatgctgcatggtcgggaacttctggcttctgctccaactggatctggaaaaacattagcttttagcattcctattttaatgcagctgaaacaacccgcaaataaaggcttcagagccctgattatatcaccaacacgagaacttgccagccagattcacagagagttaataaaaatttctgagggaacaggattcagaatacacatgatccacaaagcagcagtggcagccaagaaatttggacctaaatcatctaaaaagtttgatattcttgtgactactccaaatcgactaatctatttattaaagcaagatccccccggaatcgacctagcaagtgttgagtggcttgtagtagacgaatcagataaactgtttgaagatggcaaaactgggttcagagaccagctggcttccattttcctggcctgcacatcccacaaggtccgaagagctatgttcagtgcaacttttgcatatgatgttgaacagtggtgcaaactcaacctggacaatgtcatcagtgtgtccattggagcaaggaattctgcagtagaaactgtagaacaagagcttctctttgttggatctgagaccggaaaacttctggccgtgagagaacttgttaaaaagggtttcaatccacctgttcttgtttttgttcagtccattgaaagggctaaagaactttttcatgagctcatatatgaaggtattaatgtggatgttattcatgcagagagaacacaacaacagagagataacacagtccacagtttcagagcaggaaaaatctgggttctgatttgtacagccttgctagcaagagggattgattttaaaggtgtgaacttggtgatcaactatgactttccaactagctcagtggaatatatccacaggataggtcgaactggaagagcagggaataagggaaaagcaattacatttttcactgaggatgataagccattattaagaagcgttgctaatgttatacagcaggctgggtgtcctgtaccagaatacataaaaggttttcagaaactactaagcaaacaaaagaaaaagatgattaagaaaccattggaaagggagagcattagtacaactccaaaatgtttcttagaaaaagctaaggataaacagagaaaggtcactggtcagaacagcaagaagaaagtagctcttgaagacaaaagttaaaaacagactttaaaaatactgtcccagaaatgtaattttatgatcccagcatgaatgttattttcatggaatacttgaagtcttacagtcacctgtaccaaacatttgaaatcaactacaagtacatgggactggtgataaatgatcctaaactatcaagtcagtttcaatttgtaggtgccttttttttttcctgtagagatgagggtcttgccatgttgtccaggctggtcttgaactcctgacctcacacaatcctcctgccttagcctcctgagtaactgagattacaggcacaagctgctgcacccagctctgtaggtgacttttaaatgattatacaatggaaataacattcattgacatttctgtggtttgaatccagggagatacttcttatagaaaaacaaatgtttatgctaaaaataacaccaaaatgtggtgaactcttaaggacttttcccttcaagtgtgaaggaaggtgtgatgaatgctgtggagaggcatctggaacagaaattcaaaataaagccttgacattaaataccccttccactgctcactttgtggatggtagcatgagctgtctaccaagaagaaacctgctgctctcttaattttaatatttcctaatttgttgatggccttttgtgttgtgaaccacaacaaagagaggcctcttttgtggctggttattccagttccctgggattttaaattctttggtctattaagtatccttgtattggatacgtaataccttagtgctgtcataatgttgcacaagatcatgatcagcttctccctttcttcattttctgtgatttaaccatgttctttcctgtctctttccatttaagatattttatttgaatactgataaacattttatcctgataaggaagaatgttcttgttacttgatatacctctgtcttcattctcttacagcttatctttccttaggttgatggtgcctcatttaataagtagatctctacttaagctaaaggattatgatcatatggtgttggagactattagctattagatttttctcaaaatatgagttttgtacaatggaatgaaaaagtgacttcatatacgtaagactggtgcctaagaatgacttgaatgttatcagtactaccacagaactataatatacattgccttttctcagc

SEQ ID NO: 1736 - protein, 491 aa, Homo sapiens
MSSVEAKIEDKKVQRESKLTSGKLENLRKEKINFLRNKHKIHVQGTDLPDPIATFQQLDQEYKINSRLLQNILDAGFQMPTPIQMQAIPVMLHGRELLASAPTGSGKTLAFSIPILMQLKQPANKGFRALIISPTRELASQIHRELIKISEGTGFRIHMIHKAAVAAKKFGPKSSKKFDILVTTPNRLIYLLKQDPPGIDLASVEWLVVDESDKLFEDGKTGFRDQLASIFLACTSHKVRRAMFSATFAYDVEQWCKLNLDNVISVSIGARNSAVETVEQELLFVGSETGKLLAVRELVKKGFNPPVLVFVQSIERAKELFHELIYEGINVDVIHAERTQQQRDNTVHSFRAGKIWVLICTALLARGIDFKGVNLVINYDFPTSSVEYIHRIGRTGRAGNKGKAITFFTEDDKPLLRSVANVIQQAGCPVPEYIKGFQKLLSKQKKKMIKKPLERESISTTPKCFLEKAKDKQRKVTGQNSKKKVALEDKS

SEQ ID NO: 1737 - DNA, 2528 bp, Homo sapiens
gccacgtgtccggctcggagcccacggctgtcctcccggtccgcgccgctgcggttgctgctgggctaacgggctccgatccagcgagcgctgcgtcctcgagtccgcccgtgcgggcgcagggacccgaggcctccgctgcggctggattctgctgcgaaccggagaccatggccaaaccagcacagggtgccaagtaccggggctccatccatgacttcccaggctttgaccccaaccaggatgccgaggctctgtacactgccatgaagggctttggcagtgacaaggaggccatactggacataatcacctcacggagcaacaggcagaggcaggaggtctgccagagctacaagtccctctacggcaaggacctcattgctgatttaaagtatgaattgacgggcaagtttgaacggttgattgtgggcctgatgaggccacctgcctattgtgatgccaaagaaattaaagatgccatctcgggcattggcactgatgagaagtgcctcattgagatcttggcttcccggaccaatgagcagatgcaccagctggtggcagcatacaaagatgcctacgagcgggacctggaggctgacatcatcggcgacacctctggccacttccagaagatgcttgtggtcctgctccagggaaccagggaggaggatgacgtagtgagcgaggacctggtacaacaggatgtccaggacctatacgaggcaggggaactgaaatggggaacagatgaagcccagttcatttacatcttgggaaatcgcagcaagcagcatcttcggttggtgttcgatgagtatctgaagaccacagggaagccgatgaaggccagcatccgaggggagctgtctggggactttgagaagctaatgctggccgtagtgaagtgtatccggagcaccccggaatattttgctgaaaggctcttcaaggctatgaagggcctggggactcgggacaacaccctgatccgcatcatggtctcccgtagtgagttggacatgctcgacattcgggagatcttccggaccaagtatgagaagtccctctacagcatgatcaagaatgacacctctggcgagtacaagaagactctgctgaagctgtctgggggagatgatgatgctgctggccagttcttcccggaggcagcgcaggtggcctatcagatgtgggaacttagtgcagtggcccgagtagagctgaagggaactgtgcgcccagccaatgacttcaaccctgacgcagatgccaaagcgctgcggaaagccatgaagggactcgggactgacgaagacacaatcatcgatatcatcacgcaccgcagcaatgtccagcggcagcagatccggcagaccttcaagtctcactttggccgggacttaatgactgacctgaagtctgagatctctggagacctggcaaggctgattctggggctcatgatgccaccggcccattacgatgccaagcagttgaagaaggccatggagggagccggcacagatgaaaaggctcttattgaaatcctggccactcggaccaatgctgaaatccgggccatcaatgaggcctataaggaggactatcacaagtccctggaggatgctctgagctcagacacatctggccacttcaggaggatcctcatttctctggccacggggcatcgtgaggagggaggagaaaacctggaccaggcacgggaagatgcccaggtggctgctgagatcttggaaatagcagacacacctagtggagacaaaacttccttggagacacgtttcatgacgatcctgtgtacccggacgtatccgcacctccggagagtcttccaggagttcatcaagatgaccaactatgacgtggagcacaccatcaagaaggagatgtctggggatgtcagggatgcatttgtggccattgttcaaagtgtcaagaacaagcctctcttctttgccgacaaactttacaaatccatgaagggtgctggcacagatgagaagactctgaccaggatcatggtatcccgcagtgagattgacctgctcaacatccggagggaattcattgagaaatatgacaagtctctccaccaagccattgagggtgacacctccggagacttcctgaaggccttgctggctctctgtggtggtgaggactagggccacagctttggcgggcacttctgccaagaaatggttatcagcaccagccgccatggccaagcctgattgttccagctccagagactaaggaaggggcaggggtggggggaggggttgggttgggctcttatcttcatggagcttaggaaacgctcccactcccacgggccatcgagggccagcacggctgagcggtgaaaaaccgtagccatagatcctgtccacctccactcccctctgaccctcaggctttcccagcttcctccccttgctacagcctctgccctggtttggctatgtcagatccaataaacatcctgaacctctgtctgt

SEQ ID NO: 1738 - protein, 673 aa, Homo sapiens
MAKPAQGAKYRGSIHDFPGFDPNQDAEALYTAMKGFGSDKEAILDIITSRSNRQRQEVCQSYKSLYGKDLIADLKYELTGKFERLIVGLMRPPAYCDAKEIKDAISGIGTDEKCLIEILASRTNEQMHQLVAAYKDAYERDLEADIIGDTSGHFQKMLVVLLQGTREEDDVVSEDLVQQDVQDLYEAGELKWGTDEAQFIYILGNRSKQHLRLVFDEYLKTTGKPMKASIRGELSGDFEKLMLAVVKCIRSTPEYFAERLFKAMKGLGTRDNTLIRIMVSRSELDMLDIREIFRTKYEKSLYSMIKNDTSGEYKKTLLKLSGGDDDAAGQFFPEAAQVAYQMWELSAVARVELKGTVRPANDFNPDADAKALRKAMKGLGTDEDTIIDIITHRSNVQRQQIRQTFKSHFGRDLMTDLKSEISGDLARLILGLMMPPAHYDAKQLKKAMEGAGTDEKALIEILATRTNAEIRAINEAYKEDYHKSLEDALSSDTSGHFRRILISLATGHREEGGENLDQAREDAQVAAEILEIADTPSGDKTSLETRFMTILCTRTYPHLRRVFQEFIKMTNYDVEHTIKKEMSGDVRDAFVAIVQSVKNKPLFFADKLYKSMKGAGTDEKTLTRIMVSRSEIDLLNIRREFIEKYDKSLHQAIEGDTSGDFLKALLALCGGED

SEQ ID NO: 1739 - DNA, 2510 bp, Homo sapiens
gccacgtgtccggctcggagcccacggctgtcctcccggtccgcgccgctgcggttgctgctgggctaacgggctccgatccagcgagcgctgcgtcctcgagtccgcccgtgcgggcgcagggacccgaggcctccgctgcggctggattctgctgcgaaccggagaccatggccaaaccagcacagggtgccaagtaccggggctccatccatgacttcccaggctttgaccccaaccaggatgccgaggctctgtacactgccatgaagggctttggcagtgacaaggaggccatactggacataatcacctcacggagcaacaggcagaggcaggaggtctgccagagctacaagtccctctacggcaaggacctcattgctgatttaaagtatgaattgacgggcaagtttgaacggttgattgtgggcctgatgaggccacctgcctattgtgatgccaaagaaattaaagatgccatctcgggcattggcactgatgagaagtgcctcattgagatcttggcttcccggaccaatgagcagatgcaccagctggtggcagcatacaaagatgcctacgagcgggacctggaggctgacatcatcggcgacacctctggccacttccagaagatgcttgtggtcctgctccagggaaccagggaggaggatgacgtagtgagcgaggacctggtacaacaggatgtccaggacctatacgaggcaggggaactgaaatggggaacagatgaagcccagttcatttacatcttgggaaatcgcagcaagcagcatcttcggttggtgttcgatgagtatctgaagaccacagggaagccgatgaaggccagcatccgaggggagctgtctggggactttgagaagctaatgctggccgtagtgaagtgtatccggagcaccccggaatattttgctgaaaggctcttcaaggctatgaagggcctggggactcgggacaacaccctgatccgcatcatggtctcccgtagtgagttggacatgctcgacattcgggagatcttccggaccaagtatgagaagtccctctacagcatgatcaagaatgacacctctggcgagtacaagaagactctgctgaagctgtctgggggagatgatgatgctgctggccagttcttcccggaggcagcgcaggtggcctatcagatgtgggaacttagtgcagtggcccgagtagagctgaagggaactgtgcgcccagccaatgacttcaaccctgacgcagatgccaaagcgctgcggaaagccatgaagggactcgggactgacgaagacacaatcatcgatatcatcacgcaccgcagcaatgtccagcggcagcagatccggcagaccttcaagtctcactttggccgggacttaatgactgacctgaagtctgagatctctggagacctggcaaggctgattctggggctcatgatgccaccggcccattacgatgccaagcagttgaagaaggccatggagggagccggcacagatgaaaaggctcttattgaaatcctggccactcggaccaatgctgaaatccgggccatcaatgaggcctataaggaggactatcacaagtccctggaggatgctctgagctcagacacatctggccacttcaggaggatcctcatttctctggccacggggcatcgtgaggagggaggagaaaacctggaccaggcacgggaagatgcccaggaaatagcagacacacctagtggagacaaaacttccttggagacacgtttcatgacgatcctgtgtacccggacgtatccgcacctccggagagtcttccaggagttcatcaagatgaccaactatgacgtggagcacaccatcaagaaggagatgtctggggatgtcagggatgcatttgtggccattgttcaaagtgtcaagaacaagcctctcttctttgccgacaaactttacaaatccatgaagggtgctggcacagatgagaagactctgaccaggatcatggtatcccgcagtgagattgacctgctcaacatccggagggaattcattgagaaatatgacaagtctctccaccaagccattgagggtgacacctccggagacttcctgaaggccttgctggctctctgtggtggtgaggactagggccacagctttggcgggcacttctgccaagaaatggttatcagcaccagccgccatggccaagcctgattgttccagctccagagactaaggaaggggcaggggtggggggaggggttgggttgggctcttatcttcatggagcttaggaaacgctcccactcccacgggccatcgagggccagcacggctgagcggtgaaaaaccgtagccatagatcctgtccacctccactcccctctgaccctcaggctttcccagcttcctccccttgctacagcctctgccctggtttggctatgtcagatccaataaacatcctgaacctctgtctgt

SEQ ID NO: 1740 - protein, 667 aa, Homo sapiens
MAKPAQGAKYRGSIHDFPGFDPNQDAEALYTAMKGFGSDKEAILDIITSRSNRQRQEVCQSYKSLYGKDLIADLKYELTGKFERLIVGLMRPPAYCDAKEIKDAISGIGTDEKCLIEILASRTNEQMHQLVAAYKDAYERDLEADIIGDTSGHFQKMLVVLLQGTREEDDVVSEDLVQQDVQDLYEAGELKWGTDEAQFIYILGNRSKQHLRLVFDEYLKTTGKPMKASIRGELSGDFEKLMLAVVKCIRSTPEYFAERLFKAMKGLGTRDNTLIRIMVSRSELDMLDIREIFRTKYEKSLYSMIKNDTSGEYKKTLLKLSGGDDDAAGQFFPEAAQVAYQMWELSAVARVELKGTVRPANDFNPDADAKALRKAMKGLGTDEDTIIDIITHRSNVQRQQIRQTFKSHFGRDLMTDLKSEISGDLARLILGLMMPPAHYDAKQLKKAMEGAGTDEKALIEILATRTNAEIRAINEAYKEDYHKSLEDALSSDTSGHFRRILISLATGHREEGGENLDQAREDAQEIADTPSGDKTSLETRFMTILCTRTYPHLRRVFQEFIKMTNYDVEHTIKKEMSGDVRDAFVAIVQSVKNKPLFFADKLYKSMKGAGTDEKTLTRIMVSRSEIDLLNIRREFIEKYDKSLHQAIEGDTSGDFLKALLALCGGED

SEQ ID NO: 1741 - DNA, 1177 bp, Homo sapiens
ggaaaggaaggtttaaaataattaatttaaaatgtcactaagtatagactgatgactgtatagagatgtgaaatgtataattacacatggaagcaatatgttgctgtgttgttattaggtttttttgtttttgttttctacatcttttaaagacttttggaaatttggctgaacaattagaacacaacaggccaactcatactcatttggatctatttagacaacgttaaccaatatatctatagctttagattatattcgataaaagtaattggactttttttctttttttgactcgttgacaagtgtctttgtaatatgtttttagttccctttttttgttgtattataggcagatgaacaaattaaatttggcctcaaagagagaacttactcccttctggatatttttgccacatttctttgcaaaaggagatatatatatctttagtcagttttgttgttatgagaaattatgggttattttgtggcatgctctttgggagctgcacagttatggggaggactcccactgctgtgcaagttaagtcttttacaaaacaaggacagcagaggagggtttgcagagacctccctctgaaaaacacaaagaatggactctctcctgggatgaggacttgctttctttacctccggttctttccatgtcttagttggatgtccctgaaatggacacaggctgtgcattgtgccagaaacattgtgttatcttttatgttgttgttgttgctgttaaactataatatgtgacttctttttttattattttttgtttgaatgctttaaaaatctttaagtctgtggactgctgatgtacagtgcctttgctgctatggatcaaatcaaagaccgtgtagatatactttattgtataagtagaaaattacttaatttcatactagaaatggatggatgctgcaagttgaaatggactgtccattgacgttcctaatgtggtagcagaaaaaaatggtgtcttaagtgcttagtgtttgatgtcattaacagtttcgtaaaactctacagtgtagaaagattttgatactaaactgtgcgttgtacatagttctaatgcattgtattgaccaccagtacttctataatggtagattgtttgtgaattcagacttttaagcattaaacataaataacttct

SEQ ID NO: 1742 - protein, 84 aa, Homo sapiens
MGRTPTAVQVKSFTKQGQQRRVCRDLPLKNTKNGLSPGMRTCFLYLRFFPCLSWMSLKWTQAVHCARNIVLSFMLLLLLLNYNM

SEQ ID NO: 1743 - DNA, 2504 bp, Homo sapiens
gcgatctagacctagttagccaagtctctaacgtgacatagggaaagcttgcaatggcaactggccgcccgtctgcgcctgtctctcgccacgcctattgctgcaggatgacgcgcacctctatgaacccgccgtgaggtgtgagtgtgacgcagggaagagtcgcacggacgcactcgcgctgcggccagctgcgggcccgggcggcggctgtgttgcgcagtcttcatgggttcccgacgaggaggtctctgtggctgcggcggctgctaactgcgccacctgctgcagcctgtccccgccgctctgaagcggccgcgtcgaagccgaaatgccgccaccccggaccggccgaggccttctctggctgggtctggttctgagctccgtctgcgtcgccctcggatccgaaacgcaggccaactcgaccacagatgctctgaacgttcttctcatcatcgtggatgacctgcgcccctccctgggctgttatggggataagctggtgaggtccccaaatattgaccaactggcatcccacagcctcctcttccagaatgcctttgcgcagcaagcagtgtgcgccccgagccgcgtttctttcctcactggcaggagacctgacaccacccgcctgtacgacttcaactcctactggagggtgcacgctggaaacttctccaccatcccccagtacttcaaggagaatggctatgtgaccatgtcggtgggaaaagtctttcaccctgggatatcttctaaccataccgatgattctccgtatagctggtcttttccaccttatcatccttcctctgagaagtatgaaaacactaagacatgtcgagggccagatggagaactccatgccaacctgctttgccctgtggatgtgctggatgttcccgagggcaccttgcctgacaaacagagcactgagcaagccatacagttgttggaaaagatgaaaacgtcagccagtcctttcttcctggccgttgggtatcataagccacacatccccttcagataccccaaggaatttcagaagttgtatcccttggagaacatcaccctggcccccgatcccgaggtccctgatggcctaccccctgtggcctacaacccctggatggacatcaggcaacgggaagacgtccaagccttaaacatcagtgtgccgtatggtccaattcctgtggactttcagcggaaaatccgccagagctactttgcctctgtgtcatatttggatacacaggtcggccgcctcttgagtgctttggacgatcttcagctggccaacagcaccatcattgcatttacctcggatcatgggtgggctctaggtgaacatggagaatgggccaaatacagcaattttgatgttgctacccatgttcccctgatattctatgttcctggaaggacggcttcacttccggaggcaggcgagaagcttttcccttacctcgacccttttgattccgcctcacagttgatggagccaggcaggcaatccatggaccttgtggaacttgtgtctctttttcccacgctggctggacttgcaggactgcaggttccacctcgctgccccgttccttcatttcacgttgagctgtgcagagaaggcaagaaccttctgaagcattttcgattccgtgacttggaagaggatccgtacctccctggtaatccccgtgaactgattgcctatagccagtatccccggccttcagacatccctcagtggaattctgacaagccgagtttaaaagatataaagatcatgggctattccatacgcaccatagactataggtatactgtgtgggttggcttcaatcctgatgaatttctagctaacttttctgacatccatgcaggggaactgtattttgtggattctgacccattgcaggatcacaatatgtataatgattcccaaggtggagatcttttccagttgttgatgccttgagttttgccaaccatggatggcaaatgtgatgtgctcccttccagctggtgagaggaggagttagagctggtcgttttgtgattacccataatattggaagcagcctgagggctagttaatccaaacatgcatcaacaatttggcctgagaatatgtaacagccaaaccttttcgtttagtctttattaaaatttataattggtaattggaccagttttttttttaatttccctctttttaaaacagttacggcttatttactgaataaatacaaagcaaacaaactcaagttatgtcatacctttggatacgaagaccatacataataaccaaacataacattatacacaaagaatactttcattatttgtggaatttagtgcatttcaaaaagtaatcatatatcaaactaggcaccacactaagttcctgattattttgtttataatttaataatatatcttatgagccctatatattcaaaatattatgttaacatgtaatccatgtttctttttcc

SEQ ID NO: 1744 - protein, 550 aa, Homo sapiens
MPPPRTGRGLLWLGLVLSSVCVALGSETQANSTTDALNVLLIIVDDLRPSLGCYGDKLVRSPNIDQLASHSLLFQNAFAQQAVCAPSRVSFLTGRRPDTTRLYDFNSYWRVHAGNFSTIPQYFKENGYVTMSVGKVFHPGISSNHTDDSPYSWSFPPYHPSSEKYENTKTCRGPDGELHANLLCPVDVLDVPEGTLPDKQSTEQAIQLLEKMKTSASPFFLAVGYHKPHIPFRYPKEFQKLYPLENITLAPDPEVPDGLPPVAYNPWMDIRQREDVQALNISVPYGPIPVDFQRKIRQSYFASVSYLDTQVGRLLSALDDLQLANSTIIAFTSDHGWALGEHGEWAKYSNFDVATHVPLIFYVPGRTASLPEAGEKLFPYLDPFDSASQLMEPGRQSMDLVELVSLFPTLAGLAGLQVPPRCPVPSFHVELCREGKNLLKHFRFRDLEEDPYLPGNPRELIAYSQYPRPSDIPQWNSDKPSLKDIKIMGYSIRTIDYRYTVWVGFNPDEFLANFSDIHAGELYFVDSDPLQDHNMYNDSQGGDLFQLLMP

SEQ ID NO: 1745 - DNA, 1314 bp, Homo sapiens
cggctgtgttgcgcagtcttcatgggttcccgacgaggaggtctctgtggctgcggcggcggctgctaactgcgccacctgctgcagcctgtccccgccgctctgaagcggccgcgtcgaagccgaaatgccgccaccccggaccggccgaggccttctctggctgggtctggttctgagctccgtctgcgtcgccctcggatccgaaacgcaggccaactcgaccacagatgctctgaacgttcttctcatcatcgtggatgacctgcgcccctccctgggctgttatggggataagctggtgaggtccccaaatattgaccaactggcatcccacagcctcctcttccagaatgcctttgcgcagcaagcagtgtgcgccccgagccgcgtttctttcctcactggcaggagacctgacaccacccgcctgtacgacttcaactcctactggagggtgcacgctggaaacttctccaccatcccccagtacttcaaggagaatggctatgtgaccatgtcggtgggaaaagtctttcaccctgggatatcttctaaccataccgatgattctccgtatagctggtcttttccaccttatcatccttcctctgagaagtatgaaaacactaagacatgtcgagggccagatggagaactccatgccaacctgctttgccctgtggatgtgctggatgttcccgagggcaccttgcctgacaaacagagcactgagcaagccatacagttgttggaaaagatgaaaacgtcagccagtcctttcttcctggccgttgggtatcataagccacacatccccttcagataccccaaggaatttcagaagttgtatcccttggagaacatcaccctggcccccgatcccgaggtccctgatggcctaccccctgtggcctacaacccctggatggacatcaggcaacgggaagacgtccaagccttaaacatcagtgtgccgtatggtccaattcctgtggactttcagcggaaaatccgccagagctactttgcctctgtgtcatatttggatacacaggtcggccgcctcttgagtgctttggacgatcttcagctggccaacagcaccatcattgcatttacctcggatcatggtttcctcatgaggacaaatacctgattttgaataaagcagcattcagttgaaataaccctttctgtggtaattccaagtgaatatttttcttctaggtgatgagtttctacttcctctggtttttacaacaggaaatgaaatggtatctaaaataaacaagctgtggtatgatgataatt

SEQ ID NO: 1746 - protein, 343 aa, Homo sapiens
MPPPRTGRGLLWLGLVLSSVCVALGSETQANSTTDALNVLLIIVDDLRPSLGCYGDKLVRSPNIDQLASHSLLFQNAFAQQAVCAPSRVSFLTGRRPDTTRLYDFNSYWRVHAGNFSTIPQYFKENGYVTMSVGKVFHPGISSNHTDDSPYSWSFPPYHPSSEKYENTKTCRGPDGELHANLLCPVDVLDVPEGTLPDKQSTEQAIQLLEKMKTSASPFFLAVGYHKPHIPFRYPKEFQKLYPLENITLAPDPEVPDGLPPVAYNPWMDIRQREDVQALNISVPYGPIPVDFQRKIRQSYFASVSYLDTQVGRLLSALDDLQLANSTIIAFTSDHGFLMRTNT

SEQ ID NO: 1747 - DNA, 2219 bp, Homo sapiens
aggacgtgggcgtgcaggacgcgggcgtgcaggacgccagagctgggtcagagctcgagccagcggcgcccggagagattcggagatgcaggcggctcggatggccgcgagcttggggcggcagctgctgaggctcgggggcggaagctcgcggctcacggcgctcctggggcagccccggcccggccctgcccggcggccctatgccgggggtgccgctcagctggctctggacaagtcagattcccacccctctgacgctctgaccaggaaaaaaccggccaaggcggaatctaagtcctttgctgtgggaatgttcaaaggccagctcaccacagatcaggtgttcccatacccgtccgtgctcaacgaagagcagacacagtttcttaaagagctggtggagcctgtgtcccgtttcttcgaggaagtgaacgatcccgccaagaatgacgctctggagatggtggaggagaccacttggcagggcctcaaggagctgggggcctttggtctgcaagtgcccagtgagctgggtggtgtgggcctttgcaacacccagtacgcccgtttggtggagatcgtgggcatgcatgaccttggcgtgggcattaccctgggggcccatcagagcatcggtttcaaaggcatcctgctctttggcacaaaggcccagaaagaaaaatacctccccaagctggcatctggggagactgtggccgctttctgtctaaccgagccctcaagcgggtcagatgcagcctccatccgaacctctgctgtgcccagcccctgtggaaaatactataccctcaatggaagcaagctttggatcagtaatgggggcctagcagacatcttcacggtctttgccaagacaccagttacagatccagccacaggagccgtgaaggagaagatcacagcttttgtggtggagaggggcttcgggggcattacccatgggccccctgagaagaagatgggcatcaaggcttcaaacacagcagaggtgttctttgatggagtacgggtgccatcggagaacgtgctgggtgaggttgggagtggcttcaaggttgccatgcacatcctcaacaatggaaggtttggcatggctgcggccctggcaggtaccatgagaggcatcattgctaaggcggtagatcatgccactaatcgtacccagtttggggagaaaattcacaactttgggctgatccaggagaagctggcacggatggttatgctgcagtatgtaactgagtccatggcttacatggtgagtgctaacatggaccagggagccacggacttccagatagaggccgccatcagcaaaatctttggctcggaggcagcctggaaggtgacagatgaatgcatccaaatcatggggggtatgggcttcatgaaggaacctggagtagagcgtgtgctccgagatcttcgcatcttccggatctttgaggggacaaatgacattcttcggctgtttgtggctctgcagggctgtatggacaaaggaaaggagctctctgggcttggcagtgctctaaagaatccctttgggaatgctggcctcctgctaggagaggcaggcaaacagctgaggcggcgggcagggctgggcagcggcctgagtctcagcggacttgtccacccggagttgagtcggagtggcgagctggcagtacgggctctggagcagtttgccactgtggtggaggccaagctgataaaacacaagaaggggattgtcaatgaacagtttctgctgcagcggctggcagacggggccatcgacctctatgccatggtggtggttctctcgagggcctcaagatccctgagtgagggccaccccacggcccagcatgagaaaatgctctgtgacacctggtgtatcgaggctgcagctcggatccgagagggcatggccgccctgcagtctgacccctggcagcaagagctctaccgcaacttcaaaagcatctccaaggccttggtggagcggggtggtgtggtcaccagcaacccacttggcttctgaatactcccggccagggcctgtcccagttatgtgccttccctcaagccaaagccgaagcccctttccttaaggccctggtttgtcccgaaggggcctagtgttcccagcactgtgcctgctctcaagagcacttactgcctcgcaaataataaaaatttctagccag

SEQ ID NO: 1748 - protein, 655 aa, Homo sapiens
MQAARMAASLGRQLLRLGGGSSRLTALLGQPRPGPARRPYAGGAAQLALDKSDSHPSDALTRKKPAKAESKSFAVGMFKGQLTTDQVFPYPSVLNEEQTQFLKELVEPVSRFFEEVNDPAKNDALEMVEETTWQGLKELGAFGLQVPSELGGVGLCNTQYARLVEIVGMHDLGVGITLGAHQSIGFKGILLFGTKAQKEKYLPKLASGETVAAFCLTEPSSGSDAASIRTSAVPSPCGKYYTLNGSKLWISNGGLADIFTVFAKTPVTDPATGAVKEKITAFVVERGFGGITHGPPEKKMGIKASNTAEVFFDGVRVPSENVLGEVGSGFKVAMHILNNGRFGMAAALAGTMRGIIAKAVDHATNRTQFGEKIHNFGLIQEKLARMVMLQYVTESMAYMVSANMDQGATDFQIEAAISKIFGSEAAWKVTDECIQIMGGMGFMKEPGVERVLRDLRIFRIFEGTNDILRLFVALQGCMDKGKELSGLGSALKNPFGNAGLLLGEAGKQLRRRAGLGSGLSLSGLVHPELSRSGELAVRALEQFATVVEAKLIKHKKGIVNEQFLLQRLADGAIDLYAMVVVLSRASRSLSEGHPTAQHEKMLCDTWCIEAAARIREGMAALQSDPWQQELYRNFKSISKALVERGGVVTSNPLGF

SEQ ID NO: 1749 - DNA, 7869 bp, Homo sapiens
ggcacgaggtttggggcatctccgcggtccggcccggggccccgggatctcggctgtccttcctcccggcataagatgcacatttttctgctctggagccgggaatgaaatattcttgagttcttacaactttatgacgagacccatgtgtggtgctattgagaaattcattgggaagttggaagacatttcaaacaacaggttgttttggtttctatagtacaattggggtggcattctgttttgtgaaaggaggaaggacttaggccagaaaactcatatgctatggttaactggttcccagcctccgagaatcttgttttccatggtgtaaaacttactcagcatcaggataagggataacgactctatggatatacagaatccttcaccatggtaaaactcgcaaacccgctttatactgagtggattttggaggccatcaaaaaagtgaaaaagcagaaacagcgtccttcagaagaaaggatatgcaatgctgtgtcttcatcccatggcttggatcgtaaaactgttttagaacaattggagttgagtgttaaagatggaacaattttaaaagtctcaaataaaggactcaattcctataaagatcctgataatcctgggcgaatagcacttcctaagcctcggaaccatggaaaattggataataaacaaaatgtggattggaataaactgataaagcgggcagttgagggcttggcagagtctggtggctcaactttgaaaagcattgaacgttttttgaaaggtcagaaggatgtgtctgcattattcggaggcagtgctgcctctggctttcaccagcagttacgattggctatcaaacgtgccattggccacggcagactccttaaagatggacctctttatcggctcaacactaaagcaaccaacgtggatgggaaagagagttgtgagtctctttcctgtttacctccagtgtcccttcttccacatgaaaaggataagccggttgctgaaccaatccccatctgtagtttctgtcttggtacaaaagaacaaaaccgagaaaagaagccagaggaactcatctcctgtgccgactgtggcaacagtggccatccatcctgtttaaagttttcccctgaactaacggttcgagtgaaggccttacggtggcagtgcatcgagtgtaaaacatgcagctcctgtcgagatcaaggcaaaaatgcggataacatgctcttttgtgattcatgtgaccgaggttttcacatggagtgttgtgatccgccactcacccgtatgccaaaaggcatgtggatatgtcaaatatgtcgacctaggaaaaaaggacgaaaacttctacaaaagaaggcagcacagataaaacggcgctatactaatccaataggacgtccaaaaaacaggttaaagaaacaaaacacggtatcaaaaggtcccttcagcaaagttcgaactggccctggaaggggtaggaaacgaaaaatcactctttccagccaatcagcatcatcatcatcagaagaaggatatttagagcggatagatggcttggacttctgcagagatagcaatgtctccttgaggttcaacaagaaaaccaaagggctcattgatggccttaccaaattttttaccccttcccctgatgggcggaaagctcggggggaagtggtggactactctgagcaatatcgaatcagaaagaggggcaacaggaaatcaagcacttcagattggcccacagacaatcaggatggctgggatggcaaacaagaaaatgaggagcgactttttgggagccaggaaatcatgactgagaaagatatggaattatttcgtgatatccaagaacaagcactgcagaaagttggagtgactggtccccctgatccacaagtccgctgtccctctgtcattgagtttgggaagtatgaaattcacacctggtactcctccccatatcctcaagaatactcaaggctgcccaaattgtatctttgtgaattttgtctaaaatatatgaaaagtagaactattctgcagcagcacatgaagaaatgtggttggttccatcctcctgccaatgagatttacagaaagaataatatttctgtctttgaggttgatgggaatgtgagtaccatttattgtcaaaacctgtgtcttttggcaaagttgtttcttgaccacaaaaccctctattacgatgtggagccatttcttttttatgtactaacacagaatgatgtcaagggctgccaccttgttggctacttttctaaggaaaagcactgccaacagaagtacaatgtttcctgtataatgattcttcctcaataccagcgtaagggctatggcaggtttctcatcgatttcagttatttgttatcaaagcgtgaaggccaagcagggtctccagagaaaccgttatctgatctgggtcgtctttcctacatggcatattggaaaagtgtaatattggagtgcctttatcaccaaaatgacaagcagatcagcattaagaagttaagcaagttgactggaatctgccctcaagacatcacttccacactccaccacctacgaatgctggacttccgtagtgaccaatttgtgattatccgccgggaaaaacttatccaggatcacatggcaaagcttcagctgaatttgcgacctgtagatgtagatccagaatgtttgcgctggactccagtcatagtgtccaactctgtggtctcagaggaggaagaagaggaggctgaggaaggagaaaacgaagagccacagtgccaggaaagagaattagagatcagtgtgggaaagtctgtgtctcatgagaacaaagaacaagattcttattcagtagaaagtgaaaagaaaccagaagttatggctccagtcagttctacacgtttgagcaaacaagtccttcctcatgatagtcttcctgcaaatagccagccatctcggaggggccgctgggggaggaagaacagaaaaacccaggaacgttttggtgataaagattctaaactgctcttggaagagacgtcttcagctcctcaggaacaatatggagaatgtggggagaaatcagaagccacccaggaacaatacactgaaagtgaagaacagctggtggcttctgaggagcagccaagccaggacgggaaacctgaccttcccaagagaagactcagtgagggggttgagccctggcgaggacagctcaagaaaagccctgaggctctgaagtgcagattaacagaaggaagtgagaggctgccccgtcgctacagtgagggtgacagggctgtcctcaggggcttcagtgagagcagcgaggaggaggaggagccggaaagccctcggtcaagctcgccaccaattctcacaaagcccacgctgaagcgaaagaaaccatttctccaccgaaggaggagagtccgaaagcgcaaacaccacaatagcagtgtagtcacagaaactatttctgagaccactgaagtgttagatgaaccttttgaagattctgactccgagaggccaatgccaagattagaacccacatttgagatcgatgaagaagaggaggaagaggatgaaaatgaacttttccctagagaatacttccgtcgtttgtcttcgcaggatgtactcaggtgtcagtcctcttctaagaggaagtctaaagatgaagaagaagatgaagagtcagatgatgctgatgacactcctatcttaaagccagtatctcttttgcgaaaacgtgatgtgaagaattctcctcttgagccagatacatccacacctttgaaaaagaaaaagggatggcccaaaggcaagagccgcaaaccaatccactggaagaaaagacctggtcgaaaaccaggatttaagttgagtcgggaaatcatgccagtttctactcaagcatgcgtcattgagcccatcgtttccattcctaaagctggacgtaaacccaagatccaggagagtgaagaaactgttgagccaaaagaagacatgcccctacccgaggagaggaaggaggaggaggagatgcaagcagaggcagaagaggctgaagagggtgaggaagaggatgcagccagcagtgaagtcccagcagcctctccagcagacagcagcaatagtcctgagaccgaaaccaaggagcctgaggtggaggaggaagaagagaagccccgtgtctcagaggagcagaggcagtcagaggaggagcagcaggaattagaggagccagagccagaggaggaggaagatgcagctgcagagactgcccagaatgacgaccacgacgctgatgatgaggatgatggccacctggagtccacaaagaaaaaggagctagaggaacagcccacgagggaagatgtcaaggaggagcctggtgttcaagagtcttttttagatgctaatatgcagaagagtagggaaaagataaaggataaagaggaaaccgagctggattccgaagaggagcagccttcccatgacacgtccgtggtgtcagagcagatggctgggtctgaggacgaccacgaagaagactcccacactaaggaagagttaatcgaattaaaagaggaggaagagattcctcatagtgagctggatctggaaactgtacaggcagtgcagtctttgactcaagaagaaagcagtgagcatgagggcgcctaccaggactgtgaggaaactcttgcggcgtgtcagaccctgcagagttacacccaggctgacgaggaccctcagatgtccatggttgaagactgtcatgcgtcagaacataatagccctatctcctccgttcagtctcaccccagccagtcagtccgttcggtcagcagtcccaacgtgcctgcccttgagagtggctacacccagatcagcccagaacaaggatccctgtccgcaccctctatgcagaacatggagaccagccccatgatggatgtgccttccgtatcagaccactctcagcaggtggtggacagcggcttcagtgacctgggcagcattgagagcaccactgaaaactatgagaacccaagcagttacgactccacgatgggcggcagcatctgtgggaacagctcttcccagagcagctgctcctacggtgggctgtcgtcctccagcagcctcacccagagcagctgtgtggtcactcagcagatggccagcatgggcagcagctgcagcatgatgcagcagagcagcgtccagcctgctgccaactgcagcatcaagtcacctcagagctgcgtggtggagaggcctcccagtaaccagcagcagcagccgccaccaccgcctccacagcagccacagccgccgccgccacaaccacaaccagcaccacagcctccaccaccccagcagcagccgcaacagcagccgcagcctcagccccagcagcctccacccccaccccctccccagcagcagcccccgctgtcacagtgtagtatgaataacagtttcaccccagctcctatgatcatggagataccagaatctggaagcactgggaacataagtatctatgagaggattccaggggattttggtgccggcagctactctcaaccatcagccaccttcagcctagccaagctgcagcagctgaccaacaccattatggaccctcatgccatgccttatagccattctcctgctgtgacttcctatgcaaccagtgtttctctgtccaatacaggactggctcagctggctccatctcatcccttagctgggactcctcaagcacaagccaccatgacgccacccccaaacttggcatccactaccatgaacctcacatctcctctgcttcagtgcaacatgtctgccaccaacattggcattcctcacacgcagagattgcaagggcaaatgccagtgaaggggcacatttccatccgctccaagtctgcgccactgccctctgcggctgctcaccagcagcagctgtatggccgtagcccatcggcagttgccatgcaggctggccctcgcgcactggctgttcagcgtggcatgaacatgggggttaatctgatgcctactcccgcctataatgtcaattccatgaatatgaacaccttgaatgccatgaacagctatcgaatgacacagcccatgatgaacagcagttaccatagtaaccctgcctacatgaaccagacagcacagtatcctatgcagatgcagatgggaatgatggggagccaggcctatacccagcagcctatgcagcctaaccctcatgggaacatgatgtacacaggcccctcccatcacagctacatgaacgctgctggcgtgcccaagcagtcactcaacggaccttacatgagaagatgagcaagatgaacttgcaatcaaaaacttaaatatatataaataaaggaaccttttatactgacaaaccagagaaaaatggacctttttccagttaaaatattgctgtagatttagaggaatttttctttggtttattttattttttagaaaacctgatcttctcttttttttgggttcattttgttgtgggttttggttttcttcacaatcttgaacattttacagtagaactcatctaaaaatggatttggggatggggaaacatgcacaaaatcttttcataattaaaaagagccttactttctttacataccacatggacagaatttgtgtaaaagtgaattatctttattttaaaatgtatgtttcccctcactgtttgcagctcccaatgttgtcatttttaaatgttatatacatctcaagggttaaccagaccctttcctccaaacccaacctttcatttcctacttcattccagcaggaggcacttaggggagactcggatggggacatggagaacaacccaagctccttaaacttattattattgttaatattattattattattattaataaagtgaggcaggaaaatgcttctccttttaaaatcccctccactcctcacacacacacacctcttgaaacccttccccaagaatgtttctttatagacggacttcattgaaatctttgttgttcttgaatcaagtgtaatataatttttttcttcttttttaaaatattcccactcagcactcagagacacaaaaatactgtaagtctcaattaacagcagaatctcagagaaaagctgtttgcaatccaaatccagcctttggaggaatagagatggtcaattaacaatcaaaaagaggagattaacctcttgtttttttaccacctggtgaatcagccataacgcacacacacgccacccagcctcttgtttctagtatgtactttgaaatgctaactgagggtcttgatgcttgagcctttgactgataaaactcaaatagcagtccccagtgatttgcctcttaggttctttcttaaattgttggtggatgactgtacattttagtgatttgaaaaataactgacaaaccattgaaacagtttattttatgttggaagagatggcgcagatgtgtgtcagaagggagatcacggtgtgagtttcgtagctatttaagtgatacatacctctagtttttgtatgtcttttgagatcctgagttcatcccctgtgaatcagagtgcacaagcacctctcctgtgagtggctaatgagaagagggacagaccgaccaccagcacagtagggcagatctggacagcagaatgttataacgcaagttcatgtgttgctcccaactccattctcttttctctcgtgcaaccagtttgcccattctcttcctattacttgctccagggataggtaaaaaaaaaa

SEQ ID NO: 1750 - protein, 2004 aa, Homo sapiens
MVKLANPLYTEWILEAIKKVKKQKQRPSEERICNAVSSSHGLDRKTVLEQLELSVKDGTILKVSNKGLNSYKDPDNPGRIALPKPRNHGKLDNKQNVDWNKLIKRAVEGLAESGGSTLKSIERFLKGQKDVSALFGGSAASGFHQQLRLAIKRAIGHGRLLKDGPLYRLNTKATNVDGKESCESLSCLPPVSLLPHEKDKPVAEPIPICSFCLGTKEQNREKKPEELISCADCGNSGHPSCLKFSPELTVRVKALRWQCIECKTCSSCRDQGKNADNMLFCDSCDRGFHMECCDPPLTRMPKGMWICQICRPRKKGRKLLQKKAAQIKRRYTNPIGRPKNRLKKQNTVSKGPFSKVRTGPGRGRKRKITLSSQSASSSSEEGYLERIDGLDFCRDSNVSLRFNKKTKGLIDGLTKFFTPSPDGRKARGEVVDYSEQYRIRKRGNRKSSTSDWPTDNQDGWDGKQENEERLFGSQEIMTEKDMELFRDIQEQALQKVGVTGPPDPQVRCPSVIEFGKYEIHTWYSSPYPQEYSRLPKLYLCEFCLKYMKSRTILQQHMKKCGWFHPPANEIYRKNNISVFEVDGNVSTIYCQNLCLLAKLFLDHKTLYYDVEPFLFYVLTQNDVKGCHLVGYFSKEKHCQQKYNVSCIMILPQYQRKGYGRFLIDFSYLLSKREGQAGSPEKPLSDLGRLSYMAYWKSVILECLYHQNDKQISIKKLSKLTGICPQDITSTLHHLRMLDFRSDQFVIIRREKLIQDHMAKLQLNLRPVDVDPECLRWTPVIVSNSVVSEEEEEEAEEGENEEPQCQERELEISVGKSVSHENKEQDSYSVESEKKPEVMAPVSSTRLSKQVLPHDSLPANSQPSRRGRWGRKNRKTQERFGDKDSKLLLEETSSAPQEQYGECGEKSEATQEQYTESEEQLVASEEQPSQDGKPDLPKRRLSEGVEPWRGQLKKSPEALKCRLTEGSERLPRRYSEGDRAVLRGFSESSEEEEEPESPRSSSPPILTKPTLKRKKPFLHRRRRVRKRKHHNSSVVTETISETTEVLDEPFEDSDSERPMPRLEPTFEIDEEEEEEDENELFPREYFRRLSSQDVLRCQSSSKRKSKDEEEDEESDDADDTPILKPVSLLRKRDVKNSPLEPDTSTPLKKKKGWPKGKSRKPIHWKKRPGRKPGFKLSREIMPVSTQACVIEPIVSIPKAGRKPKIQESEETVEPKEDMPLPEERKEEEEMQAEAEEAEEGEEEDAASSEVPAASPADSSNSPETETKEPEVEEEEEKPRVSEEQRQSEEEQQELEEPEPEEEEDAAAETAQNDDHDADDEDDGHLESTKKKELEEQPTREDVKEEPGVQESFLDANMQKSREKIKDKEETELDSEEEQPSHDTSVVSEQMAGSEDDHEEDSHTKEELIELKEEEEIPHSELDLETVQAVQSLTQEESSEHEGAYQDCEETLAACQTLQSYTQADEDPQMSMVEDCHASEHNSPISSVQSHPSQSVRSVSSPNVPALESGYTQISPEQGSLSAPSMQNMETSPMMDVPSVSDHSQQVVDSGFSDLGSIESTTENYENPSSYDSTMGGSICGNSSSQSSCSYGGLSSSSSLTQSSCVVTQQMASMGSSCSMMQQSSVQPAANCSIKSPQSCVVERPPSNQQQQPPPPPPQQPQPPPPQPQPAPQPPPPQQQPQQQPQPQPQQPPPPPPPQQQPPLSQCSMNNSFTPAPMIMEIPESGSTGNISIYERIPGDFGAGSYSQPSATFSLAKLQQLTNTIMDPHAMPYSHSPAVTSYATSVSLSNTGLAQLAPSHPLAGTPQAQATMTPPPNLASTTMNLTSPLLQCNMSATNIGIPHTQRLQGQMPVKGHISIRSKSAPLPSAAAHQQQLYGRSPSAVAMQAGPRALAVQRGMNMGVNLMPTPAYNVNSMNMNTLNAMNSYRMTQPMMNSSYHSNPAYMNQTAQYPMQMQMGMMGSQAYTQQPMQPNPHGNMMYTGPSHHSYMNAAGVPKQSLNGPYMRR

SEQ ID NO: 1751 - DNA, 6016 bp, Homo sapiens
accgcggccgcgcgcccccctctgcccccgctgcccaggattggtaggctccaccgctcggcagccggcttccctgctcggacgccgagcaccgccaaagcgcacttcgattttcagaattcctcctgggaatgctgactccttgcttggtgccctgatgcttctctgagataaactgatgaattggaaccatggtgcaaaagaagaagttctgtcctcggttacttgactatctagtgatcgtaggggccaggcacccgagcagtgatagcgtggcccagactcctgaattgctacggcgataccccttggaggatcacactgagtttcccctgcccccagatgtagtgttcttctgccagcccgagggctgcctgagcgtgcggcagcggcgcatgagccttcgggatgatacctcttttgtcttcaccctcactgacaaggacactggagtcacgcgatatggcatctgtgttaacttctaccgctccttccaaaagcgaatctctaaggagaagggggaaggtggggcagggtcccgtgggaaggaaggaacccatgccacctgtgcctcagaagagggtggcactgagagctcagagagtggctcatccctgcagcctctcagtgctgactctacccctgatgtgaaccagtctcctcggggcaaacgccgggccaaggcggggagccgctcccgcaacagtactctcacgtccctgtgcgtgctcagccactaccctttcttctccaccttccgagagtgtttgtatactctcaagcgcctggtggactgctgtagtgagcgccttctgggcaagaaactgggcatccctcgaggcgtacaaagggacaccatgtggcggatctttactggatcgctgctggtagaggagaagtcaagtgcccttctgcatgaccttcgagagattgaggcctggatctatcgattgctgcgctccccagtacccgtctctgggcagaagcgagtagacatcgaggtcctaccccaagagctccagccagctctgacctttgctcttccagacccatctcgattcaccctagtggatttcccactgcaccttcccttggaacttctaggtgtggacgcctgtctccaggtgctaacctgcattctgttagagcacaaggtggtgctacagtcccgagactacaatgcactctccatgtctgtgatggcattcgtggcaatgatctacccactggagtatatgtttcctgtcatcccgctgctacccacctgcatggcatcagcagagcagctgctgttggctccaaccccgtacatcattggggttcctgccagcttcttcctctacaaactggacttcaaaatgcctgatgatgtatggctagtggatctggacagcaatagggtgattgcccccaccaatgcagaagtgctgcctatcctgccagaaccagaatcactagagctgaaaaagcatttaaagcaggccttggccagcatgagtctcaacacccagcccatcctcaatctggagaaatttcatgagggccaggagatcccccttctcttgggaaggccttctaatgacctgcagtccacaccgtccactgaattcaacccactcatctatggcaatgatgtggattctgtggatgttgcaaccagggttgccatggtacggttcttcaattccgccaacgtgctgcagggatttcagatgcacacgcgtaccctgcgcctctttcctcggcctgtggtagcttttcaagctggctcctttctagcctcacgtccccggcagactccttttgccgagaaattggccaggactcaggctgtggagtactttggggaatggatccttaaccccaccaactatgcctttcagcgaattcacaacaatatgtttgatccagccctgattggtgacaagccaaagtggtatgctcatcagctgcagcctatccactatcgcgtctatgacagcaattcccagctggctgaggccctgagtgtaccaccagagcgggactctgactccgaacctactgatgatagtggcagtgatagtatggattatgacgattcaagctcttcttactcctcccttggtgactttgtcagtgaaatgatgaaatgtgacattaatggtgatactcccaatgtggaccctctgacacatgcagcactgggggatgccagcgaggtggagattgacgagctgcagaatcagaaggaagcagaagagcctggcccagacagtgagaactctcaggaaaaccccccactgcgctccagctctagcaccacagccagcagcagccccagcactgtcatccacggagccaactctgaacctgctgactctacggagatggatgataaggcagcagtaggcgtctccaagcccctcccttccgtgcctcccagcattggcaaatcgaacatggacagacgtcaggcagaaattggagaggggtcagtgcgccggcgaatctatgacaatccatacttcgagccccaatatggctttccccctgaggaagatgaggatgagcagggggaaagttacactccccgattcagccaacatgtcagtggcaatcgggctcaaaagctgctgcggcccaacagcttgagactggcaagtgactcagatgcagagtcagactctcgggcaagctctcccaactccaccgtctccaacaccagcaccgagggcttcgggggcatcatgtcttttgccagcagcctctatcggaaccacagtaccagcttcagtctttcaaacctcacactgcccaccaaaggtgcccgagagaaggccacgcccttccccagtctgaaagtatttgggctaaatactctaatggagattgttactgaagccggccccgggagtggtgaaggaaacaggagggcgttagtggatcagaagtcatctgtcattaaacacagcccaacagtgaaaagagaacctccatcaccccagggtcgatccagcaattctagtgagaaccagcagttcctgaaggaggtggtgcacagcgtgctggacggccagggagttggctggctcaacatgaaaaaggtgcgccggctgctggagagcgagcagctgcgagtctttgtcctgagcaagctgaaccgcatggtgcagtcagaggacgatgcccggcaggacatcatcccggatgtggagatcagtcggaaggtgtacaagggaatgttagacctcctcaagtgtacagtcctcagcttggagcagtcctatgcccacgcgggtctgggtggcatggccagcatctttgggcttttggagattgcccagacccactactatagtaaagaaccagacaagcggaagagaagtccaacagaaagtgtaaataccccagttggcaaggatcctggcctagctgggcggggggacccaaaggctatggcacaactgagagttccacaactgggacctcgggcaccaagtgccacaggaaagggtcctaaggaactggacaccagaagtttaaaggaagaaaattttatagcatctattgaattgtggaacaagcaccaggaagtgaaaaagcaaaaagctttggaaaaacagaggcctgaagtaatcaaacctgtctttgaccttggtgagacagaggagaaaaagtcccagatcagcgcagacagtggtgtgagcctgacgtctagttcccagaggactgatcaagactctgtcatcggcgtgagtccagctgttatgatccgcagctcaagtcaggattctgaagttagcaccgtggtgagtaatagctctggagagacccttggagctgacagtgacttgagcagcaatgcaggtgatggaccaggtggcgagggcagtgttcacctggcaagctctcggggcactttgtctgatagtgaaattgagaccaactctgccacaagcaccatctttggtaaagcccacagcttgaagccaagcataaaggagaagctggcaggcagccccattcgtacttctgaagatgtgagccagcgagtctatctctatgagggactcctaggaagggacaaaggatccatgtgggaccagttagaggatgcagctatggagaccttttctataagcaaagagcgttctactttatgggaccaaatgcaattctgggaagatgccttcttagatgctgtgatgttggagagagaagggatgggtatggaccagggtccccaggaaatgatcgacaggtacctgtcccttggagaacatgaccggaagcgcctggaagatgatgaagatcgcttgctggccacacttctgcacaacctcatctcctacatgctgctgatgaaggtaaataagaatgacatccgcaagaaggtgaggcgcctaatgggaaagtcgcacattgggcttgtgtacagccagcaaatcaatgaggtgcttgatcagctggcgaacctgaatggacgcgatctctctatctggtccagtggcagccggcacatgaagaagcagacatttgtggtacatgcagggacagatacaaacggagatatctttttcatggaggtgtgcgatgactgtgtggtgttgcgtagtaacatcggaacagtgtatgagcgctggtggtacgagaagctcatcaacatgacctactgtcccaagacgaaggtgttgtgcttgtggcgtagaaatggctctgagacccagctcaacaagttctatactaaaaagtgtcgggagctgtactactgtgtgaaggacagcatggagcgcgctgccgcccgacagcaaagcatcaaacccggacctgaattgggtggcgagttccctgtgcaggacctgaagactggtgagggtggcctgctgcaggtgaccctggaagggatcaacctcaaattcatgcacaatcaggttttcatagagctgaatcacattaaaaagtgcaatacagttcgaggcgtctttgtcctggaggaatttgttcctgaaattaaagaagtggtgagccacaagtacaagacaccaatggcccacgaaatctgctactccgtattatgtctcttctcgtacgtggctgcagttcatagcagtgaggaagatctcagaaccccgccccggcctgtctctagctgatggagaggggctacgcagctgccccagcccagggcacgcccctggccccttgctgttcccaagtgcacgatgctgctgtgactgaggagtggatgatgctcgtgtgtcctctgcaagccccctgctgtggcttggttggttaccggttatgtgtccctctgagtgtgtcttgagcgtgtccaccttctccctctccactcccagaagaccaaactgccttcccctcagggctcaagaatgtgtacagtctgtggggccggtgtgaacccactattttgtgtccttgagacatttgtgttgtggttccttgtccttgtccctggcgttataactgtccactgcaagagtctggctctcccttctctgtgacccggcatgactgggcgcctggagcagtttcactctgtgaggagtgagggaaccctggggctcaccctctcagaggaagggcacagagaggaagggaagaattggggggcagccggagtgagtggcagcctccctgcttccttctgcattcccaagccggcagctactgcccagggcccgcagtgttggctgctgcctgccacagcctctgtgactgcagtggagcggcgaattccctgtggcctgccacgccttcggcatcagaggatggagtggtcgaggctagtggagtcccagggaccgctggctgctctgcctgagcatcagggagggggcaggaaagaccaagctgggtttgcacatctgtctgcaggctgtctctccaggcacggggtgtcaggagggagagacagcctgggtatgggcaagaaatgactgtaaatatttcagccccacattatttatagaaaatgtacagttgtgtgaatgtgaaataaatgtcctcaactccc

SEQ ID NO: 1752 - protein, 1647 aa, Homo sapiens
MVQKKKFCPRLLDYLVIVGARHPSSDSVAQTPELLRRYPLEDHTEFPLPPDVVFFCQPEGCLSVRQRRMSLRDDTSFVFTLTDKDTGVTRYGICVNFYRSFQKRISKEKGEGGAGSRGKEGTHATCASEEGGTESSESGSSLQPLSADSTPDVNQSPRGKRRAKAGSRSRNSTLTSLCVLSHYPFFSTFRECLYTLKRLVDCCSERLLGKKLGIPRGVQRDTMWRIFTGSLLVEEKSSALLHDLREIEAWIYRLLRSPVPVSGQKRVDIEVLPQELQPALTFALPDPSRFTLVDFPLHLPLELLGVDACLQVLTCILLEHKVVLQSRDYNALSMSVMAFVAMIYPLEYMFPVIPLLPTCMASAEQLLLAPTPYIIGVPASFFLYKLDFKMPDDVWLVDLDSNRVIAPTNAEVLPILPEPESLELKKHLKQALASMSLNTQPILNLEKFHEGQEIPLLLGRPSNDLQSTPSTEFNPLIYGNDVDSVDVATRVAMVRFFNSANVLQGFQMHTRTLRLFPRPVVAFQAGSFLASRPRQTPFAEKLARTQAVEYFGEWILNPTNYAFQRIHNNMFDPALIGDKPKWYAHQLQPIHYRVYDSNSQLAEALSVPPERDSDSEPTDDSGSDSMDYDDSSSSYSSLGDFVSEMMKCDINGDTPNVDPLTHAALGDASEVEIDELQNQKEAEEPGPDSENSQENPPLRSSSSTTASSSPSTVIHGANSEPADSTEMDDKAAVGVSKPLPSVPPSIGKSNMDRRQAEIGEGSVRRRIYDNPYFEPQYGFPPEEDEDEQGESYTPRFSQHVSGNRAQKLLRPNSLRLASDSDAESDSRASSPNSTVSNTSTEGFGGIMSFASSLYRNHSTSFSLSNLTLPTKGAREKATPFPSLKVFGLNTLMEIVTEAGPGSGEGNRRALVDQKSSVIKHSPTVKREPPSPQGRSSNSSENQQFLKEVVHSVLDGQGVGWLNMKKVRRLLESEQLRVFVLSKLNRMVQSEDDARQDIIPDVEISRKVYKGMLDLLKCTVLSLEQSYAHAGLGGMASIFGLLEIAQTHYYSKEPDKRKRSPTESVNTPVGKDPGLAGRGDPKAMAQLRVPQLGPRAPSATGKGPKELDTRSLKEENFIASIELWNKHQEVKKQKALEKQRPEVIKPVFDLGETEEKKSQISADSGVSLTSSSQRTDQDSVIGVSPAVMIRSSSQDSEVSTVVSNSSGETLGADSDLSSNAGDGPGGEGSVHLASSRGTLSDSEIETNSATSTIFGKAHSLKPSIKEKLAGSPIRTSEDVSQRVYLYEGLLGRDKGSMWDQLEDAAMETFSISKERSTLWDQMQFWEDAFLDAVMLEREGMGMDQGPQEMIDRYLSLGEHDRKRLEDDEDRLLATLLHNLISYMLLMKVNKNDIRKKVRRLMGKSHIGLVYSQQINEVLDQLANLNGRDLSIWSSGSRHMKKQTFVVHAGTDTNGDIFFMEVCDDCVVLRSNIGTVYERWWYEKLINMTYCPKTKVLCLWRRNGSETQLNKFYTKKCRELYYCVKDSMERAAARQQSIKPGPELGGEFPVQDLKTGEGGLLQVTLEGINLKFMHNQVFIELNHIKKCNTVRGVFVLEEFVPEIKEVVSHKYKTPMAHEICYSVLCLFSYVAAVHSSEEDLRTPPRPVSS

SEQ ID NO: 1753 - DNA, 5973 bp, Homo sapiens
cacgtgcatgtgtagcatgccttggtttttcctttggcatctgaaaaaggcacaacctgaaagacctagaacccagtgtcggtccccaggccctttgggacaggaagagaagagccgtgtggccgcggggaggatgtcctgcggcggggctgtcctcgcggactgactggactccatctcccagcgggcgccgcggcgcggccacgcccccccactccccgcgcgcgcccggtggagacttcgattttcagaattcctcctgggaatgctgactccttgcttggtgccctgatgcttctctgagataaactgatgaattggaaccatggtgcaaaagaagaagttctgtcctcggttacttgactatctagtgatcgtaggggccaggcacccgagcagtgatagcgtggcccagactcctgaattgctacggcgataccccttggaggatcacactgagtttcccctgcccccagatgtagtgttcttctgccagcccgagggctgcctgagcgtgcggcagcggcgcatgagccttcgggatgatacctcttttgtcttcaccctcactgacaaggacactggagtcacgcgatatggcatctgtgttaacttctaccgctccttccaaaagcgaatctctaaggagaagggggaaggtggggcagggtcccgtgggaaggaaggaacccatgccacctgtgcctcagaagagggtggcactgagagctcagagagtggctcatccctgcagcctctcagtgctgactctacccctgatgtgaaccagtctcctcggggcaaacgccgggccaaggcggggagccgctcccgcaacagtactctcacgtccctgtgcgtgctcagccactaccctttcttctccaccttccgagagtgtttgtatactctcaagcgcctggtggactgctgtagtgagcgccttctgggcaagaaactgggcatccctcgaggcgtacaaagggacaccatgtggcggatctttactggatcgctgctggtagaggagaagtcaagtgcccttctgcatgaccttcgagagattgaggcctggatctatcgattgctgcgctccccagtacccgtctctgggcagaagcgagtagacatcgaggtcctaccccaagagctccagccagctctgacctttgctcttccagacccatctcgattcaccctagtggatttcccactgcaccttcccttggaacttctaggtgtggacgcctgtctccaggtgctaacctgcattctgttagagcacaaggtggtgctacagtcccgagactacaatgcactctccatgtctgtgatggcattcgtggcaatgatctacccactggaatatatgtttcctgtcatcccgctgctacccacctgcatggcatcagcagagcagctgctgttggctccaaccccgtacatcattggggttcctgccagcttcttcctctacaaactggacttcaaaatgcctgatgatgtatggctagtggatctggacagcaatagggtgattgcccccaccaatgcagaagtgctgcctatcctgccagaaccagaatcactagagctgaaaaagcatttaaagcaggccttggccagcatgagtctcaacacccagcccatcctcaatctggagaaatttcatgagggccaggagatcccccttctcttgggaaggccttctaatgacctgcagtccacaccgtccactgaattcaacccactcatctatggcaatgatgtggattctgtggatgttgcaaccagggttgccatggtacggttcttcaattccgccaacgtgctgcagggatttcagatgcacacgcgtaccctgcgcctctttcctcggcctgtggtagcttttcaagctggctcctttctagcctcacgtccccggcagactccttttgccgagaaattggccaggactcaggctgtggagtactttggggaatggatccttaaccccaccaactatgcctttcagcgaattcacaacaatatgtttgatccagccctgattggtgacaagccaaagtggtatgctcatcagctgcagcctatccactatcgcgtctatgacagcaattcccagctggctgaggccctgagtgtaccaccagagcgggactctgactccgaacctactgatgatagtggcagtgatagtatggattatgacgattcaagctcttcttactcctcccttggtgactttgtcagtgaaatgatgaaatgtgacattaatggtgatactcccaatgtggaccctctgacacatgcagcactgggggatgccagcgaggtggagattgacgagctgcagaatcagaaggaagcagaagagcctggcccagacagtgagaactctcaggaaaaccccccactgcgctccagctctagcaccacagccagcagcagccccagcactgtcatccacggagccaactctgaacctgctgactctacggagatggatgataaggcagcagtaggcgtctccaagcccctcccttccgtgcctcccagcattggcaaatcgaacatggacagacgtcaggcagaaattggagaggggtcagtgcgccggcgaatctatgacaatccatacttcgagccccaatatggctttccccctgaggaagatgaggatgagcagggggaaagttacactccccgattcagccaacatgtcagtggcaatcgggctcaaaagctgctgcggcccaacagcttgagactggcaagtgactcagatgcagagtcagactctcgggcaagctctcccaactccaccgtctccaacaccagcaccgagggcttcgggggcatcatgtcttttgccagcagcctctatcggaaccacagtaccagcttcagtctttcaaacctcacactgcccaccaaaggtgcccgagagaaggccacgcccttccccagtctgaaaggaaacaggagggcgttagtggatcagaagtcatctgtcattaaacacagcccaacagtgaaaagagaacctccatcaccccagggtcgatccagcaattctagtgagaaccagcagttcctgaaggaggtggtgcacagcgtgctggacggccagggagttggctggctcaacatgaaaaaggtgcgccggctgctggagagcgagcagctgcgagtctttgtcctgagcaagctgaaccgcatggtgcagtcagaggacgatgcccggcaggacatcatcccggatgtggagatcagtcggaaggtgtacaagggaatgttagacctcctcaagtgtacagtcctcagcttggagcagtcctatgcccacgcgggtctgggtggcatggccagcatctttgggcttttggagattgcccagacccactactatagtaaagaaccagacaagcggaagagaagtccaacagaaagtgtaaataccccagttggcaaggatcctggcctagctgggcggggggacccaaaggctatggcacaactgagagttccacaactgggacctcgggcaccaagtgccacaggaaagggtcctaaggaactggacaccagaagtttaaaggaagaaaattttatagcatctattgggcctgaagtaatcaaacctgtctttgaccttggtgagacagaggagaaaaagtcccagatcagcgcagacagtggtgtgagcctgacgtctagttcccagaggactgatcaagactctgtcatcggcgtgagtccagctgttatgatccgcagctcaagtcaggattctgaagttagcaccgtggtgagtaatagctctggagagacccttggagctgacagtgacttgagcagcaatgcaggtgatggaccaggtggcgagggcagtgttcacctggcaagctctcggggcactttgtctgatagtgaaattgagaccaactctgccacaagcaccatctttggtaaagcccacagcttgaagccaagcataaaggagaagctggcaggcagccccattcgtacttctgaagatgtgagccagcgagtctatctctatgagggactcctaggcaaagagcgttctactttatgggaccaaatgcaattctgggaagatgccttcttagatgctgtgatgttggagagagaagggatgggtatggaccagggtccccaggaaatgatcgacaggtacctgtcccttggagaacatgaccggaagcgcctggaagatgatgaagatcgcttgctggccacacttctgcacaacctcatctcctacatgctgctgatgaaggtaaataagaatgacatccgcaagaaggtgaggcgcctaatgggaaagtcgcacattgggcttgtgtacagccagcaaatcaatgaggtgcttgatcagctggcgaacctgaatggacgcgatctctctatctggtccagtggcagccggcacatgaagaagcagacatttgtggtacatgcagggacagatacaaacggagatatctttttcatggaggtgtgcgatgactgtgtggtgttgcgtagtaacatcggaacagtgtatgagcgctggtggtacgagaagctcatcaacatgacctactgtcccaagacgaaggtgttgtgcttgtggcgtagaaatggctctgagacccagctcaacaagttctatactaaaaagtgtcgggagctgtactactgtgtgaaggacagcatggagcgcgctgccgcccgacagcaaagcatcaaacccggacctgaattgggtggcgagttccctgtgcaggacctgaagactggtgagggtggcctgctgcaggtgaccctggaagggatcaacctcaaattcatgcacaatcaggttttcatagagctgaatcacattaaaaagtgcaatacagttcgaggcgtctttgtcctggaggaatttgttcctgaaattaaagaagtggtgagccacaagtacaagacaccaatggcccacgaaatctgctactccgtattatgtctcttctcgtacgtggctgcagttcatagcagtgaggaagatctcagaaccccgccccggcctgtctctagctgatggagaggggctacgcagctgccccagcccagggcacgcccctggccccttgctgttcccaagtgcacgatgctgctgtgactgaggagtggatgatgctcgtgtgtcctctgcaagccccctgctgtggcttggttggttaccggttatgtgtccctctgagtgtgtcttgagcgtgtccaccttctccctctccactcccagaagaccaaactgccttcccctcagggctcaagaatgtgtacagtctgtggggccggtgtgaacccactattttgtgtccttgagacatttgtgttgtggttccttgtccttgtccctggcgttataactgtccactgcaagagtctggctctcccttctctgtgacccggcatgactgggcgcctggagcagtttcactctgtgaggagtgagggaaccctggggctcaccctctcagaggaagggcacagagaggaagggaagaattggggggcagccggagtgagtggcagcctccctgcttccttctgcattcccaagccggcagctactgcccagggcccgcagtgttggctgctgcctgccacagcctctgtgactgcagtggagcggcgaattccctgtggcctgccacgccttcggcatcagaggatggagtggtcgaggctagtggagtcccagggaccgctggctgctctgcctgagcatcagggagggggcaggaaagaccaagctgggtttgcacatctgtctgcaggctgtctctccaggcacggggtgtcaggagggagagacagcctgggtatgggcaagaaatgactgtaaatatttcagccccacattatttatagaaaatgtacagttgtgtgaatgtgaaataaatgtcctcaactccc

SEQ ID NO: 1754 - protein, 1588 aa, Homo sapiens
MVQKKKFCPRLLDYLVIVGARHPSSDSVAQTPELLRRYPLEDHTEFPLPPDVVFFCQPEGCLSVRQRRMSLRDDTSFVFTLTDKDTGVTRYGICVNFYRSFQKRISKEKGEGGAGSRGKEGTHATCASEEGGTESSESGSSLQPLSADSTPDVNQSPRGKRRAKAGSRSRNSTLTSLCVLSHYPFFSTFRECLYTLKRLVDCCSERLLGKKLGIPRGVQRDTMWRIFTGSLLVEEKSSALLHDLREIEAWIYRLLRSPVPVSGQKRVDIEVLPQELQPALTFALPDPSRFTLVDFPLHLPLELLGVDACLQVLTCILLEHKVVLQSRDYNALSMSVMAFVAMIYPLEYMFPVIPLLPTCMASAEQLLLAPTPYIIGVPASFFLYKLDFKMPDDVWLVDLDSNRVIAPTNAEVLPILPEPESLELKKHLKQALASMSLNTQPILNLEKFHEGQEIPLLLGRPSNDLQSTPSTEFNPLIYGNDVDSVDVATRVAMVRFFNSANVLQGFQMHTRTLRLFPRPVVAFQAGSFLASRPRQTPFAEKLARTQAVEYFGEWILNPTNYAFQRIHNNMFDPALIGDKPKWYAHQLQPIHYRVYDSNSQLAEALSVPPERDSDSEPTDDSGSDSMDYDDSSSSYSSLGDFVSEMMKCDINGDTPNVDPLTHAALGDASEVEIDELQNQKEAEEPGPDSENSQENPPLRSSSSTTASSSPSTVIHGANSEPADSTEMDDKAAVGVSKPLPSVPPSIGKSNMDRRQAEIGEGSVRRRIYDNPYFEPQYGFPPEEDEDEQGESYTPRFSQHVSGNRAQKLLRPNSLRLASDSDAESDSRASSPNSTVSNTSTEGFGGIMSFASSLYRNHSTSFSLSNLTLPTKGAREKATPFPSLKGNRRALVDQKSSVIKHSPTVKREPPSPQGRSSNSSENQQFLKEVVHSVLDGQGVGWLNMKKVRRLLESEQLRVFVLSKLNRMVQSEDDARQDIIPDVEISRKVYKGMLDLLKCTVLSLEQSYAHAGLGGMASIFGLLEIAQTHYYSKEPDKRKRSPTESVNTPVGKDPGLAGRGDPKAMAQLRVPQLGPRAPSATGKGPKELDTRSLKEENFIASIGPEVIKPVFDLGETEEKKSQISADSGVSLTSSSQRTDQDSVIGVSPAVMIRSSSQDSEVSTVVSNSSGETLGADSDLSSNAGDGPGGEGSVHLASSRGTLSDSEIETNSATSTIFGKAHSLKPSIKEKLAGSPIRTSEDVSQRVYLYEGLLGKERSTLWDQMQFWEDAFLDAVMLEREGMGMDQGPQEMIDRYLSLGEHDRKRLEDDEDRLLATLLHNLISYMLLMKVNKNDIRKKVRRLMGKSHIGLVYSQQINEVLDQLANLNGRDLSIWSSGSRHMKKQTFVVHAGTDTNGDIFFMEVCDDCVVLRSNIGTVYERWWYEKLINMTYCPKTKVLCLWRRNGSETQLNKFYTKKCRELYYCVKDSMERAAARQQSIKPGPELGGEFPVQDLKTGEGGLLQVTLEGINLKFMHNQVFIELNHIKKCNTVRGVFVLEEFVPEIKEVVSHKYKTPMAHEICYSVLCLFSYVAAVHSSEEDLRTPPRPVSS

SEQ ID NO: 1755 - DNA, 5770 bp, Homo sapiens
accgcggccgcgcgcccccctctgcccccgctgcccaggattggtaggctccaccgctcggcagccggcttccctgctcggacgccgagcaccgccaaagcgcacttcgattttcagaattcctcctgggaatgctgactccttgcttggtgccctgatgcttctctgagataaactgatgaattggaaccatggtgcaaaagaagaagttctgtcctcggttacttgactatctagtgatcgtaggggccaggcacccgagcagtgatagcgtggcccagactcctgaattgctacggcgataccccttggaggatcacactgagtttcccctgcccccagatgtagtgttcttctgccagcccgagggctgcctgagcgtgcggcagcggcgcatgagccttcgggatgatacctcttttgtcttcaccctcactgacaaggacactggagtcacgcgatatggcatctgtgttaacttctaccgctccttccaaaagcgaatctctaaggagaagggggaaggtggggcagggtcccgtgggaaggaaggaacccatgccacctgtgcctcagaagagggtggcactgagagctcagagagtggctcatccctgcagcctctcagtgctgactctacccctgatgtgaaccagtctcctcggggcaaacgccgggccaaggcggggagccgctcccgcaacagtactctcacgtccctgtgcgtgctcagccactaccctttcttctccaccttccgagagtgtttgtatactctcaagcgcctggtggactgctgtagtgagcgccttctgggcaagaaactgggcatccctcgaggcgtacaaagggacaccatgtggcggatctttactggatcgctgctggtagaggagaagtcaagtgcccttctgcatgaccttcgagagattgaggcctggatctatcgattgctgcgctccccagtacccgtctctgggcagaagcgagtagacatcgaggtcctaccccaagagctccagccagctctgacctttgctcttccagacccatctcgattcaccctagtggatttcccactgcaccttcccttggaacttctaggtgtggacgcctgtctccaggtgctaacctgcattctgttagagcacaaggtggtgctacagtcccgagactacaatgcactctccatgtctgtgatggcattcgtggcaatgatctacccactggagtatatgtttcctgtcatcccgctgctacccacctgcatggcatcagcagagcagctgctgttggctccaaccccgtacatcattggggttcctgccagcttcttcctctacaaactggacttcaaaatgcctgatgatgtatggctagtggatctggacagcaatagggtgattgcccccaccaatgcagaagtgctgcctatcctgccagaaccagaatcactagagctgaaaaagcatttaaagcaggccttggccagcatgagtctcaacacccagcccatcctcaatctggagaaatttcatgagggccaggagatcccccttctcttgggaaggccttctaatgacctgcagtccacaccgtccactgaattcaacccactcatctatggcaatgatgtggattctgtggatgttgcaaccagggttgccatggtacggttcttcaattccgccaacgtgctgcagggatttcagatgcacacgcgtaccctgcgcctctttcctcggcctgtggtagcttttcaagctggctcctttctagcctcacgtccccggcagactccttttgccgagaaattggccaggactcaggctgtggagtactttggggaatggatccttaaccccaccaactatgcctttcagcgaattcacaacaatatgtttgatccagccctgattggtgacaagccaaagtggtatgctcatcagctgcagcctatccactatcgcgtctatgacagcaattcccagctggctgaggccctgagtgtaccaccagagcgggactctgactccgaacctactgatgatagtggcagtgatagtatggattatgacgattcaagctcttcttactcctcccttggtgactttgtcagtgaaatgatgaaatgtgacattaatggtgatactcccaatgtggaccctctgacacatgcagcactgggggatgccagcgaggtggagattgacgagctgcagaatcagaaggaagcagaagagcctggcccagacagtgagaactctcaggaaaaccccccactgcgctccagctctagcaccacagccagcagcagccccagcactgtcatccacggagccaactctgaacctgctgactctacggagatggatgataaggcagcagtaggcgtctccaagcccctcccttccgtgcctcccagcattggcaaatcgaacatggacagacgtcaggcagaaattggagagggggctcaaaagctgctgcggcccaacagcttgagactggcaagtgactcagatgcagagtcagactctcgggcaagctctcccaactccaccgtctccaacaccagcaccgagggcttcgggggcatcatgtcttttgccagcagcctctatcggaaccacagtaccagcttcagtctttcaaacctcacactgcccaccaaaggtgcccgagagaaggccacgcccttccccagtctgaaagtatttgggctaaatactctaatggagattgttactgaagccggccccgggagtggtgaaggaaacaggagggcgttagtggatcagaagtcatctgtcattaaacacagcccaacagtgaaaagagaacctccatcaccccagggtcgatccagcaattctagtgagaaccagcagttcctgaaggaggtggtgcacagcgtgctggacggccagggagttggctggctcaacatgaaaaaggtgcgccggctgctggagagcgagcagctgcgagtctttgtcctgagcaagctgaaccgcatggtgcagtcagaggacgatgcccggcaggacatcatcccggatgtggagatcagtcggaaggtgtacaagggaatgttagacctcctcaagtgtacagtcctcagcttggagcagtcctatgcccacgcgggtctgggtggcatggccagcatctttgggcttttggagattgcccagacccactactatagtaaagaaccagacaagcggaagagaagtccaacagaaagtgtaaataccccagttggcaaggatcctggcctagctgggcggggggacccaaaggctatggcacaactgagagttccacaactgggacctcgggcaccaagtgccacaggaaagggtcctaaggaactggacaccagaagtttaaaggaagaaaattttatagcatctattgggcctgaagtaatcaaacctgtctttgaccttggtgagacagaggagaaaaagtcccagatcagcgcagacagtggtgtgagcctgacgtctagttcccagaggactgatcaagactctgtcatcggcgtgagtccagctgttatgatccgcagctcaagtcaggattctgaagttagcaccgtggtgagtaatagctctggagagacccttggagctgacagtgacttgagcagcaatgcaggtgatggaccaggtggcgagggcagtgttcacctggcaagctctcggggcactttgtctgatagtgaaattgagaccaactctgccacaagcaccatctttggtaaagcccacagcttgaagccaagcataaaggagaagctggcaggcagccccattcgtacttctgaagatgtgagccagcgagtctatctctatgagggactcctaggcaaagagcgttctactttatgggaccaaatgcaattctgggaagatgccttcttagatgctgtgatgttggagagagaagggatgggtatggaccagggtccccaggaaatgatcgacaggtacctgtcccttggagaacatgaccggaagcgcctggaagatgatgaagatcgcttgctggccacacttctgcacaacctcatctcctacatgctgctgatgaaggtaaataagaatgacatccgcaagaaggtgaggcgcctaatgggaaagtcgcacattgggcttgtgtacagccagcaaatcaatgaggtgcttgatcagctggcgaacctgaatggacgcgatctctctatctggtccagtggcagccggcacatgaagaagcagacatttgtggtacatgcagggacagatacaaacggagatatctttttcatggaggtgtgcgatgactgtgtggtgttgcgtagtaacatcggaacagtgtatgagcgctggtggtacgagaagctcatcaacatgacctactgtcccaagacgaaggtgttgtgcttgtggcgtagaaatggctctgagacccagctcaacaagttctatactaaaaagtgtcgggagctgtactactgtgtgaaggacagcatggagcgcgctgccgcccgacagcaaagcatcaaacccggacctgaattgggtggcgagttccctgtgcaggacctgaagactggtgagggtggcctgctgcaggtgaccctggaagggatcaacctcaaattcatgcacaatcaggttttcatagagctgaatcacattaaaaagtgcaatacagttcgaggcgtctttgtcctggaggaatttgttcctgaaattaaagaagtggtgagccacaagtacaagacaccaatggcccacgaaatctgctactccgtattatgtctcttctcgtacgtggctgcagttcatagcagtgaggaagatctcagaaccccgccccggcctgtctctagctgatggagaggggctacgcagctgccccagcccagggcacgcccctggccccttgctgttcccaagtgcacgatgctgctgtgactgaggagtggatgatgctcgtgtgtcctctgcaagccccctgctgtggcttggttggttaccggttatgtgtccctctgagtgtgtcttgagcgtgtccaccttctccctctccactcccagaagaccaaactgccttcccctcagggctcaagaatgtgtacagtctgtggggccggtgtgaacccactattttgtgtccttgagacatttgtgttgtggttccttgtccttgtccctggcgttataactgtccactgcaagagtctggctctcccttctctgtgacccggcatgactgggcgcctggagcagtttcactctgtgaggagtgagggaaccctggggctcaccctctcagaggaagggcacagagaggaagggaagaattggggggcagccggagtgagtggcagcctccctgcttccttctgcattcccaagccggcagctactgcccagggcccgcagtgttggctgctgcctgccacagcctctgtgactgcagtggagcggcgaattccctgtggcctgccacgccttcggcatcagaggatggagtggtcgaggctagtggagtcccagggaccgctggctgctctgcctgagcatcagggagggggcaggaaagaccaagctgggtttgcacatctgtctgcaggctgtctctccaggcacggggtgtcaggagggagagacagcctgggtatgggcaagaaatgactgtaaatatttcagccccacattatttatagaaaatgtacagttgtgtgaatgtgaaataaatgtcctcaactccc

SEQ ID NO: 1756 - protein, 1565 aa, Homo sapiens
MVQKKKFCPRLLDYLVIVGARHPSSDSVAQTPELLRRYPLEDHTEFPLPPDVVFFCQPEGCLSVRQRRMSLRDDTSFVFTLTDKDTGVTRYGICVNFYRSFQKRISKEKGEGGAGSRGKEGTHATCASEEGGTESSESGSSLQPLSADSTPDVNQSPRGKRRAKAGSRSRNSTLTSLCVLSHYPFFSTFRECLYTLKRLVDCCSERLLGKKLGIPRGVQRDTMWRIFTGSLLVEEKSSALLHDLREIEAWIYRLLRSPVPVSGQKRVDIEVLPQELQPALTFALPDPSRFTLVDFPLHLPLELLGVDACLQVLTCILLEHKVVLQSRDYNALSMSVMAFVAMIYPLEYMFPVIPLLPTCMASAEQLLLAPTPYIIGVPASFFLYKLDFKMPDDVWLVDLDSNRVIAPTNAEVLPILPEPESLELKKHLKQALASMSLNTQPILNLEKFHEGQEIPLLLGRPSNDLQSTPSTEFNPLIYGNDVDSVDVATRVAMVRFFNSANVLQGFQMHTRTLRLFPRPVVAFQAGSFLASRPRQTPFAEKLARTQAVEYFGEWILNPTNYAFQRIHNNMFDPALIGDKPKWYAHQLQPIHYRVYDSNSQLAEALSVPPERDSDSEPTDDSGSDSMDYDDSSSSYSSLGDFVSEMMKCDINGDTPNVDPLTHAALGDASEVEIDELQNQKEAEEPGPDSENSQENPPLRSSSSTTASSSPSTVIHGANSEPADSTEMDDKAAVGVSKPLPSVPPSIGKSNMDRRQAEIGEGAQKLLRPNSLRLASDSDAESDSRASSPNSTVSNTSTEGFGGIMSFASSLYRNHSTSFSLSNLTLPTKGAREKATPFPSLKVFGLNTLMEIVTEAGPGSGEGNRRALVDQKSSVIKHSPTVKREPPSPQGRSSNSSENQQFLKEVVHSVLDGQGVGWLNMKKVRRLLESEQLRVFVLSKLNRMVQSEDDARQDIIPDVEISRKVYKGMLDLLKCTVLSLEQSYAHAGLGGMASIFGLLEIAQTHYYSKEPDKRKRSPTESVNTPVGKDPGLAGRGDPKAMAQLRVPQLGPRAPSATGKGPKELDTRSLKEENFIASIGPEVIKPVFDLGETEEKKSQISADSGVSLTSSSQRTDQDSVIGVSPAVMIRSSSQDSEVSTVVSNSSGETLGADSDLSSNAGDGPGGEGSVHLASSRGTLSDSEIETNSATSTIFGKAHSLKPSIKEKLAGSPIRTSEDVSQRVYLYEGLLGKERSTLWDQMQFWEDAFLDAVMLEREGMGMDQGPQEMIDRYLSLGEHDRKRLEDDEDRLLATLLHNLISYMLLMKVNKNDIRKKVRRLMGKSHIGLVYSQQINEVLDQLANLNGRDLSIWSSGSRHMKKQTFVVHAGTDTNGDIFFMEVCDDCVVLRSNIGTVYERWWYEKLINMTYCPKTKVLCLWRRNGSETQLNKFYTKKCRELYYCVKDSMERAAARQQSIKPGPELGGEFPVQDLKTGEGGLLQVTLEGINLKFMHNQVFIELNHIKKCNTVRGVFVLEEFVPEIKEVVSHKYKTPMAHEICYSVLCLFSYVAAVHSSEEDLRTPPRPVSS

SEQ ID NO: 1757 - DNA, 5710 bp, Homo sapiens
accgcggccgcgcgcccccctctgcccccgctgcccaggattggtaggctccaccgctcggcagccggcttccctgctcggacgccgagcaccgccaaagcgcacttcgattttcagaattcctcctgggaatgctgactccttgcttggtgccctgatgcttctctgagataaactgatgaattggaaccatggtgcaaaagaagaagttctgtcctcggttacttgactatctagtgatcgtaggggccaggcacccgagcagtgatagcgtggcccagactcctgaattgctacggcgataccccttggaggatcacactgagtttcccctgcccccagatgtagtgttcttctgccagcccgagggctgcctgagcgtgcggcagcggcgcatgagccttcgggatgatacctcttttgtcttcaccctcactgacaaggacactggagtcacgcgatatggcatctgtgttaacttctaccgctccttccaaaagcgaatctctaaggagaagggggaaggtggggcagggtcccgtgggaaggaaggaacccatgccacctgtgcctcagaagagggtggcactgagagctcagagagtggctcatccctgcagcctctcagtgctgactctacccctgatgtgaaccagtctcctcggggcaaacgccgggccaaggcggggagccgctcccgcaacagtactctcacgtccctgtgcgtgctcagccactaccctttcttctccaccttccgagagtgtttgtatactctcaagcgcctggtggactgctgtagtgagcgccttctgggcaagaaactgggcatccctcgaggcgtacaaagggacaccatgtggcggatctttactggatcgctgctggtagaggagaagtcaagtgcccttctgcatgaccttcgagagattgaggcctggatctatcgattgctgcgctccccagtacccgtctctgggcagaagcgagtagacatcgaggtcctaccccaagagctccagccagctctgacctttgctcttccagacccatctcgattcaccctagtggatttcccactgcaccttcccttggaacttctaggtgtggacgcctgtctccaggtgctaacctgcattctgttagagcacaaggtggtgctacagtcccgagactacaatgcactctccatgtctgtgatggcattcgtggcaatgatctacccactggagtatatgtttcctgtcatcccgctgctacccacctgcatggcatcagcagagcagctgctgttggctccaaccccgtacatcattggggttcctgccagcttcttcctctacaaactggacttcaaaatgcctgatgatgtatggctagtggatctggacagcaatagggtgattgcccccaccaatgcagaagtgctgcctatcctgccagaaccagaatcactagagctgaaaaagcatttaaagcaggccttggccagcatgagtctcaacacccagcccatcctcaatctggagaaatttcatgagggccaggagatcccccttctcttgggaaggccttctaatgacctgcagtccacaccgtccactgaattcaacccactcatctatggcaatgatgtggattctgtggatgttgcaaccagggttgccatggtacggttcttcaattccgccaacgtgctgcagggatttcagatgcacacgcgtaccctgcgcctctttcctcggcctgtggtagcttttcaagctggctcctttctagcctcacgtccccggcagactccttttgccgagaaattggccaggactcaggctgtggagtactttggggaatggatccttaaccccaccaactatgcctttcagcgaattcacaacaatatgtttgatccagccctgattggtgacaagccaaagtggtatgctcatcagctgcagcctatccactatcgcgtctatgacagcaattcccagctggctgaggccctgagtgtaccaccagagcgggactctgactccgaacctactgatgatagtggcagtgatagtatggattatgacgattcaagctcttcttactcctcccttggtgactttgtcagtgaaatgatgaaatgtgacattaatggtgatactcccaatgtggaccctctgacacatgcagcactgggggatgccagcgaggtggagattgacgagctgcagaatcagaaggaagcagaagagcctggcccagacagtgagaactctcaggaaaaccccccactgcgctccagctctagcaccacagccagcagcagccccagcactgtcatccacggagccaactctgaacctgctgactctacggagatggatgataaggcagcagtaggcgtctccaagcccctcccttccgtgcctcccagcattggcaaatcgaacatggacagacgtcaggcagaaattggagagggggctcaaaagctgctgcggcccaacagcttgagactggcaagtgactcagatgcagagtcagactctcgggcaagctctcccaactccaccgtctccaacaccagcaccgagggcttcgggggcatcatgtcttttgccagcagcctctatcggaaccacagtaccagcttcagtctttcaaacctcacactgcccaccaaaggtgcccgagagaaggccacgcccttccccagtctgaaaggaaacaggagggcgttagtggatcagaagtcatctgtcattaaacacagcccaacagtgaaaagagaacctccatcaccccagggtcgatccagcaattctagtgagaaccagcagttcctgaaggaggtggtgcacagcgtgctggacggccagggagttggctggctcaacatgaaaaaggtgcgccggctgctggagagcgagcagctgcgagtctttgtcctgagcaagctgaaccgcatggtgcagtcagaggacgatgcccggcaggacatcatcccggatgtggagatcagtcggaaggtgtacaagggaatgttagacctcctcaagtgtacagtcctcagcttggagcagtcctatgcccacgcgggtctgggtggcatggccagcatctttgggcttttggagattgcccagacccactactatagtaaagaaccagacaagcggaagagaagtccaacagaaagtgtaaataccccagttggcaaggatcctggcctagctgggcggggggacccaaaggctatggcacaactgagagttccacaactgggacctcgggcaccaagtgccacaggaaagggtcctaaggaactggacaccagaagtttaaaggaagaaaattttatagcatctattgggcctgaagtaatcaaacctgtctttgaccttggtgagacagaggagaaaaagtcccagatcagcgcagacagtggtgtgagcctgacgtctagttcccagaggactgatcaagactctgtcatcggcgtgagtccagctgttatgatccgcagctcaagtcaggattctgaagttagcaccgtggtgagtaatagctctggagagacccttggagctgacagtgacttgagcagcaatgcaggtgatggaccaggtggcgagggcagtgttcacctggcaagctctcggggcactttgtctgatagtgaaattgagaccaactctgccacaagcaccatctttggtaaagcccacagcttgaagccaagcataaaggagaagctggcaggcagccccattcgtacttctgaagatgtgagccagcgagtctatctctatgagggactcctaggcaaagagcgttctactttatgggaccaaatgcaattctgggaagatgccttcttagatgctgtgatgttggagagagaagggatgggtatggaccagggtccccaggaaatgatcgacaggtacctgtcccttggagaacatgaccggaagcgcctggaagatgatgaagatcgcttgctggccacacttctgcacaacctcatctcctacatgctgctgatgaaggtaaataagaatgacatccgcaagaaggtgaggcgcctaatgggaaagtcgcacattgggcttgtgtacagccagcaaatcaatgaggtgcttgatcagctggcgaacctgaatggacgcgatctctctatctggtccagtggcagccggcacatgaagaagcagacatttgtggtacatgcagggacagatacaaacggagatatctttttcatggaggtgtgcgatgactgtgtggtgttgcgtagtaacatcggaacagtgtatgagcgctggtggtacgagaagctcatcaacatgacctactgtcccaagacgaaggtgttgtgcttgtggcgtagaaatggctctgagacccagctcaacaagttctatactaaaaagtgtcgggagctgtactactgtgtgaaggacagcatggagcgcgctgccgcccgacagcaaagcatcaaacccggacctgaattgggtggcgagttccctgtgcaggacctgaagactggtgagggtggcctgctgcaggtgaccctggaagggatcaacctcaaattcatgcacaatcaggttttcatagagctgaatcacattaaaaagtgcaatacagttcgaggcgtctttgtcctggaggaatttgttcctgaaattaaagaagtggtgagccacaagtacaagacaccaatggcccacgaaatctgctactccgtattatgtctcttctcgtacgtggctgcagttcatagcagtgaggaagatctcagaaccccgccccggcctgtctctagctgatggagaggggctacgcagctgccccagcccagggcacgcccctggccccttgctgttcccaagtgcacgatgctgctgtgactgaggagtggatgatgctcgtgtgtcctctgcaagccccctgctgtggcttggttggttaccggttatgtgtccctctgagtgtgtcttgagcgtgtccaccttctccctctccactcccagaagaccaaactgccttcccctcagggctcaagaatgtgtacagtctgtggggccggtgtgaacccactattttgtgtccttgagacatttgtgttgtggttccttgtccttgtccctggcgttataactgtccactgcaagagtctggctctcccttctctgtgacccggcatgactgggcgcctggagcagtttcactctgtgaggagtgagggaaccctggggctcaccctctcagaggaagggcacagagaggaagggaagaattggggggcagccggagtgagtggcagcctccctgcttccttctgcattcccaagccggcagctactgcccagggcccgcagtgttggctgctgcctgccacagcctctgtgactgcagtggagcggcgaattccctgtggcctgccacgccttcggcatcagaggatggagtggtcgaggctagtggagtcccagggaccgctggctgctctgcctgagcatcagggagggggcaggaaagaccaagctgggtttgcacatctgtctgcaggctgtctctccaggcacggggtgtcaggagggagagacagcctgggtatgggcaagaaatgactgtaaatatttcagccccacattatttatagaaaatgtacagttgtgtgaatgtgaaataaatgtcctcaactccc

SEQ ID NO: 1758 - protein, 1545 aa, Homo sapiens
MVQKKKFCPRLLDYLVIVGARHPSSDSVAQTPELLRRYPLEDHTEFPLPPDVVFFCQPEGCLSVRQRRMSLRDDTSFVFTLTDKDTGVTRYGICVNFYRSFQKRISKEKGEGGAGSRGKEGTHATCASEEGGTESSESGSSLQPLSADSTPDVNQSPRGKRRAKAGSRSRNSTLTSLCVLSHYPFFSTFRECLYTLKRLVDCCSERLLGKKLGIPRGVQRDTMWRIFTGSLLVEEKSSALLHDLREIEAWIYRLLRSPVPVSGQKRVDIEVLPQELQPALTFALPDPSRFTLVDFPLHLPLELLGVDACLQVLTCILLEHKVVLQSRDYNALSMSVMAFVAMIYPLEYMFPVIPLLPTCMASAEQLLLAPTPYIIGVPASFFLYKLDFKMPDDVWLVDLDSNRVIAPTNAEVLPILPEPESLELKKHLKQALASMSLNTQPILNLEKFHEGQEIPLLLGRPSNDLQSTPSTEFNPLIYGNDVDSVDVATRVAMVRFFNSANVLQGFQMHTRTLRLFPRPVVAFQAGSFLASRPRQTPFAEKLARTQAVEYFGEWILNPTNYAFQRIHNNMFDPALIGDKPKWYAHQLQPIHYRVYDSNSQLAEALSVPPERDSDSEPTDDSGSDSMDYDDSSSSYSSLGDFVSEMMKCDINGDTPNVDPLTHAALGDASEVEIDELQNQKEAEEPGPDSENSQENPPLRSSSSTTASSSPSTVIHGANSEPADSTEMDDKAAVGVSKPLPSVPPSIGKSNMDRRQAEIGEGAQKLLRPNSLRLASDSDAESDSRASSPNSTVSNTSTEGFGGIMSFASSLYRNHSTSFSLSNLTLPTKGAREKATPFPSLKGNRRALVDQKSSVIKHSPTVKREPPSPQGRSSNSSENQQFLKEVVHSVLDGQGVGWLNMKKVRRLLESEQLRVFVLSKLNRMVQSEDDARQDIIPDVEISRKVYKGMLDLLKCTVLSLEQSYAHAGLGGMASIFGLLEIAQTHYYSKEPDKRKRSPTESVNTPVGKDPGLAGRGDPKAMAQLRVPQLGPRAPSATGKGPKELDTRSLKEENFIASIGPEVIKPVFDLGETEEKKSQISADSGVSLTSSSQRTDQDSVIGVSPAVMIRSSSQDSEVSTVVSNSSGETLGADSDLSSNAGDGPGGEGSVHLASSRGTLSDSEIETNSATSTIFGKAHSLKPSIKEKLAGSPIRTSEDVSQRVYLYEGLLGKERSTLWDQMQFWEDAFLDAVMLEREGMGMDQGPQEMIDRYLSLGEHDRKRLEDDEDRLLATLLHNLISYMLLMKVNKNDIRKKVRRLMGKSHIGLVYSQQINEVLDQLANLNGRDLSIWSSGSRHMKKQTFVVHAGTDTNGDIFFMEVCDDCVVLRSNIGTVYERWWYEKLINMTYCPKTKVLCLWRRNGSETQLNKFYTKKCRELYYCVKDSMERAAARQQSIKPGPELGGEFPVQDLKTGEGGLLQVTLEGINLKFMHNQVFIELNHIKKCNTVRGVFVLEEFVPEIKEVVSHKYKTPMAHEICYSVLCLFSYVAAVHSSEEDLRTPPRPVSS

SEQ ID NO: 1759 - DNA, 1477 bp, Homo sapiens
cctcgtgccagtgactgagaccagagatggcaaatgaatggcacaccatttctccttctcctgccccagggcaggtaccactgatctgcatcagagttgcctgctattctctggtgtatccttcacatctaggtgccctcaagcagctgtgtgagtgttgagatctctgccatctctggctgagatactgctgtcctgtgaagtgtttcccatgacctttttcttcccctttgaatccctctgtctggagtagtccttgcctcttcctgctccagtagggccttttccctaccccagcccctgtgccaggctaagctggtacaagagctgccaacctcacagagtgtttgctaggcgagagaggtgcagggaagaggcagaggtatgcaccttcccccttgaagagaggggaaaggcctacagtggcccacataattgcctgactcacacttcagctacctcttaatgcctgtggagggactggagctgctggatcccagtgtggtggtgtaggaggccacagtgagcaggtggccccagctgggtttcccaggtcaggaatgtgggccccaggcaaggtgcagcctttgctcacagctccatccatgtctagaccttcaggccagtctgcagatgaggttccctacctttttcttctcttcattgaccaaatcaaccaatcactacagctgctctgcttctgctttccaaagtagcccaggtcctgggccagatgcaggggaggtgcctatccatgagtgaaggccagtgtcttcctcacctgggtgggtcccacacttgtgacctcagttttaggaccaagatctgtgttggtttcttagattgctagcttttcctccaggggaccacagcaggtgaagctcaagagcgcatggctctgctaatagtaaattgttttcagggccttgtccagctgagagcttcatgtccaccagattctgagaggtgtcagcagcacttttttttttatttgttgtttgttttccatgaggttatcggaccatgggctgagctcaggcactttctgtaggagactgttatttctgtaaagatggttatttaaccctcctccaccccatcacggtggccctgagggctgacccggaggccagtggagctgcctggtgtccacgggggagggccaaggcctgctgagctgattctccagctgctgccccagcctttccgccttgcacagcacagaggtggtcaccccagggacagccaggcacctgctcctcttgcccttcctgggggaagggagctgccttctgtccctgtaactgctttccttatggcccagcccggccactcagacttgtttgaagctgcactggcagcttttttgtctcctttgggtattcacaacagccagggacttgattttgatgtattttaaaccacattaaataaagagtctgttgccttaaaaaaaaaaaaaaaaaaaaaaaaaaaa

SEQ ID NO: 1760 - DNA, 1892 bp, Homo sapiens
agggtacgggccgggaccgccgcagcccggggcgggggcacggcaaccgcgaggcctgggggcgcccgccccccgcgccccacgcccggtgccagcgagccgaggcgtgcatctccttatatggtcaaatgacacggcggggtttctcgagggcgggagctgcgcagcgctccactcggccggcagcggagccgcagccaccagccgcccgcgccctccagccccgtccgggagtccccggcccgctgcggtgccgtgagtacctccaaccccctgcgccccggagggaggccgaggggcttagccaccagggctcggaagtgggggccgaatccggtgcgagacccaaggagaggggagcagagccggagttggggagactgtggctgaaaactgtgtcttcctggagactaggctggcattttgactttgggacggagtctcgctttgtcgcccaggctggagtgcagtggcacgatctcagctcactgcaagctctacctcttggttcacgccattctcctgccccagcctcccaagtagctgggactacaggttgctgaaaagccaggagtcaaaatgactgagcgctttgactgccaccattgcaacgaatctctctttggcaagaagtacatcctgcgggaggagagcccctactgcgtggtgtgctttgagaccctgttcgccaacacctgcgaggagtgtgggaagcccatcggctgtgactgcaaggacttgtcttacaaggaccggcactggcatgaagcctgtttccactgctcgcagtgcagaaactcactggtggacaagccctttgctgccaaggaggaccagctgctctgtacagactgctattccaacgagtactcatccaagtgccaggaatgcaagaagaccatcatgccaggtacccgcaagatggagtacaagggcagcagctggcatgagacctgcttcatctgccaccgctgccagcagccaattggaaccaagagtttcatccccaaagacaatcagaatttctgtgtgccctgctatgagaaacaacatgccatgcagtgcgttcagtgcaaaaagcccatcaccacgggaggggtcacttaccgggagcagccctggcacaaggagtgcttcgtgtgcaccgcctgcaggaagcagctgtctgggcagcgcttcacagctcgcgatgactttgcctactgcctgaactgcttctgtgacttgtatgccaagaagtgtgctgggtgcaccaaccccatcagcggacttggtggcacaaaatacatctcctttgaggaacggcagtggcataacgactgctttaactgtaagaagtgctccctctcactggtggggcgtggcttcctcacagagagggacgacatcctgtgccccgactgtgggaaagacatctgaattcaacacagagaagttgctgcttgtgatctcacacacagatttttatgttttctttctcacccaggcaatcttgccttctggtttcttccagccacattgagactttcttctagtgcttttcagtgatactcacgtttgcttaaaccctttagtgctttgtgatagttcagtcccagggaaagagaaaactcgccctaggccctaggtgggaagatggtttgaaatttttgtaatcgagtaaggcacacccaaatgtaaaaatccttttgaatgatgcctttataaatctttctctcactgtctatttaagtgcaattaacatatgtcacgaacttgaaagttttctaaactcaataaggtaatgaccagttgttatttacagctctgtaacctcccgttgcgtcaagtctaaaccaagattatgtgacttgcaataaagttattcagaacagaaaaaaaaaaaaaaaaaa

SEQ ID NO: 1761 - protein, 279 aa, Homo sapiens
MTERFDCHHCNESLFGKKYILREESPYCVVCFETLFANTCEECGKPIGCDCKDLSYKDRHWHEACFHCSQCRNSLVDKPFAAKEDQLLCTDCYSNEYSSKCQECKKTIMPGTRKMEYKGSSWHETCFICHRCQQPIGTKSFIPKDNQNFCVPCYEKQHAMQCVQCKKPITTGGVTYREQPWHKECFVCTACRKQLSGQRFTARDDFAYCLNCFCDLYAKKCAGCTNPISGLGGTKYISFEERQWHNDCFNCKKCSLSLVGRGFLTERDDILCPDCGKDI

SEQ ID NO: 1762 - DNA, 4119 bp, Homo sapiens
gaattccgttgctgtcgcacacacacacacacacacacacacaccccaacacacacacacacaccccaacacacacacacacacacacacacacacacacacacacacacacacagcgggatggccgagcgccgcacgcgtagcacgccgggactagctatccagcctcccagcagcctctgcgacgggcgcggtgcgtaagtacctcgccggtggtggccgttctccgtaagatggcggaccggcggcggcagcgcgcttcgcaagacaccgaggacgaggaatctggtgcttcgggctccgacagcggcggctccccgttgcggggaggcgggagctgcagcggtagcgccggaggcggcggcagcggctctctgccttcacagcgcggaggccgaaccggggcccttcatctgcggcgggtggagagcgggggcgccaagagtgctgaggagtcggagtgtgagagtgaagatggcattgaaggtgatgctgttctctcggattatgaaagtgcagaagactcggaaggtgaagaaggtgaatacagtgaagaggaaaactccaaagtggagctgaaatcagaagctaatgatgctgttaattcttcaacaaaagaagagaagggagaagaaaagcctgacaccaaaagcactgtgactggagagaggcaaagtggggacggacaggagagcacagagcctgtggagaacaaagtgggtaaaaagggccctaagcatttggatgatgatgaagatcggaagaatccagcatacatacctcggaaagggctcttctttgagcatgatcttcgagggcaaactcaggaggaggaagtcagacccaaggggcgtcagcgaaagctatggaaggatgagggtcgctgggagcatgacaagttccgggaagatgagcaggccccaaagtcccgacaggagctcattgctctttatggttatgacattcgctcagctcataatcctgatgacatcaaacctcgaagaatccggaaaccccgatatgggagtcctccacaaagagatccaaactggaacggtgagcggctaaacaagtctcatcgccaccagggtcttgggggcaccctaccaccaaggacatttattaacaggaatgctgcaggtaccggccgtatgtctgcacccaggaattattctcgatctgggggcttcaaggaaggtcgtgctggttttaggcctgtggaagctggtgggcagcatggtggccggtctggtgagactgttaagcatgagattagttaccggtcacggcgcctagagcagacttctgtgagggatccatctccagaagcagatgctccagtgcttggcagtcctgagaaggaagaggcagcctcagagccaccagctgctgctcctgatgctgcaccaccaccccctgataggcccattgagaagaaatcctattcccgggcaagaagaactcgaaccaaagttggagatgcagtcaagcttgcagaggaggtgccccctcctcctgaaggactgattccagcacctccagtcccagaaaccaccccaactccacctactaagactgggacctgggaagctccggtggattctagtacaagtggacttgagcaagatgtggcacaactaaatatagcagaacagaattggagtccggggcagccttctttcctgcaaccacgggaacttcgaggtatgcccaaccatatacacatgggagcaggacctccacctcagtttaaccggatggaagaaatgggtgtccagggtggtcgagccaaacgctattcatcccagcggcaaagacctgtgccagagccccccgcccctccagtgcatatcagtatcatggagggacattactatgatccactgcagttccagggaccaatctatacccatggtgacagccctgccccgctgcctccacagggcatgcttgtgcagccaggaatgaaccttccccacccaggtttacatccccaccagacaccagctcctctgcccaatccaggcctctatcccccaccagtgtccatgtctccaggacagccaccacctcagcagttgcttgctcctacttacttttctgctccaggcgtcatgaactttggtaatcccagttacccttatgctccaggggcactgcctcccccaccaccgcctcatctgtatcctaatacacaggccccatcacaggtatatggaggagtgacctactataaccccgcccagcagcaggtgcagccaaagccctccccaccccggaggactccccagccagtcaccatcaagccccctccacctgaggttgtaagcaggggttccagttaatacaagtttctgaatattttaaatcttaacatcatataaaaagcagcagaggtgagaactcagaagagaaatacagctggctatctactaccagaagggcttcaaagatatagggtgtggctcctaccagcaaacagctgaaagaggaggacccctgccttcctctgaggacaggctctagagagagggagaaacaagtggacctcgtcccatcttcactcttcacttgagttggctgtgttcgggggagcagagagagccagacagccccaagcttctgagtctagatacagaagcccatgtcttctgctgttcttcacttctgggaaattgaagtgtcttctgttcccaaggaagctccttcctgtttgttttgttttctaagatgttcatttttaaagcctggcttcttatccttaatattattttaattttttctctttgtttctgtttcttgctctctctccctgcctttaaatgaaacaagtctagtcttctggttttctagcccctctggattcccttttgactcttccgtgcatcccagataatggagaatgtatcagccagccttccccaccaagtctaaaaagacctggcctttcacttttagttggcatttgttatcctcttgtatacttgtattcccttaactctaaccctgtggaagcatggctgtctgcacagagggtcccattgtgcagaaaagctcagagtaggtgggtaggagcccttctctttgacttaggtttttaggagtctgagcatccatcaatacctgtactatgatgggcttctgttctctgctgagggccaataccctactgtggggagagatggcacaccagatgcttttgtgagaaagggatggtggagtgagagcctttgcctttaggggtgtgtattcacatagtcctcagggctcagtcttttgaggtaagtggaattagagggccttgcttctcttctttccattcttcttgctacaccccttttccagttgctgtggaccaatgcatctctttaaaggcaaatattatccagcaagcagtctaccctgtcctttgcaattgctcttctccacgtctttcctgctacaagtgttttagatgttactaccttattttccccgaattctatttttgtccttgcagacagaatataaaaactcctgggcttaaggcctaaggaagccagtcaccttctgggcaagggctcctatctttcctccctatccatggcactaaaccacttctctgctgcctctgtggaagagattcctattactgcagtacatacgtctgccaggggtaacctggccactgtccctgtccttctacagaacctgagggcaaagatggtggctgtgtctctccccggtaatgtcactgtttttattccttccatctagcagctggcctaatcactctgagtcacaggtgtgggatggagagtggggagaggcacttaatctgtaacccccaaggaggaaataactaagagattcttctaggggtagctggtggttgtgccttttgtaggctgttccctttgccttaaacctgaagatgtctcctcaagcctgtgggcagcatgcccagattcccagaccttaagacactgtgagagttgtctctgttggtccactgtgtttagttgcaaggatttttccatgtgtggtggtgttttttgttactgttttaaagggtgcccatttgtgatcagcattgtgacttggagataataaaatttagactataaacttgaaaaaaaa

SEQ ID NO: 1763 - protein, 703 aa, Homo sapiens
MADRRRQRASQDTEDEESGASGSDSGGSPLRGGGSCSGSAGGGGSGSLPSQRGGRTGALHLRRVESGGAKSAEESECESEDGIEGDAVLSDYESAEDSEGEEGEYSEEENSKVELKSEANDAVNSSTKEEKGEEKPDTKSTVTGERQSGDGQESTEPVENKVGKKGPKHLDDDEDRKNPAYIPRKGLFFEHDLRGQTQEEEVRPKGRQRKLWKDEGRWEHDKFREDEQAPKSRQELIALYGYDIRSAHNPDDIKPRRIRKPRYGSPPQRDPNWNGERLNKSHRHQGLGGTLPPRTFINRNAAGTGRMSAPRNYSRSGGFKEGRAGFRPVEAGGQHGGRSGETVKHEISYRSRRLEQTSVRDPSPEADAPVLGSPEKEEAASEPPAAAPDAAPPPPDRPIEKKSYSRARRTRTKVGDAVKLAEEVPPPPEGLIPAPPVPETTPTPPTKTGTWEAPVDSSTSGLEQDVAQLNIAEQNWSPGQPSFLQPRELRGMPNHIHMGAGPPPQFNRMEEMGVQGGRAKRYSSQRQRPVPEPPAPPVHISIMEGHYYDPLQFQGPIYTHGDSPAPLPPQGMLVQPGMNLPHPGLHPHQTPAPLPNPGLYPPPVSMSPGQPPPQQLLAPTYFSAPGVMNFGNPSYPYAPGALPPPPPPHLYPNTQAPSQVYGGVTYYNPAQQQVQPKPSPPRRTPQPVTIKPPPPEVVSRGSS

SEQ ID NO: 1764 - DNA, 678 bp, Homo sapiens
  misc_feature (564)..(564): n is a, c, g, or t
  misc_feature (617)..(617): n is a, c, g, or t
  misc_feature (658)..(658): n is a, c, g, or t
  misc_feature (664)..(664): n is a, c, g, or t
ttttgccaatcaaagcacacaactttattgatgatacacacagatgcggacttgggtggaagaggttaagtcggtacaatagacagaagagcagtgcacttttttgatgaataggttcactatccatcaggcgcgtgtagaagaaagagcaaacgaaaaataattcaacctaagctgcaacaaatgcattttcagctcaagccgcgatatgcctctggtctctgcaaagcggtcccgcttggacagggagaccaccacaggcaacaatagcactcgtgatgctgtaatttgatgttctttgtccacagcaggcagctgaagtgatcccctcaccacatgaaggaggctgcaagggaggaatttacaatgccaacattgcctgcagactgcacaaccaagaagttactcaaagctctgtgggagcccctgcctggccaataagagtgtggtcctggattgagccctggaactttcacccaatgaggtggtgattggctaaggctggatcttcagtagcaccctctgcagattctttgacatctgcaaaccaagcgcgtttgggtngattccgtccattgtgtcgagaggccgtttatgggcagggttccaggagaacntctgttccattctgtaaggggcatgatgagaggcactggcncgctantcccgcaagatggt

SEQ ID NO: 1765 - DNA, 1305 bp, Homo sapiens
cctgagggtgcgactccgccgcgatggtgacccggttcctgggcccacgctaccgggagctggtcaagaactgggtcccgacggcctacacatggggcgctgtgggcgccgtggggctggtgtgggccaccgattggcggctgatcctggactgggtaccttacatcaatggcaagtttaagaaggataattaattacacaaacccttcacagactgctctggtgcctggtggtgctagctcctcccacctcagcacctgctgcatctggagcagcccaagcctcaggatggacaagaggaaacccacagctcagcttcaggcttcttatgtttctgaaaacagcttggatattttaatgcacgttgcattaaacctcactgaaacctgctccgtgcccggatgttgatcatgctggtggcttggttactgtgactgtagctggagtggcacaggtgacccaggcgtcctttcagctccagaatgttgcaagtctaggagagtgttccaatggctgacagaaactgcctatttgaaatggctcataagtagtatctgcagtgtgttcatccgttgctgccttaacaagtcacccacacgtagtggcttaaagcaacgaacattcactctctcacagtctgtgtcagtcggggatttgggagtgatgtatctgggtggttgtggcccagagtctctcatgaggttgcagttaagacatcagccaaggccacttcgtctgaggaaggctcaactggggctggagccacttccaagccagtgccctcacgtggctgtcggtgacagccacagttccttcccatgggggcccctacacgaagctgcttgagcatcctcacggcatggcctctgccttccccagagcaggtgaaccaagggagaggaaggagcaagccacagtgcttctatgagccaccctgagaagtctcacgtgatcacttccgccacagcctgtttatcaaaagcaagccccccaggcccagcccacgtgcagagggaggagaatgaggttctgtgttttgaagggaagaatatcagaattggtagacatttcaaactgtcacattagggatacaaaaatgaacaggctgggagtggtggctcagcctacaatcccaacactttgggaggctgaggaaggggcatcacttgaaccaggagttcagtactaacctgggcaacaaagaggcccctgtctctgataaaaagaaaaaaaatgaaaaaataaaaatgaacaggtataaaaagaaaaaaaaaaaaaaaaaaaaaaaaaaaaaaaaaaaaaaaa

SEQ ID NO: 1766 - protein, 56 aa, Homo sapiens
MVTRFLGPRYRELVKNWVPTAYTWGAVGAVGLVWATDWRLILDWVPYINGKFKKDN

SEQ ID NO: 1767 - DNA, 2890 bp, Homo sapiens
ggcgctggctggcaggtgtcgctaaccggacggtggtcgccagggcgagaggcgggagccggagaggtgaggcaggacccgggctccactgccgcctctccgagctcttgtgacgcggacctcagtgccaggatggctcggggcgagcggcggcgccgcgcagtgccggcagagggagtgcggacagccgagagggcggctcggggaggccccgggcgacgggacggccggggcggcgggccgcgtagcacggctggaggagtggctctggccgtcgtggtcctgtctttggccctgggtatgtcggggcgctgggtgctggcgtggtaccgtgcgcggcgggcggtcacgctgcactccgcgcctcctgtgttgcctgccgactcctccagccccgccgtggccccggacctcttctggggaacctaccgccctcacgtctacttcggcatgaagacccgcagcccgaaacccctcctcaccggactgatgtgggcgcagcagggcaccaccccggggactcctaagctcaggcacacgtgtgagcagggggacggtgtgggtccctatggctgggagttccacgacggcctctccttcgggcgccaacacatccaggatggggccttaaggctcaccactgagttcgtcaagaggcctgggggtcagcacggaggggactggagctggagagtgactgtagagcctcaggactcaggtacttctgccctccctttggtctccctgttcttctatgtggtgacagatggcaaggaagtcctactaccagaggttggggccaaggggcagttgaagtttatcagtgggcacaccagtcaacttggtaacttccgctttacacttttgccaccaaccagtccaggggatacagcccccaagtatggcagctacaatgtcttctggacctccaacccaggactgcccctgctgacagagatggtaaagagtcgcctaaatagctggtttcagcatcggcccccaggggcctcccctgaacgctacctcggcttgccaggatccctgaagtgggaggacagaggtccaagtgggcaagggcaggggcagttcttgatacagcaggtgaccctgaaaattccattttccatagagtttgtgtttgaatcaggcagtgcccaggcaggaggaaatcaagccctgccaagactggcaggcagtctactgacccaggccctggagagccatgctgaaggctttagagagcgctttgagaagaccttccagctgaaggagaagggcctgagctctggcgagcaggctttgggtcaggctgccctcagcggcctccttggtggaattggctacttctacggacaagggctggtattgccagacatcggggtggaagggtctgagcagaaggtggacccagccctctttccacccgtacctctttttacagcagtgccctcccggtcattcttcccacgaggcttcctttgggatgaaggctttcaccagctggtggttcagcggtgggatccctccctcacccgggaagcccttggccactggctggggctgctaaatgctgatggctggattgggagggagcagatactgggggatgaggcccgagcccgggtgcctccagaattcctagtacaacgagcagtccacgccaaccccccaaccctacttttgcctgtagcccatatgctagaggttggtgaccctgacgacttggctttcctccgaaaggccttgccccgcctgcatgcctggttttcctggctccatcagagccaggcaggcccactgccactatcttaccgctggcggggacgggaccctgccttaccaaccttactgaaccccaagaccctaccctctgggctggatgactacccccgggcttcacacccttcagtaaccgagcggcacctggacctgcgatgttgggtgggactgggtgcccgtgtgctgacgcggctggcagagcatctgggtgaggctgaggtagctgctgagctgggcccactggctgcctcactggaggcagcagagagcctggatgagctgcactgggccccagagctaggagtctttgcagactttgggaaccacacaaaagcagtacagctgaagcccaggccccctcaggggctcgttcgggtggtgggtcggccccaacctcaactgcagtatgtagatgctcttggctatgtcagtctttttcccttgctgctgcgactgctggaccccacctcatcccgccttgggcccctgctggacattctagccgacagccgccatctctggagcccctttggtttacgctcccttgcagcctccagctccttttatggccagcgcaattcagagcatgatcccccctactggcggggtgctgtgtggctcaatgtcaactacctggctttgggagcactccaccactatgggcatctggagggtcctcaccaggctcgggctgccaaactccacggtgagctccgtgccaacgtggtaggcaatgtatggcgccagtaccaggccacaggctttctttgggagcagtacagtgaccgcgatgggcgaggcatgtgccgccctttccacggctggaccagccttgtcttactggccatggctgaagactactgaagggagggagaggaggggagccaagacactcatgccactctggctctgaaggacaagggacaaaggcttctggcttttgcccccagccccttggataccagtaattcaaaccttcctcattcattctcaggtgtctccttgctgtcatcccacatagccctggggtgaatgtgaatccagagtctatttttctaaataaattggaaaaaacaaaaaaaaaaaaaaaaaaaaaaaaaaaaaaaaaaaa

SEQ ID NO: 1768 - protein, 836 aa, Homo sapiens
MARGERRRRAVPAEGVRTAERAARGGPGRRDGRGGGPRSTAGGVALAVVVLSLALGMSGRWVLAWYRARRAVTLHSAPPVLPADSSSPAVAPDLFWGTYRPHVYFGMKTRSPKPLLTGLMWAQQGTTPGTPKLRHTCEQGDGVGPYGWEFHDGLSFGRQHIQDGALRLTTEFVKRPGGQHGGDWSWRVTVEPQDSGTSALPLVSLFFYVVTDGKEVLLPEVGAKGQLKFISGHTSQLGNFRFTLLPPTSPGDTAPKYGSYNVFWTSNPGLPLLTEMVKSRLNSWFQHRPPGASPERYLGLPGSLKWEDRGPSGQGQGQFLIQQVTLKIPFSIEFVFESGSAQAGGNQALPRLAGSLLTQALESHAEGFRERFEKTFQLKEKGLSSGEQALGQAALSGLLGGIGYFYGQGLVLPDIGVEGSEQKVDPALFPPVPLFTAVPSRSFFPRGFLWDEGFHQLVVQRWDPSLTREALGHWLGLLNADGWIGREQILGDEARARVPPEFLVQRAVHANPPTLLLPVAHMLEVGDPDDLAFLRKALPRLHAWFSWLHQSQAGPLPLSYRWRGRDPALPTLLNPKTLPSGLDDYPRASHPSVTERHLDLRCWVGLGARVLTRLAEHLGEAEVAAELGPLAASLEAAESLDELHWAPELGVFADFGNHTKAVQLKPRPPQGLVRVVGRPQPQLQYVDALGYVSLFPLLLRLLDPTSSRLGPLLDILADSRHLWSPFGLRSLAASSSFYGQRNSEHDPPYWRGAVWLNVNYLALGALHHYGHLEGPHQARAAKLHGELRANVVGNVWRQYQATGFLWEQYSDRDGRGMCRPFHGWTSLVLLAMAEDY

SEQ ID NO: 1769 - DNA, 2234 bp, Homo sapiens
gcttgaattagcctgcgctctccgcgttcttccagcgctgtctttttagtaccacatgcgcaggcaggtgatggcggcgctggtcgtatccggggcagcggagcagggcgccgagacggccctggcagaggtcgggcccctcgggccgcgtggccaatcagatcccccctgagatcctgaagaaccctcagctgcaggcagcaatccgggtcctgccttccaactacaactttgagatccccaagaccatctggaggatccaacaagcccaggccaagaaggtggccttgcaaatgccggaaggcctcctcctctttgcctgtaccattgtggatatcttggaaaggttcacggaggccgaagtgatggtgatgggtgacgtgacctacggggcttgctgtgtggatgacttcacagcgagggccctgggagctgacttcttggtgcactacggccacagttgcctgattcccatggacacctcggcccaagacttccgggtgctgtacgtctttgtggacatccggatagacactacacacctcctggactctctccgcctcacctttcccccagccactgcccttgccctggtcagcaccattcagtttgtgtcgaccttgcaggcagccgcccaggagctgaaagccgagtatcgtgtgagtgtcccacagtgcaagcccctgtcccctggagagatcctgggctgcacatccccccgactgtccaaagaggtggaggccgttgtgtatcttggagatggccgcttccatctggagtctgtcatgattgccaaccccaatgtccccgcttaccggtatgacccatatagcaaagtcctatccagagaacactatgaccaccagcgcatgcaggctgctcgccaagaagccatagccactgcccgctcagctaagtcctggggccttattctgggcactttgggccgccagggcagtcctaagatcctggagcacctggaatctcgactccgagccttgggcctttcctttgtgaggctgctgctctctgagatcttccccagcaagcttagcctacttcccgaggtggatgtgtgggtgcaggtggcatgtccacgtctctccattgactggggcacagcctcccccaagccgctgctgacaccctatgaggcggccgtggctctgagggacatttcctggcagcagccctacccgatggacttctacgctggcagctccttggggccctggacggtgaaccacggccaggaccgccgtccccacgccccgggccggcccgcgcgggggaaggtgcaggaggggtccgcgcgtcccccttcggccgtggcttgcgaggactgcagctgcagggacgagaaggtggcgccgctggctccttgacgcgctcccgggcctcagggtcctgccctccggaggagcagcctcgaggctggtggttttcagagcaggaggccgacgttttctccgcattggaagagcccgccgtctgcaggggcctggaggaatcactggggatggtggcacaggcactgaacaggctggggccttttgacggccttcttggtttcagccaaggggctgcgctagcagcccttgtgtgtgccctgggccaggcaggcgatccccgcttccccttgccacggtttatcctcttggtgtctggtttctgtccccggggcattgggttcaaggaatccatcctgcaaaggcccttgtcattgccttcgctccatgtttttggggacactgacaaagtcatcccctctcaggagagtgtgcaactggccagccaatttcccggagccatcaccctcacccactctggtggccacttcattccagcagctgcaccccagcgtcaggcctacctcaagttcttggaccagtttgcagagtgaaagatcaagaaatgtctctgctcctacatccagctcctctaggggcagcctccgtcatccatgccctcccaggaccctccactcactgctgtgagtgcgcctcaccagaaccagttaagagacaactatcaattcttgagacccaaattataagggccctgcctgtactgaagaaaaggggagcacaaggccttaatggacattgacttgtgaaaacgcaaacatgaatatggttggagagccctggattaggagggtgacatggggaaggcagaggctggcaccatggtgactgccacataataaagtggtgatttccaaaaaaaaaaaa

SEQ ID NO: 1770 - protein, 363 aa, Homo sapiens
MPEGLLLFACTIVDILERFTEAEVMVMGDVTYGACCVDDFTARALGADFLVHYGHSCLIPMDTSAQDFRVLYVFVDIRIDTTHLLDSLRLTFPPATALALVSTIQFVSTLQAAAQELKAEYRVSVPQCKPLSPGEILGCTSPRLSKEVEAVVYLGDGRFHLESVMIANPNVPAYRYDPYSKVLSREHYDHQRMQAARQEAIATARSAKSWGLILGTLGRQGSPKILEHLESRLRALGLSFVRLLLSEIFPSKLSLLPEVDVWVQVACPRLSIDWGTASPKPLLTPYEAAVALRDISWQQPYPMDFYAGSSLGPWTVNHGQDRRPHAPGRPARGKVQEGSARPPSAVACEDCSCRDEKVAPLAP

SEQ ID NO: 1771 - DNA, 3245 bp, Homo sapiens
attttgtggcccgctatggcggcggtgttgaggttgggtacgggatgcggggtctttgactgaaggggtaggccaagtggaggtatcagggacgtcgcgcggcacagaagaggaccagcctggacgccggggacgctgtcatgtacggcgcgagcgggggccgcgccaaacccgagaggaaaagcggcgcgaaggaggaggccgggccaggcggtgccggcggtgggggcagccgagtggagctcttggttttcggctatgcctgcaagctgttccgggacgacgagcgggccctggctcaggaacagggacagcacctcatcccctggatgggggaccacaagatcctcatcgacagatatgatggacgtggtcacctgcatgacctttctgagtacgatgctgagtattccacgtggaacagagattatcagctgtctgaagaggaggcgcgaatagaggccctgtgtgatgaagagaggtatttagccttgcatacggacttgcttgaggaggaggcaaggcaagaggaagaatacaagcgattgagtgaagcactagcagaggatgggagctacaatgccgtggggttcacttacggtagcgactattacgacccgtcagagccgacggaggaggaggagccttccaaacagagagaaaaaaatgaggccgaaaatttagaggaaaatgaagagcccttcgttgcccccttaggattgagcgtcccgtctgacgtggagttgccaccaaccgctaaaatgcacgccatcatcgagcgcacggccagcttcgtgtgcaggcagggagcacagtttgagatcatgctgaaggccaagcaggcccggaactcccagtttgactttctgcgcttcgaccactacctcaacccctactataagttcatccagaaagccatgaaagagggacgctacactgtcctggcagaaaacaaaagtgacgagaaaaaaaaatcaggagtcagctctgacaatgaagatgatgatgatgaagaagatgggaattaccttcatccctctctctttgcctccaagaagtgtaaccgccttgaagagctgatgaagcccttgaaggtagtggacccagatcatcccctcgcagcacttgttcgtaaggcacaggctgacagttccactcccaccccacacaacgcagacggtgcgcctgtgcagccctcccaggtggagtacacggcagactcgaccgtggcagccatgtattacagctactacatgctaccggacggcacttactgcctggcgccgccccctcccggaatcgacgtgactacttactacagcacccttcctgctggcgtgaccgtgtctaactcccctggagtgacgaccaccgccccaccacctcctgggaccacaccactaccgcccccaaccacagcagagactagcagcggggccacctccacaaccaccaccacaagtgcacttgcccccgtggccgccatcatccccccgccccccgacgtccagcccgtgattgacaagctggccgagtatgtcgccaggaacggcctgaagttcgagaccagtgttcgtgccaagaatgatcaaagatttgagttcctgcagccgtggcaccagtataatgcttattatgagtttaagaagcagttcttcctccagaaagaagggggcgatagcatgcaggctgtgtctgcaccagaagaggctcccacagactctgctcccgagaagccaagtgatgctggggaggatggcgcgcctgaagacgcagccgaggtgggagcacgggcaggctcaggcgggaagaaggaggcatcgtccagtaagaccgtcccggacgggaagctggtgaaagcttcctttgctccaataagctttgcaatcaaggccaaagaaaatgatctgcttcccctggaaaaaaatcgtgttaagctagatgatgacagtgatgatgatgaagaaagcaaagaaggccaagaaagttctagtagtgctgcaaacactaacccagcagttgccccaccctgtgtagttgttgaggagaagaagcctcaacttacccaggaggagctagaagcaaagcaagcaaagcaaaagctggaagatcgcctcgcagctgctgcccgggaaaagctggcccaggcgtctaaggagtcaaaagagaaacagcttcaagcagaacgtaaaaggaaagcggcgttatttttacagaccctcaaaaatcctctgccggaagcagaagctgggaaaattgaggagagtcctttcagtgtcgaggaatccagcactacgccctgccctctactgactggaggcaggcctctgcctactttagaagttaaaccacccgataggccttcgagcaaaagcaaagatccaccgagagaagaagagaaagaaaagaaaaagaaaaagcacaaaaaaagatctcgaacaagatcacgttctcccaagtaccattcgtcatccaagtccaggtctagatcacactcaaaagcaaagcattctcttcccagtgcctatcggacagtgcggcggtcgaggtcccgctcccggtcccctcggaggagagcccactcccctgagagacggagggaagagaggagtgtgcccactgcctaccgcgtgagccgcagccctggggccagcaggaagcggacccgctccagaagtccccacgagaagaagaagaagaggcggtcccggtcgcggaccaagtccaaggccaggtctcagtcggtgtcacccagcaagcaggcagcgccccggcccgcggcccccgcggcccactcggcgcactcagccagcgtctcccctgtggagagtcggggctccagccaggagcgctccaggggagtctctcaggaaaaagaagcccagatctcttcagcaatcgtttcttccgtgcagagcaaaatcactcaggatctcatggccaaagtcagagcgatgcttgcagcttccaaaaacctgcaaaccagcgcttcctgagacggggccagcggaggcagagccgggaggctgcgtgggcttctgggcaggctcacgcagacgccggccacaccatccacctggccgcctccatggacccttggtggcttttgtaaattaatttttgatgacattttgagttttaagatttctgaccagcagtctcttacctgtatatttgtaaatatatcatgtttctgtgaaaatgtattatgaaataaaatgggaggaaacaccttttctagctag

SEQ ID NO: 1772 - protein, 951 aa, Homo sapiens [sequence omitted]

SEQ ID NO: 1773 - DNA, 3198 bp, Homo sapiens
attttgtggcccgctatggcggcggtgttgaggttgggtacgggatgcggggtctttgactgaaggggtaggccaagtggaggtatcagggacgtcgcgcggcacagaagaggaccagcctggacgccggggacgctgtcatgtacggcgcgagcgggggccgcgccaaacccgagaggaaaagcggcgcgaaggaggaggccgggccaggcggtgccggcggtgggggcagccgagtggagctcttggttttcggctatgcctgcaagctgttccgggacgacgagcgggccctggctcaggaacagggacagcacctcatcccctggatgggggaccacaagatcctcatcgacagatatgatggacgtggtcacctgcatgacctttctgagtacgatgctgagtattccacgtggaacagagattatcagctgtctgaagaggaggcgcgaatagaggccctgtgtgatgaagagagaggaagaatacaagcgattgagtgaagcactagcagaggatgggagctacaatgccgtggggttcacttacggtagcgactattacgacccgtcagagccgacggaggaggaggagccttccaaacagagagaaaaaaatgaggccgaaaatttagaggaaaatgaagagcccttcgttgcccccttaggattgagcgtcccgtctgacgtggagttgccaccaaccgctaaaatgcacgccatcatcgagcgcacggccagcttcgtgtgcaggcagggagcacagtttgagatcatgctgaaggccaagcaggcccggaactcccagtttgactttctgcgcttcgaccactacctcaacccctactataagttcatccagaaagccatgaaagagggacgctacactgtcctggcagaaaacaaaagtgacgagaaaaaaaaatcaggagtcagctctgacaatgaagatgatgatgatgaagaagatgggaattaccttcatccctctctctttgcctccaagaagtgtaaccgccttgaagagctgatgaagcccttgaaggtagtggacccagatcatcccctcgcagcacttgttcgtaaggcacaggctgacagttccactcccaccccacacaacgcagacggtgcgcctgtgcagccctcccaggtggagtacacggcagactcgaccgtggcagccatgtattacagctactacatgctaccggacggcacttactgcctggcgccgccccctcccggaatcgacgtgactacttactacagcacccttcctgctggcgtgaccgtgtctaactcccctggagtgacgaccaccgccccaccacctcctgggaccacaccactaccgcccccaaccacagcagagactagcagcggggccacctccacaaccaccaccacaagtgcacttgcccccgtggccgccatcatccccccgccccccgacgtccagcccgtgattgacaagctggccgagtatgtcgccaggaacggcctgaagttcgagaccagtgttcgtgccaagaatgatcaaagatttgagttcctgcagccgtggcaccagtataatgcttattatgagtttaagaagcagttcttcctccagaaagaagggggcgatagcatgcaggctgtgtctgcaccagaagaggctcccacagactctgctcccgagaagccaagtgatgctggggaggatggcgcgcctgaagacgcagccgaggtgggagcacgggcaggctcaggcgggaagaaggaggcatcgtccagtaagaccgtcccggacgggaagctggtgaaagcttcctttgctccaataagctttgcaatcaaggccaaagaaaatgatctgcttcccctggaaaaaaatcgtgttaagctagatgatgacagtgatgatgatgaagaaagcaaagaaggccaagaaagttctagtagtgctgcaaacactaacccagcagttgccccaccctgtgtagttgttgaggagaagaagcctcaacttacccaggaggagctagaagcaaagcaagcaaagcaaaagctggaagatcgcctcgcagctgctgcccgggaaaagctggcccaggcgtctaaggagtcaaaagagaaacagcttcaagcagaacgtaaaaggaaagcggcgttatttttacagaccctcaaaaatcctctgccggaagcagaagctgggaaaattgaggagagtcctttcagtgtcgaggaatccagcactacgccctgccctctactgactggaggcaggcctctgcctactttagaagttaaaccacccgataggccttcgagcaaaagcaaagatccaccgagagaagaagagaaagaaaagaaaaagaaaaagcacaaaaaaagatctcgaacaagatcacgttctcccaagtaccattcgtcatccaagtccaggtctagatcacactcaaaagcaaagcattctcttcccagtgcctatcggacagtgcggcggtcgaggtcccgctcccggtcccctcggaggagagcccactcccctgagagacggagggaagagaggagtgtgcccactgcctaccgcgtgagccgcagccctggggccagcaggaagcggacccgctccagaagtccccacgagaagaagaagaagaggcggtcccggtcgcggaccaagtccaaggccaggtctcagtcggtgtcacccagcaagcaggcagcgccccggcccgcggcccccgcggcccactcggcgcactcagccagcgtctcccctgtggagagtcggggctccagccaggagcgctccaggggagtctctcaggaaaaagaagcccagatctcttcagcaatcgtttcttccgtgcagagcaaaatcactcaggatctcatggccaaagtcagagcgatgcttgcagcttccaaaaacctgcaaaccagcgcttcctgagacggggccagcggaggcagagccgggaggctgcgtgggcttctgggcaggctcacgcagacgccggccacaccatccacctggccgcctccatggacccttggtggcttttgtaaattaatttttgatgacattttgagttttaagatttctgaccagcagtctcttacctgtatatttgtaaatatatcatgtttctgtgaaaatgtattatgaaataaaatgggaggaaacaccttttctagctag

SEQ ID NO: 1774 - protein, 121 aa, Homo sapiens
MYGASGGRAKPERKSGAKEEAGPGGAGGGGSRVELLVFGYACKLFRDDERALAQEQGQHLIPWMGDHKILIDRYDGRGHLHDLSEYDAEYSTWNRDYQLSEEEARIEALCDEERGRIQAIE

SEQ ID NO: 1775 - DNA, 3269 bp, Homo sapiens
gtgatctggaatggcccagatcccttaaatgtcaaatgcaaaagaaagaaaacacgccaagaaaatgagaaaccagcctaccaatgtgactctgtcctctggctttgtggctgacagaggtgtaaagcaccacagtggaggtgaaaaacctttccaagctcaaaaacaagagcctcatcctggaacttcacgacagcggcaaaccagagtcaacccccattctctgcctgaccctgaagtgaatgagcagtcttcctccaaagggatgtttagaaaaaagggaggatggaaagcaggtcccgagggcacgtctcaggagatccccaagtatataactgcttctacttttgctcaagcacgagctgctgaaatcagtgctatgttaaaagctgtgacccagaagtcttcgaattcactggtttttcagactctgccacggcacatgcgacgaagagccatgagccacaacgtcaaacgccttcccagacggttacaggagattgcccagaaagaggcggagaaagccgtacatcagaaaaaagaacattcaaaaaataaatgccataaagctcgaagatgtcacatgaaccggacgctagaatttaaccgtagacaaaagaagaacatttggttagaaactcacatctggcacgccaagcggtttcatatggtcaagaagtggggctactgccttggggagaggccaacagtcaagagccacagagcctgctatcgagccatgacgaaccggtgcctcctgcaggatttatcctattactgttgtttggagttgaaaggcaaagaggaagaaatactaaaggcgctttctggaatgtgtaacatagacacagggctgacgtttgcagcagttcactgcttgtctggaaagcgccaagggagccttgtgctttatcgggtgaataaatatcccagagaaatgcttgggcctgttacgtttatctggaagtcccagaggaccccgggtgacccttctgagagcaggcagctgtggatctggctgcatccaacccttaaacaggatatcttagaggaaataaaagcagcgtgccagtgtgtggaacccatcaaatcagctgtctgcatcgctgacccacttccaacaccatcccaagaaaaaagccaaactgaattgcctgacgagaaaattggcaagaaaagaaaaaggaaagatgatggagaaaatgctaaaccaattaaaaaaattatcggtgatggaactagagatccatgtctaccatactcttggatctctccaaccacaggcattataatcagcgatttgacgatggagatgaacagattccggctgattgggccactttcccactccatcctaactgaagcaataaaagctgcttctgtccacactgtgggagaggacacagaggagacacctcaccgctggtggatagaaacctgtaagaaacctgacagcgtttcccttcattgcagacaagaagccattttcgagttgttgggaggaataacatcaccagcagaaattccggcaggtactattctgggactgacagttggggatcctcgaataaatttgccccaaaagaagtccaacgctttgcccaatccagaaaaatgccaagataatgagaaagttagacagctgcttctggagggtgtgcctgtggaatgtacgcatagctttatctggaaccaagatatctgtaagagtgtcacagagaataaaatctcggatcaggatttaaaccggatgaggagtgaattgctggtgcctgggtcacagcttattttaggtccccatgaatccaagatacctatacttttgattcagcagccaggaaaagtgactggtgaagatcgactaggctggggaagtggctgggatgtcctactcccaaagggctggggcatggctttctggattccatttatttatcgaggtgtgagagtcggagggttgaaagagtctgcagtgcattctcagtataagaggtcgcctaatgtcccaggcgattttccagactgccctgccgggatgctgtttgcggaagagcaagctaagaatcttcttgaaaagtacaaaagacgccctcctgcaaaacggcccaactacgttaagcttggcactctggcacctttctgctgtccctgggagcagttaactcaagactgggagtcaagagtccaggcttacgaagaaccttctgtagcttcatctccaaatggtaaggagagtgacctaagaagatctgaggtgccttgtgctcccatgcctaaaaaaactcatcagccatctgatgaagtgggcacatccatagagcaccccagggaggcagaggaggtaatggatgcagggtgtcaagaatcggcagggcctgagaggatcacagaccaggaggccagtgaaaaccatgttgctgccacagggagtcacctctgcgttctcaggagtagaaaattactgaagcaactgtcagcctggtgtgggcccagttctgaggatagtcggggaggccggcgagctcccggcagaggccagcaaggattgaccagagaggcttgcctgtccatcttgggccacttccccagggccctggtttgggtcagcctgtccctgctcagcaagggcagccccgagcctcacaccatgatctgtgtcccagccaaggaggacttcctccagctccatgaggactggcattactgtgggccccaggaatccaaacacagtgacccattcaggagcaagatcctgaaacagaaagagaagaagaaaagggagaagaggcagaagccaggacgtgcctcttctgatggcccggcgggggaagagcccgtggctgggcaggaagctctgactctagggctgtggtcaggccctctgccgcgtgtgacgttgcactgctccagaactctcctaggctttgtgactcagggagatttttccatggctgttggctgtggagaagccctggggtttgttagcttgacaggcttgctggatatggtgtccagccagcctgcagcgcagaggggcttagtgctactgaggcctcccgcctctctgcagtatcgatttgcgaggattgctattgaggtgtgaatgcgtgcttgtatcccagcagggcatagataatacgttattattgtctgccaagttctacatgtggagaatctgcttctgctttaaaatatcatgtgaaactccctggaaacaagaataaaaaattatgtattatgcaaaaaaaacaaaaaaaaaaaaaaaaaaa

SEQ ID NO: 1776 - protein, 1024 aa, Homo sapiens
MSNAKERKHAKKMRNQPTNVTLSSGFVADRGVKHHSGGEKPFQAQKQEPHPGTSRQRQTRVNPHSLPDPEVNEQSSSKGMFRKKGGWKAGPEGTSQEIPKYITASTFAQARAAEISAMLKAVTQKSSNSLVFQTLPRHMRRRAMSHNVKRLPRRLQEIAQKEAEKAVHQKKEHSKNKCHKARRCHMNRTLEFNRRQKKNIWLETHIWHAKRFHMVKKWGYCLGERPTVKSHRACYRAMTNRCLLQDLSYYCCLELKGKEEEILKALSGMCNIDTGLTFAAVHCLSGKRQGSLVLYRVNKYPREMLGPVTFIWKSQRTPGDPSESRQLWIWLHPTLKQDILEEIKAACQCVEPIKSAVCIADPLPTPSQEKSQTELPDEKIGKKRKRKDDGENAKPIKKIIGDGTRDPCLPYSWISPTTGIIISDLTMEMNRFRLIGPLSHSILTEAIKAASVHTVGEDTEETPHRWWIETCKKPDSVSLHCRQEAIFELLGGITSPAEIPAGTILGLTVGDPRINLPQKKSNALPNPEKCQDNEKVRQLLLEGVPVECTHSFIWNQDICKSVTENKISDQDLNRMRSELLVPGSQLILGPHESKIPILLIQQPGKVTGEDRLGWGSGWDVLLPKGWGMAFWIPFIYRGVRVGGLKESAVHSQYKRSPNVPGDFPDCPAGMLFAEEQAKNLLEKYKRRPPAKRPNYVKLGTLAPFCCPWEQLTQDWESRVQAYEEPSVASSPNGKESDLRRSEVPCAPMPKKTHQPSDEVGTSIEHPREAEEVMDAGCQESAGPERITDQEASENHVAATGSHLCVLRSRKLLKQLSAWCGPSSEDSRGGRRAPGRGQQGLTREACLSILGHFPRALVWVSLSLLSKGSPEPHTMICVPAKEDFLQLHEDWHYCGPQESKHSDPFRSKILKQKEKKKREKRQKPGRASSDGPAGEEPVAGQEALTLGLWSGPLPRVTLHCSRTLLGFVTQGDFSMAVGCGEALGFVSLTGLLDMVSSQPAAQRGLVLLRPPASLQYRFARIAIEV

SEQ ID NO: 1777 - DNA, 5615 bp, Homo sapiens
gaaactgcgggtgtgacccccccgtggtggctctgggtgtctgcggaggagctgggggcggaagatgaggctaacggcttggcttcagtgaacgcaccgggatgtgcaggccgggaggtagaggcaggctgatgggggagggaacgagcagcctgtgagacggggtgacggcggctaccagcccgggcgggcaccgggactggaagagttgcctgagcagccggctggtccggcggccaggctagggcgggggcgagcgcccagttgagcctgctggggctggaggagcgagaagggttttcttcacatttcagagcgaaccagacggggacagtaaggtttggaggaagggggatcgttggaagtagcaagaagtggagagaatctggcaatagacgagaaaccgaaagaatcagaaagaagtctatgtgagtagctgaaagcattgggtgaccagaaagaaggtcggtgtaagtgaaggaagagtgaggtgtggctggatcaaagggctaagagaagcgggtctgtgtaagtggatgtgagtgaggatcaaggaaaagccgtggaagtggccgggggtcggggccgcagaagtgccagacggggccggaaagcagccgagcggagttcaaatttgagagcgtttggaaattggaagacttggtggcgaacgagggtcaggacctgcatcctgcctcagagagttatcgacgtatccggaatgtgggatcagaggctggtgaggttggccctgttgcagcatctgcgggccttctatggtattaaggtgaagggtgtccgtgggcagtgcgatcgcaggagacatgaaacagcagccacggaaatagggggtaaaatatttggagtaccttttaatgcactgccccattctgctgtaccagaatatggacacattccaagctttcttgtcgatgcttgcacatctttagaagaccatattcataccgaagggctttttcggaaatcaggatctgtgattcgcctaaaagcactaaagaataaagtggatcatggtgaaggttgcctatcttctgcacctccttgtgatattgcgggacttcttaagcagttttttagggaactgccagagcccattctcccagctgatttgcatgaagcacttttgaaagctcaacagttaggcacagaggaaaagaataaagctacactgttgctctcctgtcttctggctgaccacacagttcatgtattaagatacttctttaactttctcaggaatgtttctcttagatccagtgagaataagatggacagcagcaatcttgcagtaatatttgcaccgaatcttcttcagacaagtgaaggacatgaaaagatgtcttctaacacagaaaagaagctacgattacaggctgcagtagtacagactcttatcgattatgcatcagatattgggcgtgtaccagattttatcctggaaaagataccagccatgttgggtattgatggtctctgtgctactccatcactggaaggctttgaagaaggtgaatatgaaactcctggtgaatataagagaaagagaagacaaagtgtaggagattttgttagtggagcactaaataaatttaaacctaacagaacaccttctattacacctcaagaagaaagaattgcccagctatctgaatcaccagtgattcttacaccaaatgctaagcgtacattgccagtagattcttctcatggtttctcaagtaagaaaaggaagtccatcaagcacaattttaactttgagctgttgccaagtaatctcttcaatagcagttctacaccggtatcagttcacatcgatacaagctcagaagggtcatctcagagttcactctctcctgtactcattggtggaaaccatttgatcactgcaggtgtgccaaggcgaagtaaaagaattgcaggcaaaaaagtttgcagagtggaatcaggaaaagcaggctgcttttctcctaaaatcagccataaagaaaaggttcgaagatctctgcgtttgaaattcaatctagggaaaaatggcagagaagtaaatggatgttctggtgtcaatagatatgaaagtgttggttggcgacttgcaaatcaacaaagtttaaaaaatcgaattgaatctgtaaaaacaggtttgctttttagcccagatgttgatgaaaagttaccaaagaaaggttcagaaaagatcagtaagtctgaggaaaccttactaactccagagcgactagttggaacaaattaccggatgtcttggacaggacctaataattcaagttttcaagaagtagatgcaaatgaagcttcttcaatggtggaaaatcttgaggtagaaaactctttggagcctgatattatggtagaaaagtcacctgctacttcatgtgaactcaccccttccaatttaaacaataagcataatagcaacataacaagtagccctcttagcggggatgaaaataacatgaccaaagagactttggtgaaagttcaaaaagcgttttctgaatctggaagtaatcttcacgcattgatgaatcagaggcagtcatcagtaactaatgtggggaaagtaaaattaactgaaccatcttatttagaagatagcccagaggaaaatctatttgaaactaatgatttgactatagtagaatcaaaggagaaatatgaacaccacactggtaaaggtgaaaaatgtttttcagagagggacttttcaccccttcaaactcaaacatttaatagagaaacaactataaaatgttattcaactcagatgaagatggaacatgaaaaagacattcattcaaatatgccaaaagattatttaagcaagcaagaattctccagtgatgaagaaataaagaaacagcagtccccaaaggataaactaaataataaattaaaagagaatgagaatatgatggaaggtaacttaccgaagtgtgcagcacatagcaaggacgaggctagatcctctttctcacagcagagtacatgtgttgtaacaaacttgtcaaaacctaggcctatgagaattgctaaacagcagtcattggaaacatgtgagaaaacagtttctgaaagttcacaaatgacagaacatagaaaggtttctgatcacatacagtggtttaacaagctttctttaaatgaaccaaatagaataaaagtcaagtcacctcttaagtttcagcgtactcctgttcgtcagtccgtcagaagaattaattctttgttggagtatagcagacaacctacagggcataagttggcgagtcttggtgatacagcttctcctttggtcaaatcagtgagctgtgacggtgctctttcctcttgtatagaaagtgcatcaaaagattcctctgtttcatgtatcaaatcaggtcctaaagaacagaagtccatgtcatgtgaagagtcaaatattggtgcaatttcaaagtcaagcatggagttaccctcgaaatctttcttaaagatgaggaagcacccagattcagtgaatgcttctcttaggtctactacagtttataaacagaagatcttatctgatggccaagttaaggttcccttggatgatctgactaatcatgatatagtaaaaccagttgtaaataacaacatgggcatttcttctgggataaataacagggtccttaggagaccatcagaaagaggaagggcctggtacaaaggttctccaaaacatcctatcggaaaaactcaattactaccaacaagtaaacctgtagatttgtaattggtaaatgttatacttgtcattaatgtaaataaagtgagtaattggtatgacttgcaggatgatgtacatgttagtttgtagctcaggatgattgttaagcaatagatttgctctattgaaaatgtttcatttttttcactgtacaagcaacttagatttttatttgtacaaattacttctttgtttttcttaatgatggcaatttttaaactttaattttattgtgatctcttaaagcagaggttagactttacctttctgactctgtcgtccaggctggagtgcagtggcgcaatctcactgcaagctccacttcctgggttcatgccattttcctgcctcagcctcccgagtagctgggactacaggtgcccgccaccacgcccagctaattttttgtatttttagtagagacggtttcaccgtgttagccaggatggtctcgatctcctgaccttgtgatccgcccgcctcagcctcccaaagtgctgggattacaggcatgagccaccacgcccggctagactttacctttctaaagaaattgtttactggatttataagaagttaatttttgaaaatgacatatttttgtgtgatagaaagaatggagcaagttgtgcctatttcctccaagtcagataaggtttctaaaataaataaatttctagcatataaagggtagagataaactctgcaaatcttatgtctggaattatattaatgtttattgtccttgccaaaattcctagaaattaatttccttcaatagcatcctaaaactctatttttatttggggcagagtaatttcatttatagtgccagtaggtgtaccttgtgttcactcgaactaagaacaatggttaaggcagaataatgactaaaatatgttcatatattatgatgtggaaataattgataacttttaagccatactatgtttttaaagataatttgcacaaacacgtttgtgtctgttctgtccaatatagatttggcaattatttaaagagggataatcttgaaaaaaattaaccaaggtgatttcttatatgtagatgctcgattttggaatttgaaatagtagatgcacctctttaccttttttacttggataaaaacctatgatgattttgtcctgtgtgtaaatgttatttatttagcatagacattaaagataactctctggaaaatgacttgactaaggctctcatgaaattcaaagtgccatttagaacatgcaccaaattgtcaagtaaatctgtctaaatttatattttaaattattacaaattacacatctttgaggaaagagtattatgaacaatagaacatattctctaggttgtagaggaaggaataagcagacagaatcaaccactaaaggtagtttttcagattggttgttagaatgtcatgtttagatgttggagcagattagagcagcattcatgccactcggagcaaccagacttacagcataagtatgtacgaggaatttcaaatcatcagatgtttgcttggctaggttctactttgtttatttgatatcaaataggtttgtagatgtttatggcatttctaattgtaagtagagacaaaatattcatatagtcagatatatgttgtctgctttaaacaatttttaaattttaaaaatgcattaacgtctttttatatccatcaagggaaggatgaaatgttgaatttgaagactaattcagtaagaagtcctaggggtttaactgtacatactacctgaactggcttttctgagagatgaatcaataatgaaacatgtctgttttaaaaactacc

SEQ ID NO: 1778 - protein, 1023 aa, Homo sapiens
MWDQRLVRLALLQHLRAFYGIKVKGVRGQCDRRRHETAATEIGGKIFGVPFNALPHSAVPEYGHIPSFLVDACTSLEDHIHTEGLFRKSGSVIRLKALKNKVDHGEGCLSSAPPCDIAGLLKQFFRELPEPILPADLHEALLKAQQLGTEEKNKATLLLSCLLADHTVHVLRYFFNFLRNVSLRSSENKMDSSNLAVIFAPNLLQTSEGHEKMSSNTEKKLRLQAAVVQTLIDYASDIGRVPDFILEKIPAMLGIDGLCATPSLEGFEEGEYETPGEYKRKRRQSVGDFVSGALNKFKPNRTPSITPQEERIAQLSESPVILTPNAKRTLPVDSSHGFSSKKRKSIKHNFNFELLPSNLFNSSSTPVSVHIDTSSEGSSQSSLSPVLIGGNHLITAGVPRRSKRIAGKKVCRVESGKAGCFSPKISHKEKVRRSLRLKFNLGKNGREVNGCSGVNRYESVGWRLANQQSLKNRIESVKTGLLFSPDVDEKLPKKGSEKISKSEETLLTPERLVGTNYRMSWTGPNNSSFQEVDANEASSMVENLEVENSLEPDIMVEKSPATSCELTPSNLNNKHNSNITSSPLSGDENNMTKETLVKVQKAFSESGSNLHALMNQRQSSVTNVGKVKLTEPSYLEDSPEENLFETNDLTIVESKEKYEHHTGKGEKCFSERDFSPLQTQTFNRETTIKCYSTQMKMEHEKDIHSNMPKDYLSKQEFSSDEEIKKQQSPKDKLNNKLKENENMMEGNLPKCAAHSKDEARSSFSQQSTCVVTNLSKPRPMRIAKQQSLETCEKTVSESSQMTEHRKVSDHIQWFNKLSLNEPNRIKVKSPLKFQRTPVRQSVRRINSLLEYSRQPTGHKLASLGDTASPLVKSVSCDGALSSCIESASKDSSVSCIKSGPKEQKSMSCEESNIGAISKSSMELPSKSFLKMRKHPDSVNASLRSTTVYKQKILSDGQVKVPLDDLTNHDIVKPVVNNNMGISSGINNRVLRRPSERGRAWYKGSPKHPIGKTQLLPTSKPVDL

SEQ ID NO: 1779 - DNA, 1168 bp, Homo sapiens
ggaagtgcggtgttaagcgccggcggctcgcgcccacgctgggccgggagtcgaaatgcttcccggtgccgggagtgagcgatgagctggcttctgttcctggcccacagagtcgccttggccgccttgccctgccgccgcggctctcgcgggttcgggatgttctatgccgtgaggaggggccgcaagaccggggtctttctgacctggaatgagtgcagagcacaggtggaccggtttcctgctgccagatttaagaagtttgccacagaggatgaggcctgggcctttgtcaggaaatctgcaagcccggaagtttcagaagggcatgaaaatcaacatggacaagaatcggaggcgaaagccagcaagcgactccgtgagccactggatggagatggacatgaaagcgcagagccgtatgcaaagcacatgaagccgagcgtggagccggcgcctccagttagcagagacacgttttcctacatgggagacttcgtcgtcgtctacactgatggctgctgctccagtaatgggcgtagaaggccgcgagcaggaatcggcgtttactgggggccaggccatcctttaaatgtaggcattagacttcctgggcggcagacaaaccaaagagcggaaattcatgcagcctgcaaagccattgaacaagcaaagactcaaaacatcaataaactggttctgtatacagacagtatgtttacgataaatggtataactaactgggttcaaggttggaagaaaaatgggtggaagacaagtgcagggaaagaggtgatcaacaaagaggactttgtggcactggagaggcttacccaggggatggacattcagtggatgcatgttcctggtcattcgggatttataggcaatgaagaagctgacagattagccagagaaggagctaaacaatcggaagactgagccatgtgactttagtccttgggagaacttgagccagcggctgtcttgctgcctgtacttactggtgtggaaaatagcctgcaggtaggaccattgcagtgatgggcagatgcgtctttcacacggaatcaggcacagtggccttctgtgacatgtgtttataaaaaatggttaagtatataataaattgaacatcttttaaaaaaaaaaaaaaaaaaaaaaaaaa

SEQ ID NO: 1780 - protein, 286 aa, Homo sapiens
MSWLLFLAHRVALAALPCRRGSRGFGMFYAVRRGRKTGVFLTWNECRAQVDRFPAARFKKFATEDEAWAFVRKSASPEVSEGHENQHGQESEAKASKRLREPLDGDGHESAEPYAKHMKPSVEPAPPVSRDTFSYMGDFVVVYTDGCCSSNGRRRPRAGIGVYWGPGHPLNVGIRLPGRQTNQRAEIHAACKAIEQAKTQNINKLVLYTDSMFTINGITNWVQGWKKNGWKTSAGKEVINKEDFVALERLTQGMDIQWMHVPGHSGFIGNEEADRLAREGAKQSED

SEQ ID NO: 1781 - DNA, 3549 bp, Homo sapiens
  misc_feature (3112)..(3112): n is a, c, g, or t
gagctcgcggcgagcgccccagccaggcctgcgccggcatcctccgagataatggcatcagctgctaaggaatttaaaatggacaacttttcacctaaagctggcactagcaaattgcaacagacagtaccagctgatgcatctcctgattctaagtgtcctatatgcttggatagatttgataatgtgtcttacttagatcgctgcttacataagttctgaaaacgctgtgtacaggagtggtcaaaaaacaaagctgaatgcccactatgtaaacagccctttgattctattttccattctgtgagggcagaagatgacttcaaggagtatgtcctaaggccttcgtataatggttcttttgtcacccctgatcgacgatttcgctaccgtacaactctgacaagggaacgaaatgcttctgtgtattcacctagtggtcctgtgaacagaagaacaacaactccaccggatagtggagtactgtttgaagggttaggcatttcaacaagacctagagatgttgaaattcctcagtttatgagacagattgcagtaaggaggccaactacggcagatgaaagatctttgcggaaaattcaagaacaagatattattaattttagacgaactctttatcgtgctggtgctcgagttagaaatattgaagatggtggccgctacagggatatttcagctgaatttttccgtagaaatccagcttgccttcacagattagtcccctggttaaaacgtgaacttacagttctttttggagctcatggatctttagtgaatattgtccagcatattatcatgagtaatgttactcgctatgacttggagagtcaggcatttgtgtctgatttaagaccatttttacttaatcgaactgagcattttatacatgaatttatcagttttgcccgatctccttttaacatggcagcctttgaccagcatgccaattatgattgccctgctccttcatacgaagaaggcagccattctgattcttcagtcataacaatatctccagatgaggctgagacccaagagctggatattaatgtagccactgttagtcaggcaccatgggatgatgaaactccaggaccatcttactcaagctcagagcaggtacacgttactatgtcttctcttttaaatacttctgacagttcagatgaagaacttgtcacaggaggagccacgtctcagatacaaggagtacaaaccaatgacgacctaaataatgacagtgatgattcttcagataattgtgtcattgttgggtttgttaaaccactagctgagaggaccccagaacttgttgaactgtcctctgattctgaggacttaggttcttatgagaaaatggagacagtgaagacacaagaacaggagcaatcttacagttctggtgatagcgatgttagtagatgctcatctccacactctgtccttggaaaggatgaacaaataaataaaggtcattgtgattctagtacaagaatcaaatcaaagaaggaagagaaacgatctacatcattgtcatctcccagaaacctgaactcatctgtaagaggagacagagtatattctccatataaccatagacacagaaagaggggaagatcaagaagttcagattcacgttctcagagtagaagtgggcatgatcagaagaatcatagaaagcatcatgggaagaaaagaatgaaaagtaaacgatccagaagcagggaaagtagcagacctagagggagaagagacaaaaagagatcaagaactagagatagcagttggtccagaagaagccaaactctgtctctaagtagtgaaagcacaagcagatcaaggtctcgtagcagtgatcatggtaaaagaagatcacggagcagaaatagagatcgttattatttaagaaataattatggaagcagatacaaatgggagtatacttattacagtagaaacaaggacagggatgggtacgaatcatcttacaggaggaggactctgtccagagctcattattctagacagtcttcaagtccagaatttagagttcagtccttttctgaaagaacaaatgctaggaaaaaaaataatcacagtgagaggaagtattactactatgaaaggcacagatcaaggagcctgtctagtaacagatcaaggactgcatctaccgggactgaccgggtgagaaatgaaaagcctggagggaaacgaaaatacaaaacacggcatttggagggtactaacgaagtggctcagccatctcgtgaatttgcttctaaagcaaaggacagtcattaccaaaaatcttcatcaaaattggatggaaactacaaaaatgagagtgataccttttcagacagccgatcatcagacagagagacaaaacacaaaaggagaaaaaggaagacccggagcctaagtgtagagatagtttatgaaggaaaagctactgatacaactaaacaccataaaaagaaaaagaagaaacataagaagaagcataagaaacaccatggagataatgcttcacgttccccagttgtaattaccattgacagtgacagtgataaggattctgaagtaaaggaggatacagaatgtgacaatagtggtcctcaagaccctctacaaaatgagtttttggctccttccttggaaccatttgaaactaaagatgtagttacaatagaagctgaatttggtgtgctggacaaggaatgtgatattgccacacttagtaacaacttgaataatgccaacaaaactgtagataatattccacctctggcagcttcagttgaacaaactctcgatgtaagagaagagagcacctttgtttctgatttggagaaccagcccagtaacattgtgtctcttcaaactgagccatcaaggcaattgccatcgccacggacatcattaatgtcagtatgtcttggtagagactgtgatatgtcttaaaactgccaaagcatttcattgagaattatgatgttataaaaaggaaaaaggaagaatgtcgtctactgcagtctatttaaagatgacatttggtgaaaactctcttcctccttacaatattttnaatgattttttttttggtgttaatttgtaaaaatcattatttgttcaaaatgtatgtcccaccctcaaagatatgcacttttaagtgaagaaaatgatactgctagcagcttatttaaaacttggggtcctttttaaataagaaaaattatataaattttagaagttatttcataaagccatacggtattgacatatttttaaggtagtcaatgagtatttttgaattttttttttttgagagttattctggaaatgtgttataagctaggagaatccctttggacagtctttatttttcttcttaaaaatttatatgattcaaaaccatttcttcaggttaaattgaggcattttaatctgcacagtttatcttctgccaaaataaaaatttactatttcctttatatacttgtttatctggactgccagtaaaac

SEQ ID NO: 1782 - protein, 815 aa, Homo sapiens
MRQIAVRRPTTADERSLRKIQEQDIINFRRTLYRAGARVRNIEDGGRYRDISAEFFRRNPACLHRLVPWLKRELTVLFGAHGSLVNIVQHIIMSNVTRYDLESQAFVSDLRPFLLNRTEHFIHEFISFARSPFNMAAFDQHANYDCPAPSYEEGSHSDSSVITISPDEAETQELDINVATVSQAPWDDETPGPSYSSSEQVHVTMSSLLNTSDSSDEELVTGGATSQIQGVQTNDDLNNDSDDSSDNCVIVGFVKPLAERTPELVELSSDSEDLGSYEKMETVKTQEQEQSYSSGDSDVSRCSSPHSVLGKDEQINKGHCDSSTRIKSKKEEKRSTSLSSPRNLNSSVRGDRVYSPYNHRHRKRGRSRSSDSRSQSRSGHDQKNHRKHHGKKRMKSKRSRSRESSRPRGRRDKKRSRTRDSSWSRRSQTLSLSSESTSRSRSRSSDHGKRRSRSRNRDRYYLRNNYGSRYKWEYTYYSRNKDRDGYESSYRRRTLSRAHYSRQSSSPEFRVQSFSERTNARKKNNHSERKYYYYERHRSRSLSSNRSRTASTGTDRVRNEKPGGKRKYKTRHLEGTNEVAQPSREFASKAKDSHYQKSSSKLDGNYKNESDTFSDSRSSDRETKHKRRKRKTRSLSVEIVYEGKATDTTKHHKKKKKKHKKKHKKHHGDNASRSPVVITIDSDSDKDSEVKEDTECDNSGPQDPLQNEFLAPSLEPFETKDVVTIEAEFGVLDKECDIATLSNNLNNANKTVDNIPPLAASVEQTLDVREESTFVSDLENQPSNIVSLQTEPSRQLPSPRTSLMSVCLGRDCDMS

SEQ ID NO: 1783 - DNA, 1700 bp, Homo sapiens
cggcggcccagactatccgctcccaccgcgcccccggcccacctggtggccccggcctggccgccgcccccgcgctgtgcccgggagctcgtcccggacgcgcgaccgggcggcgggggctcggcggccaccgctgcctcaagggagcgaggcgggagggtgtgtgtgcgcggctgtgagcaggggtgccggcgggctgcagcggaggcactttggaagaatgactctggagtccatcatggcgtgctgcctgagcgaggaggccaaggaagcccggcggatcaacgacgagatcgagcggcagctccgcagggacaagcgggacgcccgccgggagctcaagctgctgctgctcgggacaggagagagtggcaagagtacgtttatcaagcagatgagaatcatccatgggtcaggatactctgatgaagataaaaggggcttcaccaagctggtgtatcagaacatcttcacggccatgcaggccatgatcagagccatggacacactcaagatcccatacaagtatgagcacaataaggctcatgcacaattagttcgagaagttgatgtggagaaggtgtctgcttttgagaatccatatgtagatgcaataaagagtttatggaatgatcctggaatccaggaatgctatgatagacgacgagaatatcaattatctgactctaccaaatactatcttaatgacttggaccgcgtagctgaccctgcctacctgcctacgcaacaagatgtgcttagagttcgagtccccaccacagggatcatcgaatacccctttgacttacaaagtgtcattttcagaatggtcgatgtagggggccaaaggtcagagagaagaaaatggatacactgctttgaaaatgtcacctctatcatgtttctagtagcgcttagtgaatatgatcaagttctggtggagtcagacaatgagaaccgaatggaggaaagcaaggctctctttagaacaattatcacatacccctggttccagaactcctcggttattctgttcttaaacaagaaagatcttctagaggagaaaatcatgtattcccatctagtcgactacttcccagaatatgatggaccccagagagatgcccaggcagcccgagaattcattctgaagatgttcgtggacctgaacccagacagtgacaaaattaactactcccacttcacgtgcgccacagacaccgagaatatccgctttgtctttgctgccgtcaaggacaccatcctccagttgaacctgaaggagtacaatctggtctaattgtgcctgctagacacccgccctgcccttccctggtgggctattgaagatacacaagagggactgtatttctgtggaaaacaatttgcataatactaatttattgccgtcctggactctgtgtgagcgtgtccacagagtttgagtaaatattatgattttatttaaactattccagaggaaaaacagaggatgctgaagtacagtcccagcacatttcctctctatctttttttaggcaaaccttgtgactcagtgtattttaaattctcagtcatgcactcacaaagataagacttgtttctttctgtctctctctctttttcttttctatggagcaaaacaaagctgatttccctttttttcttcccccgctaattcatacctccctcctgatgtt

SEQ ID NO: 1784 - protein, 359 aa, Homo sapiens
MTLESIMACCLSEEAKEARRINDEIERQLRRDKRDARRELKLLLLGTGESGKSTFIKQMRIIHGSGYSDEDKRGFTKLVYQNIFTAMQAMIRAMDTLKIPYKYEHNKAHAQLVREVDVEKVSAFENPYVDAIKSLWNDPGIQECYDRRREYQLSDSTKYYLNDLDRVADPAYLPTQQDVLRVRVPTTGIIEYPFDLQSVIFRMVDVGGQRSERRKWIHCFENVTSIMFLVALSEYDQVLVESDNENRMEESKALFRTIITYPWFQNSSVILFLNKKDLLEEKIMYSHLVDYFPEYDGPQRDAQAAREFILKMFVDLNPDSDKINYSHFTCATDTENIRFVFAAVKDTILQLNLKEYNLV

SEQ ID NO: 1785 - DNA, 1653 bp, Homo sapiens
  misc_feature (252)..(252): n is a, c, g, or t
  misc_feature (255)..(255): n is a, c, g, or t
  misc_feature (258)..(258): n is a, c, g, or t
atgacaggtgacaagggtccccaaaggctaagcgggtccagctatggttccatctccagcccgaccagcccgaccagcccagggccacagcaagcacctcccagagagacctacctgagtgagaagatccccatcccagacacaaaaccgggcaccttcaggctgcggaagctatgggccttcacggggcctggcttcctcatgagcattgctttcctggacccaggaaacatcgagtcagatcttcagctnggnccngtggcgggattcaaacttctctgggtgctgctctgggccaccgtgttgggcttgctctgccagcgactggctgcacgtctgggcgtggtgacaggcaaggacttgggcgaggtctgccatctctactaccctaaggtgccccgcaccgtcctctggctgaccatcgagctagccattgtgggctccgacatgcaggaagtcatcggcacggccattgcattcaatctgctctcagctggacgaatcccactctggggtggcgtcctcatcaccatcgtggacaccttcttcttcctcttcctcgataactacgggctgcggaagctggaagctttttttggactccttataaccattatggccttgacctttggctatgagtatgtggtggcgcgtcctgagcagggagcgcttcttcggggcctgttcctgccctcgtgcccgggctgcggccaccccgagctgctgcaggcggtgggcattgttggcgccatcatcatgccccacaacatctacctgcactcggccctggtcaagtctcgagagatagaccgggcccgccgagtcgacatcagagaagccaacatgtacttcctgattgaggccaccatcgccctgtccgtctcctttatcatcaacctctttgtcatggctgcatttgggcaggccttctaccagaaaaccaagcaggctgcgttcaacatctgtgccaacagcagcctccacgactacgctaagatcttccccatgaacaacgccaccgtggccgtggacatttaccaggggggcgtgatcctgggctgcctgttcggccccgcggccctctacatctgggccataggtctcctggcggctgggcagagctccaccatgacgggcacctacgcgggacagttcgtgatggagggcttcctgaggctgcggtggtcaagcttcgcccgtgtcctcctcacccgctcctgcgccatcctgcccaccgtgctcgtggctgtcttccgggacctgagggacttgtcgggcctcaatgatctgctcaacgtgctgcagagcctgctgctcccggttgccgtgctgcccatcctcacgttcaccagcatgcccaccctcatgcaggagtttgccaatggcctgctgaacaaggtcgtcacctcttccatcatggtgctagtctgcaccatcaacctctacttcgtggtcagctatctgcccagcctgccccaccctgcctacttcggccttgcagccttgctggccgcagcctacctgggcctcagcacctacctggtctggacctgttgccttgcccacggagccacctttctggcccacagctcccaccaccacttcctgtatgggctccttgaagaggaccacaaaggggagacctctggctag

SEQ ID NO: 1786 - protein, 550 aa, Homo sapiens
MTGDKGPQRLSGSSYGSISSPTSPTSPGPQQAPPRETYLSEKIPIPDTKPGTFRLRKLWAFTGPGFLMSIAFLDPGNIESDLQLGPVAGFKLLWVLLWATVLGLLCQRLAARLGVVTGKDLGEVCHLYYPKVPRTVLWLTIELAIVGSDMQEVIGTAIAFNLLSAGRIPLWGGVLITIVDTFFFLFLDNYGLRKLEAFFGLLITIMALTFGYEYVVARPEQGALLRGLFLPSCPGCGHPELLQAVGIVGAIIMPHNIYLHSALVKSREIDRARRVDIREANMYFLIEATIALSVSFIINLFVMAAFGQAFYQKTKQAAFNICANSSLHDYAKIFPMNNATVAVDIYQGGVILGCLFGPAALYIWAIGLLAAGQSSTMTGTYAGQFVMEGFLRLRWSSFARVLLTRSCAILPTVLVAVFRDLRDLSGLNDLLNVLQSLLLPVAVLPILTFTSMPTLMQEFANGLLNKVVTSSIMVLVCTINLYFVVSYLPSLPHPAYFGLAALLAAAYLGLSTYLVWTCCLAHGATFLAHSSHHHFLYGLLEEDHKGETSG

SEQ ID NO: 1787 - DNA, 2038 bp, Homo sapiens
caccatgtctgtccgctactccagcagcagcaagcagttctcttcctcccgcagtggaggaggaggtggcggagggtcctccctaagaatatctagctccaaaggctccctcggcggaggatttagctcaggggggttcagcggcggctcttttagccgcgggagctctggtgggggctgctttgggggctcatcaggtggctatggaggattaggaggttttggtggaggtagctttcgtggaagctatggaagtagcagctttggtgggagttatggaggcagctttggagggggcagtttcggaggtggcagctttggtgggggcagctttggtggaggcggcttcggtggaggcggctttggaggaggctttggtggtggattcggaggagacggcggccttctctctggaaatgaaaaagtaaccatgcagaatctgaatgaccgcttggcctcctacctggacaaagttcgggctctggaagaatcaaactatgagctggaaggcaaaatcaaggagcggtatgaccagcatggcaactcacgtcagggggagcctcgtgactacagcaaatactacaaaaccatcgatgaccttaaaaatcagattctcaacctaacaacagataatgccaacatcctgcttcagatcgacaatgcaaggctggcagctgatgacttcaggctgaagtatgagaatgaggtagctctgcgccagagcgtggaggctgacatcaacggcctgcgtagggtgctggatgagctgaccctgacccaggccgacctagagatgcaaattgagagcctgactgaagagctggcctatctgaagaagaaccgcgaggaggaaatgaaacaccttcgaaatgtgtccaccggtgatgtgaatgtggaaatgaatgctgccccgggtgttgatctgactcaacttctgaataacatgagaaaccaatatgaacaacttgctgaacaaaaccgcaaagatgctgaagcctggttcaatgaaaagagcaaggaactgactacagaaattgataataacattgaacagatatccagctataaatctgagattactgaattgagacgtaatgtacaagctctggagatagaactacagtcccaactggccttgaaacaatccctggaagcctccttggcagaaacagaaggtcgctactgtgtgcagctctcacagattcaggcccagatatccgctctggaagaacagttgcaagagattcgagctgaaaccgagtgccagaatactgaataccaacaactcacggatattaagatccgactggagaatgaaattcaaacctaccgcagcctgctagaaggagagggaagctccggaggcggcggacgcggcggcggaagtttcggcggcggctacggaggcggaagctccggcggcggaagctccggcggcggctacgggggcggaagctccagcggcggccacggcggcagttccagcggcggctacggtggtggcagtttcggcggcggcggcggcggctacgggggcggcagctccggcggcggcagcagctccggcggcggatacggcggcggcagcagctccggcggcggatacggcggcggcagctccagcggaggccacaagtcctcctcttccgggtccgtgggcgagtcttcatctaagggaccaagatactaacaaaaccagagtaatcaagacaattattgaagaggtggcgcccgacggtagagttctttcatctacggttgaatcagaaaccaagaaacactactattaaactgcatgaatctcccttcacacagaccattatttacagatgcatggaaaacaaagtctccaagaaaacacttctgtcttgatggtctatggaaatagaccttgaaaataaggtgtctacaaggtgttttgtggtttccgtatttcttcttttcactttaccagaaagtgttctttaatggaaagaaaaacaactttctgttctcatttactaatgaatttcaataaactttcttactgatgcaaact

SEQ ID NO: 1788 - protein, 561 aa, Homo sapiens
MSVRYSSSSKQFSSSRSGGGGGGGSSLRISSSKGSLGGGFSSGGFSGGSFSRGSSGGGCFGGSSGGYGGLGGFGGGSFRGSYGSSSFGGSYGGSFGGGSFGGGSFGGGSFGGGGFGGGGFGGGFGGGFGGDGGLLSGNEKVTMQNLNDRLASYLDKVRALEESNYELEGKIKERYDQHGNSRQGEPRDYSKYYKTIDDLKNQILNLTTDNANILLQIDNARLAADDFRLKYENEVALRQSVEADINGLRRVLDELTLTQADLEMQIESLTEELAYLKKNREEEMKHLRNVSTGDVNVEMNAAPGVDLTQLLNNMRNQYEQLAEQNRKDAEAWFNEKSKELTTEIDNNIEQISSYKSEITELRRNVQALEIELQSQLALKQSLEASLAETEGRYCVQLSQIQAQISALEEQLQEIRAETECQNTEYQQLTDIKIRLENEIQTYRSLLEGEGSSGGGGRGGGSFGGGYGGGSSGGGSSGGGYGGGSSSGGHGGSSSGGYGGGSFGGGGGGYGGGSSGGGSSSGGGYGGGSSSGGGYGGGSSSGGHKSSSSGSVGESSSKGPRY

SEQ ID NO: 1789 - DNA, 725 bp, Homo sapiens
gcagtttattccgacagttgtgttgtgccaatggtggagaagaaaacttcggttcgctcccaggaccccgggcagcggcgggtgctggaccgggctgcccggcagcgtcgcatcaaccggcagctggaggccctggagaatgacaacttccaggatgacccccacgcgggactccctcagctcggcaagagactgcctcagtttgatgacgatgcggacactggaaagaaaaagaagaaaacccgaggtgatcattttaaacttcgcttccgaaaaaactttcaggccctgttggaggagcagaacttgagtgtggccgagggccctaactacctgacggcctgtgcgggacccccatcgcggccccagcgccccttctgtgctgtctgtggcttcccatccccctacacctgtgtcagctgcggtgcccggtactgcactgtgcgctgtctggggacccaccaggagaccaggtgtctgaagtggactgtgtgagcctgggcattcccagagaggaagggccgctgtgcactgcccggccttcagaaagacagaatttcatcacccaatgcagggggagctcttcctggaccaagggaggagccgctcattcacccaacaaaactgtgtcttatctgccaggaaagaccagcctcactcctgggaactgtctggcaggtaggctgggccccccagtgctgttagaataaaaagcctcgtgccgg

SEQ ID NO: 1790 - protein, 154 aa, Homo sapiens
MVEKKTSVRSQDPGQRRVLDRAARQRRINRQLEALENDNFQDDPHAGLPQLGKRLPQFDDDADTGKKKKKTRGDHFKLRFRKNFQALLEEQNLSVAEGPNYLTACAGPPSRPQRPFCAVCGFPSPYTCVSCGARYCTVRCLGTHQETRCLKWTV

SEQ ID NO: 1791 - DNA, 128978 bp, Homo sapiens
gatcctacttcgcactcacaaatatggccataataaaaaaggaaaaaaatcaacaacatccttgttggcaaggatgtggaaaaattagaatcctcatacattgctggtgggatgtaaactggtacagccaccagtacctgactacagccataccaccacgaacatgtccaatcttgtctaaactttgatgtggaaaaactgatacggaaagtagtttgatcagccgggcacagtggctcacgtctgcaatctcagaactttggggagctgaggggggtggatcacctgaggttgggagatgaagaccagcctggccaacatggcaaaacctgtctctactaaaaatacaaatttttgtatttttagtagagccgggtgtggtggctcacacctgtaatcgcagctgctcgtgaggctgaggcaggagagtcatttgaacccaggaggcggagattgcagtgaaccaagatcacatcactgcactccagcctgggtgacagagcgagactccatctcaaaaaaaaaaaaaaaaagaaaaagaaaagaaaatagtttgatggttcctcgaaaagttaaacacagaataaccagcaatgccactcctaggtatatactcaaaagaaatgaaaacaggtatcaaacaaaaacctgtacatgaatattcatagtagcattattcataatagccaaaaggtggaaacaactcaaatgtccaccaactgatgactagataaacaaaatatggtacatccatacacaggaatattattcagccataaaaagaaatgctgatacatgctacaacttagatgaaccttcaaaacatcatgcttagtagaagaagccagacacaaaaggttgcatatagtatgattccatttacataaaatgtctggaataggcatatccatagaaatacaaagagatcagtatttacttggaacacttgggacaataacaaataaaataataaaaattttaaaaaagagtccaggcgcagtggctcacgcctgtaatcccagcactttgggaggccaaggtgggtggatcataaggtcaggagatcgagaccgtggtgaaaccccgtctctactaaaaatacaaaaaattagccgggcacgctggcgggcgcctgtagtcccagctactcgggaggctgaggcaggagaatggcgtgaacctgggaggcggagcttgcagtgagccgagatcatgccactgcactccagcctggctgacagagcgagactccgtctcaaaataataataacaataataataataataataataataattattattattattatttaaaaaagaaggagatcagaggttgccagagggtgaggagaaaggaaaatgaagagtggctgccaacaggtactaggtttctcccatctgagtactaaccagactcaaccctgcttagcttctgagatcagacaagattgcacatgttcagggtggtatggctgtagacaggtaccagcgtttctttttggggtgatgaagtgttctggaattagatagcggtgatggttacacaaccttgtgaatatacagacatgagccacataatgatgtttcagtcaacagaccgcatatatgacagtggtcctataacacagtggtccccaacctttttggcaccagggactggtttcatggaagacaatttttccatggactgggggtgatggggggatggtttcaggatgaaactgttccacctcagatcatcaggcattagttagattcttggaaggagtgcgcaacctagatccctagcatgtgcagttcacaatagggttcacactcctattagaatctaatgtcaccactgatctgacaagaggcagagctcagatggtaatgtttgctcacctgctgctcacctcctgctgtgctactgggttcctaactggccacagccctggggtttggggatccccgctataagattataataccatatttttactgtaccttttctatgtttagatacactaatacttatcattgtgttaaagttgcctatagtatttagtacagttagatgctgtacaggtttgtagcctgagatcagtaggttacaccatatagcctagatatgtagtaggctgtcccgtctaggtttgtgtaattatactctatgatgtttgcatgacgcatttctcagaacctatccttgttgttaagtgacgcacaggtactaacaactactgaactgtatgctgtaaaatgatgaatttcatgatatgtgaattgtatctcaatagaaaagagcatttataaagtttttgttgctaaatttatttactttcggtaaattttcttttaaaagatgtctatgttttactgtcttcgtggtgctgggacataactgacatctgaagccttgaatgcctctctttgcaaactcatttgttactactcagttaccatctcacctccaatacccaactgcataccaaacctctagccattactagaacacatactctgagctctgccatactttagcgcctgcacacatgctgtttcttctgctcagaaacttttgtgccttctgtccatcccatccaagcctgtttttcaatgcccaacacaaatgtcactggtaccctgaaacttcaactcctccttgccccatctcagaaaatgtaactttctgtattcttctctctgtatattcctctaaagtggtatttcttatactataccataatgacctggtcccatatttgtcctcttcttccctcttcatcccagactgggaccacaaggaggtagaactttttctgtttttttttttttttgagacagagtcttgctctgtcgccaggctggagtgcaatggcacgatctcggctcactgcaacctctgcctcccgggttcaagtgattctcctacctcagcctccccagtagctgggatttcaggcgcacatcaccatgcccagctaatttttgtatttttagtagagacgggatttcaccatgttgaccgggatggtctcgatctcttgtcctcgtgatccgcccgtctcagcctcccaaagtgttgggattacggccatgagccactgcgcccggccggaggtacaactttcttagtcaatcttgagcaccagtgtagtgcttagaatcgggtagtgagagaagctaacatttactgaatgcctaagaagtccagggcacataacagtcttcacaaccatcctgtgaagtacgtattaccctatccattttacagataaagaaacttgagtttcaagaaaggtatacctaaggtcattcaacttgttaaatgatggaatggaggagttgagaccagattggacttctgcctcttttttttttttttttttttttgagacaggctggagtgcagtggtgtgatctcagctcactgcaagctctgcctcccaggttcacgccattctcctgcctcagcctcccaagtagctgggactacaggcgcctgccaccacgcccggctaattttttctacttttagtagagacggggtttcaccgtgttagccaggatggtctcaatctcctgacctcgtgatctgcccacctcggcctcccaaagtgctgggattacaggcgtgagcgaccgcgcccagccgaacttctgcctcttaaatccagggttctccctgtcagtacagtgaggtggtaactagcaaaagctatgagatatgactgcctgggtacatatcccagctctttcacttatctttgtggctttacgcaaattacttaacctctttatgattgtttcttcatttgtaaaaggaagataataacagtgcctatatatagggtttttatgaagaataaatgagatagtatatataaagcacttagaacagtatctggcacatactaggtgctcaataaatgttagcgatgacatttattactgtcccacattgagctggtgtttgttaaacactggatgactggataaaatgtacatctttcatgcagagattgctcgattatccatttcactgattcaggatcagagtctcttaagaatccagagaggggatgttgaagccctaagaagtaaaaacactaaaatgataacattttgaccttttgaaaactctttgaagtggcaatggccacaaaattgagcggaaaccaaacatattcagccccatttccagataaattggatttgctaaaccactcagaataacaagagcaagaattagatgttcagctaagctctagcttctgatcctagatggtggcaataacaacgatagtattaatgataatagcagaaactcttaatatgtgtgaggcattcttctaaatgctttacatatattaatttaatgttcatcggagcagattctcctactgtatccaagagatcagaaattcagagcaaaaagcagattgctgcctgatagcagatccactctaggaatggggagattttctcataaatctaatgactggtgaaagtgacaagaggttagtccactcagtgttggaaaggacaagatcctagaaagtggaaatgctccactattgctttagggggaacagcctggctacaactgggcagactttctattactaacatcaggataatagggaagctcctgccaatgctgcatagaactaagaacacttagcagtgatggctgacttccaactgagccattaaggtaagtgtagaagaaagctccaggtagaaatatctttgggaactcagagaacacactgagtgtttgaagctggtacttaatctattattgaactcagagtttgccattctggggccaatttgagtccacttatgacacctcccacagcactgctcatttctgttaactgggcttcacagagggtgagaagggcagcaatcagatcatataattgggcctcattgtaataaaatgttgatttctgttgtccttggacttccttccagccacaatcactctatgatcttgtctgagattctttttcctttctctctccattttgctgactgtaatggaataatagcagaagctctcaatctgtatgaggaatatatatgaagaatgtgtaacattcactgtgtttcctaatagatgaattatctaaaggacacctcttaagaagagatgagatggagccaactgtcagaaaaaaaaatgggtgaagaaagtttcaaggagaagactccacagagcagaatgggaaagatggccaggagaaaagtgagataataaaaggaaaagcagtccctgacacagaaggtactcaacagctatttgctgactgaaagaataaacactaataagagaatgaaataccaggattataaagagggaacaaagatattttcccatctactttgttgttaccccacccaggatatatttaggttggtgcaaaagtaattgcggtttttgaatcgttaatagattaacatctaatttatgtattgtttacatacatacaaatacaaactacaaccatatatgatacatttaaagtaatacgctaggcacagtggtgcatatctatagtcccagctgaggtgggaagactgcttgagcataggagttcaagtccccttgggcaacatagcaagaccctgtctctaaacaaagaaaacaaaaaaagtgaagtaattaatgccaaacattgcaatcagggtttggtgcacttgaaatacacaaatgagtgtttttacatgctgaagacacagcaaccaacaactggggctaaagtgctgcattcctaaagttaacccacagagcctatcatgccatgccaaagttcactgctccggctccaaaccggggactttcctttcctatttcctctccctaacagcttagagctactggactccatccttgaactcctctgtttactaaaaatgttctttataagctatgaaatctggatttgaggtctggtttcttacttcaactttgcaactcatttcccaccccgagttcacacaatctcaaaatgttcatgaattttatggctagacctaaagcttctttgtgccttcctgccagcctgcctttgttttggtaccttctagcctatcctcactcacttgagtttttactctaattttctgtccagtcttcccaccactagtcccctatcaaattgcttgctggacatttctatatacatagcttgcttgtccttacgtcaaattcaaaactaccaagagcaaatccaatgtgtgttcccacatcagctcccctttctcacctccctggtatggttactgaccaattagaatgaatgtccaaccactcagaatgccacaggcaataggccaaatcagtgtactgggtccaatgtcagccctgtccataatccttctacccagctaaacttggaggaattgtctgttctcacagtctcccttcttcatctcttattccttccataatccatacatttttagccctccttccttatcataaaaattcctcctgacaaggtcaccaatggccttcttgttgctaaaaccaattaattctttttagcttttatttcacttgatcatccttggtaacatttaacaatgctgaccattccctcctccctgaaacactctccttagcttctctgacattatactcttctggttgcaatccagtcacctctggtggtgccttctcagcctcccccaaacctgcttttcctcaggtttcttatctcagtgaaagtcaccaccatcccctaagctcctaaaccagaaaccgaattccttattcttcttatttgcttctaaccttccttcagtcatggaatcctgcttattcttagtttgcttctcttcactgcctacattttttttttttttttttgagatggagtctcgctctgtcgcccaggctggagtgcagtggcatgatctcagctcacggcaacctccgcctccctggttcaagtgattcgtctgtctcagcctcccgagtagctgggactacaggcacgtgccaccaggcccggctaatttttgtatttttagtagagacagggtttcaccatattggccaggctggtctcaaactcctgacctcgtgatccgcccgcctcggcctcccaaagtgctgggattacagacgtgagccactgtgaccagccttcactgcctacatttttaaagcacttaaatatgtgctaggcaggtgtgttctaagtgatttatcctcacaataagcccataaggtaaattttattatctccaattttcagattaggtaacagaggcaaagagtggttaaataacttgcataaagtcacataactactaagtggcagagcaggattcaaacccaggtggcctgactcaattctggatccaggtcactatcctatctcactgaaatctctgcaacagcctccttggtttccagccttccatcatggatggcttccctgtagccacagtgatctttgttaaaacagaagtctgactcttgctactcttttgcatgaaaatctttactggctctttattgccttcagaataaagtctacactcaatatgacattcagggacctccataacctagccagaaagtgtatacttctttggcttcatgtttttggtttttggccccattttaaccacgaccctaaaagctccactagcacaatgatagcctatacttccaggtttctgcactgtttgatgtgccaagaacactctttcccaccttcacattcgacgacttctgataagccttttctgatttcctaagaccagggtatatgcctctcctgtgagctcccacagctcccagttctaattctcactgtagcatttatttcactgtgttatatgattctactacccatctactaatattaatatctgctttatcacaagattgtgagcttcctgagaatgggaactgtgtaggattcactgttgtatcctcagtactcactgctgcctacctggtgcacggtaggcaatattcatttaatgaataaaactttattgtctatatcacactctttaacacttacttatataatgccctatattgattttattttcatatgtgttagcctgatctttataaccagaatgtcagtttcttgaaagatagcaattatacccagtacttcttttataaatttatttactcttaggctgggtgcagtggctcacgcctataatcgccaaattttgggaggctgaggcaggaggatcacttgagtcgaggagtttgaggtcagcctgggtatagtgagacctcatctctataaaaaataagcaagattagctgggcatggtggcatgcacctgtggtcccagctattcaggagagctgaggtgggacggcttgagctccagagcctgaggctacagtaagccatgatcatgccactccagcctcggtgacaaagcgagatcctgtctcataaaagaaaaaaaaattatctttagagatggggtctcactctgtcccccaggatggagtgcagtgtcatgatcatagctcactgcagccttgaactcttgggctcaagagatcctcccacctcagcctcccaagtagcggggactacaggtctgtgctgccatgcccagctgattcttttatttgcagagatgggggtctcactatgttgcccaggctggtcttgaacttctgacctcaagcaatactcctgcctcagcctcccaaaatgttggaattataggcaaaacccaccatgcctggcctatacctagtacttacaagttaggaggtactcacaaaaattcctgataacagctaacatttattcagggatcaatgaatgtcaacaatccaatgattttggtaatttttctctctctctctgcctccctccatatgaggaaactgagccatagtttagtagcttgcctaagatgacatagctaggaagcaacagagctgggatttgaatcctcatgttggtgcctgcattcttaaccactatgataacaggctaagaaagcttaaaattatagatgctaagtaacttacctaagatctttttaaacatttaaaaagttttttttttcctttgttagtaggcaaggaactaagatcatagtgcagtgctaagactagaacccaagtattttcaaaggctacgctcggctgggcgtggtggctcatgcctataataccagcactttgggaggctgaggtgggtggatcacgaggtcaggagtttgagatcagcctggccaacatggtgaaaccccatctctactaaaaatacaaaaaatagctgggcgtggtggcgggtgcctgtaatcccagttattcgggaggctgaggcaagagaatctcgcttgaacctgggaggcggaggttgcagtgagccaagatcgcaccactgcactccagtctgggcgacagagcgagactctgtctcaaaaacaaaaacaaaaacaaaaaaaaaccccaaagcctacgctcataaattatttggtatactgcttctcctactttaaaagtcagtactaagctcatactgggtgttaatacattttaaaactgcaaatccagtttactgaaattggagaatatcagatccccttccaagagaggcataattgtagcttactgggtgaattcaccttttatattgacagtctagccttatgaaccaattaagtttgtagtttctgcattcttcctgtgacactgaagactgttttcatcaatgtgaaaaccatgttatctaagctaaatcaaaatccactctcattcagaatttattcttccttttatttctcaacaccagtgacatgttcccaagttctctgcctttgtggctccttagtttccagtgtggaatgtcttatttctgaaagcaacctgtgattgacaagccttcttggctattctgtagtttaccctaaaaaaaatctgttctctctgtcggctcattagactgcttttccttacatggtactctgcttttcccctttatttcaagcatttattaaaactaaactatgtaccaagcatacacaaaatggatataacctaactctttgaaggctacacttcaaagaaacagccttggtgtttacatattttgactagaatattatttccctaacaagctgcataaaaccattcctgctcagtttgtaattatacaccaaaatattgagcacaatttcagtagctacttctacagcacatcatataaagtgaattgctggagccaactcattaggtcttattccaaagatttttaccaacactttggccctcttttgctgacaaaaaaggattcttaagccttttaacagctttataacttccttattagagttcactcactaacatatcctgttaacaaaatgaagtgcccatccttcttgggaaacactctggagaatatttcctgatttcatcgcacagctttgtctctggattagtaatcatctaatacgaaactgaggatatgagtattatgtttcacaatgttgtcttcaaggatataaacaactcaaaatttaagtatttgagtagcactgtatcacattattattgccgtgatattttcagaagaaatctgaagtctgcgctaactacaggccataaaatatggccatcttgccccaataaatggagcaaagttcaaatctggatcatcagaaaaagacaagaggcacatttctaaaccaaatctgattgccttgaggaaggaaggtactgaacctgttagagtacatctctgaaggactgagaatcaagtccttcattccctcgccccctaaaaaaatccaatcaatcatgctgataaatgtcttagttacaggggagaaaaaatagacatgactaagctgaaaaaaatcttctggctttgtatcttttctaggcagtgctgttcctgataagacacatgacacaaaatatggttttgctgagtatcaaggtaagttagggaaaatagtattttttaaataggaaaattagatgacaacagcaacaggtaaagaagccttgggcttctgaggtagaaatactagcatccctacataggcatggtagataatctgaaactagtacaagtgctggcctgttatagcctgtctctaccgtaatcagagggaaaagtattacaatccagcaaaagtagcccttcaaaatctaaggaggagcatttcatcagatatcaataaatgaaccctcgctgcatacaaaggcaatacattacgtgctgagtgaccaacttcaaagaaccttctgctgttctgaaatttaaaactactctcatttcctcaagcctgtattttatgtaatgaaacaaaatgcacatcatatgtctcctgctgcactgtaagagtaaacataggacccctcccaccaaaaattgtgcaaagagcccttccccttcagctttttgctatagaaatatcctactacttccctgaaaatagtatatgctttctttggcaagtggaatatcaccctgttactctctcccttactctgcttcactttttttcgcataacgcttaagattacctaatattttacatgtttatcatgtctctcccaattagaatataagcttcatgagggcagagatttcaaatattttgttcacagatgtattcccagtatctacaactatatttagcatgtagcagattctcaaaaatatttgtaaaattaataaaatttaaaaatccctattatattggaattgttaaattaaaaaaaaattttggccaggcgcagtggctcacacctataatcccagcaccttaggaggccaagacaggcggattacgaggtcaggagatcgagaccatcctggctaacacagtgaaaccccgtctctactaaacaaaatacaaaaaattagccgggcgtggtggcgggcgcctgtagtcccagctactcgggaggctgaggcagaatggcgtgaacccaggaggcggagcttgcagcgagccgagatggcgccactgcattccagcctgggcaacagagcaagactctgtctcaaaaaaaataaattttttttttaagacagggtctctctttgttgcccaagctggagtgcagtggcatgatcacaggtcactgcagcctccaactcctgaactcaaatgatcctcccacctcagtaggtgggactacagatgagtgccaccacacctacctatttttttttttttgtagagatgagggtcttattatgttgcccaggctggtctcaaactcctgggctcatcctcccaccttggcctcccaagtgctgggatttacaagtgtgagccactatacctggccaaattttaaaatgctaccgtatctgtgtatgaatatgtgtgaataaatttacagactctagggtgtaattcacagggtagaccaagtcaagagtcagaggatcagaagcttgggtggggagataggagagtgattgcaaaaacaaagcaatctatcttattaaatggacgaaagggatcaaacattatcagtaaactattttaaagagtgaattaaatgtatctctctatcctttctatgagtgtagtgaattcagattcacctcagattagttgaattgacactagttttcttccctgataaagcttttaaaatttatttagtaaagtggccaggcatggtggctcacacctgtaatcccagaactttgggaggccaaggtgggtggatcacctgaggtcaggagtttgagaccagcctggccaacatggtgaaaccccatctctactaaaaaaatacaaaaaaaaatttagccaggcgtggtggcgcacacctttaatcccagctacttgggaggctgaggcaggagaattgcttgaacctgggaggtggaggttgcagtaagccgagatggtgccactgcactccagcctgggagacagagactctgtcccccccacccaaaaaaaaattagttgttttcctccttaaattacagcctgcaagattgaaacagagtttccccatttctattttgggatctgactgagtcacaaggtagtcttgacgaatcactctgctctatctctcagtttactgaggctgcctgggaacttgagctgtcagccaaacaggaagaagggcccttctgcctactccaaaaggcctcagtcaaatggatatggtgagatttaatgatggatataaattacagcaaatggatttcctatagggtgagggaaaaaaaaaaaagcaaacattttacttaaattcctctatacaatttagggctggcagaaagggtagactattacaatgtagctgagcaaatttttccatgtttgcataacatgtgttttcaactaaagatactccttctatagtcctactatatacaacaccccaaaaaacctcaaatgtaagaaaaagcaatgtgacagatttgaccctggccaagttacactgtttttttttttttttttttttttttttttttttaagtgtcagtgttcataaaggccctttttctttttcaaggatgggtataaagtgttactcggccgaacgcggtggctcacacctgtaattccaacactttgggaggccgaggcaggtggattacgaggtcaggagttcaagaccagtctggccaacacagtgaaacccccgtctctattaaaaatacaaaaaattagctgggttgtggtggtgtgcccctgtcacaaggtagtcttgacgaatcactctgctctctctctcagtttactgaggctgcctgggagctgtcagccaaacaggaagaagggcccttctgcctaactccaaaaggcctaagtcaaatggatatggtgagatttaatgatggatataaattacagcaaatggatttcctatagagtgagggaaaaaaaaaatccagctactccggagactgaggcagaattgcgagaacccggcaggtggttgcagtgagccgagattgtgccattgcactccagcccgggcgacagtgtgaaactctgtctcaaaaagaaaagaaaagaaaaaaaaaaaaactattactccactccccaccagaaactcttattttttcccccctatgtggtcatgaattcctcctgggtgcatagctccctaagttgttctgtgttttagtgcttataatttcccacatcccatgatgccccttgatagaattattttttctgtactcacacaaatggaaacagaagagatgaaaaaccctggggatgcggcctcgcaggtctcaaactgatcggctgctaagcacaacctgcatatctcttggctgagttcctttcttggctcagttagattttgcatgacctaggaggcttaggacccagggggcgcctttcagctgaaaaacagctcgcgctgcagcaagctagctgggaagctcccagttctaaagagaggctgtttaccagaacagcataacaagggcaggtctgactgcaaggctgggactgggaggcagagccgccgccaagggggcctcggttaaacactggtcgttcaatcacctgcaagacgaaggaggcaaggatgctgttggcctgggtacaagcattcctcgtcagcaacatgctcctagcagaagcctatggatctggaggtgagattacaatctttcctttccgcagcaacttcatgaaacagaaggggtaaagccccctatttcccaaacagggccaggatgacaggaaacgaagcgtttagccggtttctgttgtcccgtgaaagcttttccacccctcctttccttgtcaggggcttgcagctccatctttgccattaagaacaaaggcaagaagccactttctctctgcctttccttgctcatgagtggatggagcttgggggttcatctcccctactccccaagtcctgttctttctaagccctttgcatggtgtggtcctccttccccagcctccttctgtggttctcctgcagaggggagtgggagcttggagtctcatccagtcagcgatgaggccggtttcctccgtttgaggctgtcttgaatcttttgcctgacggagtcaaggctcctggagaattctcctgggagggagtatttgccttttaaacgggcagaaggtggccgtatccgtgaaggaggaaacaccggagtttatgtaacgtggccattacaacacagggacaaatgtcacgtctgggcgccccccgtcccaaaactcccagctcctcaaagggaccctaagccaggcctcctcctctccatctcctcctccaaagtggtcacaagttcaagagtaacaacgctttgcacttctgcagcgctttccaggtttcaaaaataaataaaacctaacagtctctgagcgttgactgggggacaggcacaggctgggggcttcacaccctgaggtgtgcgtggagttggggggggggggtgcgtggggcgtgggggtgttgccacgagaggagagggaggcccagcagggcccggggtcccctaaccaggctgaggttcagcccgggtggtcccggctcccctgtccgccacgctgggcgtcttccgttcgctgcccgctattctgtgtccgggggcttcttttcctcacaggctgtttctgggacaacggccacctgtaccgggaggaccagacctcccccgcgccgggcctccgctgcctcaactggctggacgcgcagagcgggctggcctcggcccccgtgtcgggtaagtgtcctccgggggacggccccggggctggcgggcggcggccgcgttcccggtgccagccccggcacacatttccttctctcctctcttaggggccggcaatcacagttactgccgaaacccggacgaggacccgcgcgggccctggtgctacgtcagtggcgaggccggcgtccctgagaaacggccttgcgaggacctgcgctgtccaggtacctgcccgggaccccgggaatccccgctcctggcgctgacaggaagcggctgagacactcgtggcgcacgtgcggccgcgcgatgccggccggccccgctccgcctccgcgccgtccgattggccagggctgtctccaggccgcggggctcaaagcctattggccgccgccgccactcgtatgagctcatccgccgcgagcgcttgtaaacaactgcgcggggcgaggctggggtgaggctaggtctctccgccgcgcgtcctgaggagtggcttttggcccctcagcgtttattgaccgtttgcggagcgtctgcagtgtgctagacccacactgctcacaaccccagctccccaacctcccctgacacacaccgcgggaagaagtcgtttgaggcatctgagcttcagagaagttaagcgatttaccaaaggcaatggcaggggacagatttgaattcacgtttcttagattccagagcgcaggctttttgctcccaaagcagcaagagagttttctaggtttaaatgggataatcaaaataaagcatttattttttattttttattttttgagacggagtctcgttctgtcacccaggctggagtgcagtggcgcaatttcggctcactgcaacttccgccttccgcgttacagtgattctcctgcctcagccgcttgagtagctgggataacaggcgtgcaccaccacgcccagctaatttttgtatttttagtagagacggggtttcaccatgttggccgggctgctctctaactcctgacctcaggtgatccgaccgtctggcctcccaaagtgctgggattacaggcgtgagccaccgctcccggcacaaagtaaaacattttacctaaggactggcacagagcgtacgcttagatgtgagctgctcaaaggaagcatgggttgtttcctgaagtagaagtggggggaatcccctgcagaagaacgcaaccgagaggggccttgggaaatagcaaggatttggacagataaagacgtgggaggtaggagagaagcccttccctacggccttcctctctcatttgccttgtccctgagatggttcagccctctcaggcctgatcttacctctggggcagaatttgactttgggttgtgtgtggggggaaattcttaggtgacccaccttcatctaccctaacactcaggccaggttcagctgtggaattcactcagggcagtccctgatgagagctgtttcccacctcatctccagagaccacctcccaggccctgccagccttcacgacagaaatccaggaagcgtctgaagggccaggtgcagatgaggtgcaggtgttcgctcctgccaacgccctgcccgctcggagtgaggcggcagctgtgcagccagtgattgggatcagccagcgggtgcggatgaactccaaggagaaaaaggacctgggaactctgggtatgacggtcccccacccctgccctcgttgggattcatcaagagatgtcatttgctgattgtctagggtgtggctaatgggaccttgtgtcctatccttggcaggctacgtgctgggcattaccatgatggtgatcatcattgccatcggagctggcatcatcttgggctactcctacaagaggtcagtagcttctcttctgggccctcttaggaggaggggaggaaggtacacaaagtcaaactttgtggctttcttacccaaaaggaagcaagatgttgaaaatcagctcaagatgtagagacttggtcctagtctttatctgctgaccttggacaaaccctttcctttggtgcctttacacctcacttaaaagccttgtgagggatgttcttgttccgcattttacaaatgaagaagcctctgtcagagacttgctcaaagtcacatagcctaggagtggcagaacctggattcagacccagctcttttgatagcaaattccctgctgtctgatcccacatgcctggcattgaagtgagtggcactgcagaaatcaggcttgacactgattgcagggaccttaagaccaaattctttctgtgagttataaaattctgctactagaaaaggtttccagccactgttgcagttgaggcttaaatttcctgagctataagcagtgggatctcctctgctagggaagaaaaaagtgagttggagaacagaaagtctgtttgccactcttcaccacgtgtgagaaagccaaagaggctacttgtgaaactcaaggacatgacctgtggctgggacagcaggagaagaatgcttattttgaaaggtcccacgagatgtccgtcagtgactggtgcatgatggtaagccagactggcattcatctttacagcactggctgattgtggaaaattatttgccattcttgggcaaaatcgggggatttgacttctagccctgggtgtctgtaatattctcctctgtggtctgagaaaacttcctgtgaggaaagtgacacagtagcctgcatttttccttcctttcctccctccctccctcccttccttccttcccctttctttccttcctttctttgatttttttttttcagggtctcgctctattgcctaggcttgagtgcagtggtgcgatcacggctcactgcagcctcaacctcccagggcgcaagtaattacccccacccacccccactgagtagctgggactacaggcatgtcccaccatgcctggctgatttttaatttttttatagagacagggtctcactgtgttgcccaggctagtctcaaactcctgggctcaagcagtcctcctacctcagcctcccaaagtgtataggcatgaaccaccatgcctggcatgcagcctgcattttccagtgatgagggccatgtctgagcccacagcctcagtggatcacccagcagggcatctttaaaggccttgtagtcaacctcctcattacagatgaaaaaggggaagtttgggtataataataacagcagtagcaaacatgtaccgtatgccagacactgcttgaagcacatgctttaactcataatcacccttatgaggtaaatgctgtcatctccaatttacagatgaggaaactgaggcaagaggggattatatacgttacctgaggttacacacctagcatttggtggagagaagtcctttaactagctatctctgtgaccctgggcaaattgcttcaatttcctactccacatcatggtgtggagctatggcttttgactacttagctcagggtgtggcacatagtaggtggtcagtaaatgatggctgtttttcttttctataaaatgtgtggctgggcgtggtggctcacacctgtaatcctagcactttgggaggccgaggcgggcagatcatgaggtcaggagttcgagaccagcctggccaacatagtgaaatcctgtctctactaaaaatacaaaaaattagccaggcgtggtggcgggcacttgtaatcccggctacttgggaggctgaggcaggagaatcgcttgaacctgggaggctgaggttgcagtgagccgagattgtgccactgcactccagcctgggcgacagagccatactccgtctcaaaaaaaaaaaaaaaaaaatgtaggtaatggaccaggcgtagtggctcacacctgtaatcctagcactttgggaggcagaggtgggtggatcgcttgagcccaagagttcgagaccagcatgggcaacatggcaaaaccctgtctctacaaaaaaatacaaaaattagccaggcatggtggtgggcgcctgtagtcctagttactaaggaggctgagatgggaggatcacctgagcctgggaagtcgctatggtgagccatgattgtgccactgcactccagcctgggtgacagagtgagatgctgtctcaaaaaaaaaaaaaaaaaaaaaaaagtgggtaatggactagtactctctgatttcttatgatgcaggaagcagaggtccagagagggaaagtattgacttgagaggacatcctgacgcccagtctgaggttgtttcccacaatgggatgcttgacatgcaggtccagggacacctgcttgttcatttcagagttaatgacatagtggccctggccttacaattcataagcagacctaagccacattggctgagtttagtccttgaactatctcctttttcctcagccacccaacagcatttggctgtcctgcaatcctgtgacagtttccaggccttccaggtgcttgaactgactaaacattcttaattctgagctcagttctggtgtccagtggaagtcttttttcttctagatttgttcctctaggctgtcacgagactgccctgaggcctaaaatttattttcctgtaaactcagggcaaggcacccagtcatcagactccccgtcactaacgaccagatcacccctttcttcagcagaactgctctgagaacagactgtacaacaggaaaccgcatgtgggcttaaaaacaagcttgcagccttcatctcttcctaaagtcagagagcagagtgtcctgaaaagagctgtaggttgagtgtgggttcaggtgccctctgagccttggtatcttgtctgttaaatggggatatatcctccctccacatctacccatctaagattataagtattaaatgtaaacagaaacaatagcacaccaatcaggtaataatcacaatagcagccaacatttatttcatgctttcttaataagtaaggccctactgtatgctcttccctgattatctttttttcttaatttttttttttttgagacagagtctcgctgtgtcggctcactgcaaccgccgcctcctgggttcaagtgattctcctgcctcagcctcccgagtagctgggattagaggcacccgccaccatgtcctgctaatttttgtatttttagtagagacggggtttcaccatgttggccaggctggtcttgaacttctaacctcaggcaatccacccgcctcggcctcccaaagtgttgggattataggcatgagccactgcacccagcctcctgattaccttgactaagcctcacaaccacactaggagcactgttagattttacagtgaggagctgagacctagcagagttaagtacaatggccaggctacacagctagtaatgtatgtctgaggagtattagtatctccagcaagtccagtgaggccaagtagcctcatgtaaatttgctttgaattgcaaaggaaagtaggaaaaatagaaatttaaaaaaaggctgggtttaaagtcagaagaaacaagatctagttctggaactttcacctattctggatgtgacactggacaagttatttaccttctctggacctcaatttcttcatctgtactgtaagggggttagatatggtgatactcccaactctatttcctaaaaagacaatattgccggtgctaagactgggttcaaatcccagctctgccatttgcttgaacaaatagtgtaacttctctgcatctgccttcctatctatgaaacagatcaaaatagataccacataggttgtgaggatgaaattggacagtatagtttaggcatacaattggtgttctatagcctgggagaggaagttggaggcagcatacagtagggccttacttattaagaaagcaggaaataaatgttggctgctcttgtgattattacctgtagctgccttgggaacttttcctgagcagcagtgtggcacagcactgcctctgactgggaaaatagcagcggctcagagtaataattgaagacgacctgtgtagtctgaatgaggtctgtggtgcttccatactctgggagaggaagttggaggtaggcagcagcttcctctacacctgctctctctggccagctcagctcccagtcccaccctggccttggagcaagcagtcagggtaggtactgtaagccttgagctctgccaaaggccatgaggcttgcctaatgggatggagcttttccctggctgggatgggtgggcaggcaccaggcttcctcttagggagggagggctgtaaatgggggtgggtgggagctcagcctggccgggtctttgtcctggtagtctaggccacgaggttcaaatggccagtctgtgactgaggagctaagtgtactgtctgcactagcttcagagggaggtcttattttctgataaaaaggggagggaaaaactgtaagtcaacaccactccactcccttaggagaggaactaagtcagtgaacaagccttttgttctttcttggctgccacacaacacccaggctaaccaccccctacccccaagcagtgagaaggggctaggctgcctgatggtcagtgtagcaggcctagtggcctctcaaaggtcacccaagggagctgggagcagccactgcatctctaggactcacaggcaccattaacagcaggcacatgggattgagtgtgcttccaggcttccaaatggatgagactaatccagactagtgccagcatctgctttctttacccttgactgctcttccagccctgctctgcctcattaatacaaattgatttttttcccctaaagacttgtatatgatgcagcctggccattagcagcagctcagctggccacaggtaaaggaggttgctgaggaaagcaaggcgcggaagttaaactcaaaagcctcagtttcttcatctataaaacagggattaggctgggtgtggtggctcacgcctgtaatcccagcactttgggatgctgaggcgggtggatcacctgagatcgggagttcgagaccagcctgaccaccatggagaaaccccatctctactaaaaatacaaaatactctgggcgtggtggcgcatgcctgtaatcctggctacttgggaggctgaggcaggagaatcgcttgaacctgagaggcagaggttgcagtgagccgagattgtgccattgtactccagcctgggcaaaaagcacgaaactccatctccaaaaaaaaaagcctgtagctgacatttagtagatgcttattaaaagtaataagcatctctgggaggctgtctcacagcaggatgatcaggtcagttttctggacaactttatgggttaggtccgaagttcagatagttctctgggtctctggggctgaaagaacaaaactgtgtcttgctttaagagtctctatctggccaggtgcagtggctcacgcctgtaatcccagtactttggggggtgggaggatcgcttgagcccagtagtttgagaccagcctaggcaacatgttgagaccctgtctcaaccataaaaaaaaaaaaaaagtctctgtcctttactttattttcattgagccccggtgaagctgtatgaagtccatactgctgtcaccctattttacagatggagaacctaagaccagaggtgcaggagcttcttgttgagtttaacgccgtcttgcagaatggatatcctagaatcctggacctgagtttgggtcctggctcagccactgatttgttgtgacaatggcaagctgctgctcttgctgagcctcagggatgctatctaatgagcaaagctatgcaggaggcatagcctgaatgtttgtttgtttttttcctgccagggggaaggatttgaaagaacagcatgatcagaaagtatgtgagagggagatgcagcgaatcactctgcccttgtctgccttcaccaaccccacctgtgagattgtggatgagaagactgtcgtggtccacaccagccagactccagttgaccctcaggagggcaccaccccccttatgggccaggccgggactcctggggcctgagcccccccagtgggcaggagcccatgcagacactggtgcaggacagcccaccctcctacagctaggaggaactaccactttgtgttctggttaaaaccctaccactcccccgcttttttggcgaatcctagtaagagtgacagaagcaggtggccctgtgggctgagggtaaggctgggtagggtcctaacagtgctccttgtccatcccttggagcagattttgtctgtggatggagacagtggcagctcccacagtgatgctgctgctaagggcttccaaacattgcctgcacccctggaactgaaccagggatagacggggagctcccccaggctcctctgtgctttactaagatggcctcagtctccactgtgggcttgagtggcatacactgttattcatggttaaggtaaagcaggtcaagggatggcattgaaaaaatatatttagtttttaaaatatttgggatggaactccctactgacctctgagaactggaaacgagtttgtacagaagtcagaactttgggttgggaatgagatctaggttgtggctgctggtatgcttcagcttgctggcaatgatgtgccttgacaaccgtgggccaggcctgggcccagggactcttcctgtttcataaggaaaggaagaattgcactgagcattccacttaggaagaggatagagaaggatctgctccgcctttggccacaggagcagaggcagacctgggatgccccagtttctcttcagggatggatagtgacctgtcttcattttgcacaggtaagagagtagttagctaacctatgggaattatactgtggggccttgtgagctgcttctaagaggctaacctggaaactaagctcagaggcaaggtaataaagcacttcagggcttgctccccaagtgggcctgatttagcaggtggtcctgcgggcgtccaggtcagcaccttcctgtagggcactggggctagggtcacagcccctaactcataaagcaatcaaagaaccattagaaagggctcattaagccttttggacacaggaccccagagaggaaaaagtgacttgcccaaggtcgtaagcaagctactggcatggcaagagcccagcttcctgacggagcgcaacatttctccactgcactgtgctagcagctcagcagggcctctaacctgtgatgtcacactcaagaggccttggcagctcctagccatagagcttcctttccagaacccttccactgcccaatgtggagacgggttagtggggctttctatggagccatctgctttggggacctagacctcaggtggtctcttggtgttagtgatgctggagaagagaatattactggtttctacttttctataaaggcatttctctatatacatgttttatatacctcattctgacacctgcatatagtgtgggaaattgctctgcatttgacttaattaaaaaaaaaaaaagactccacattgccaagtttttgaggggtaacaggaaccctccgtgtaagttgagaagctttgggttaccttgtcaacacctatgtggcaagctctgggccttttcttcattcatcctcgccctgttactggaaagtgacaactgcagcctgtgtccagatttttttttttgagatggagtttggctcttgttgcacaggctggagtgcaatggcatgatctcgcctcactgcaacctctgccttgtgggttcaagcgattctcctgcctcagcctccagagtagctgggattacaggtatgtgccaccacacctggctaatttttgtatttttagtagagacggggtttcaccatgttggtcaggctgttctcaaactcttgatctcaggtgatccacctgctgaggcctcccaaagtgctgagattacaggctagagccaccgtgcccggcttgtgtgtccagattatcatcatcaggaatctttcaggttgaagcaggaaagacaggtgtgcaggcgtcccaacaaggtggttggtcattgcaaatcctctccccttcagcaattgtttccaaggtggaggtagttaaaatgaatatctagacagcccttgttaaaggctggagtgcggcaggggttgggtggtgggtgacgggggtggtgctgcagcagccaaagggggaataactgcagaggaggaagggtcactgggctgcctgcagcagccctgggctgaggaagttccctgcaaggtgactactatgactccagaagaaaagataccaacaggagtgtctcctggacttttagcaagggatttcagccacaggttatcagcctcaggaacacccagatgacctctgcccatgcccagccattgctctgtggttctgccagcaatgcgtactccagatcatcagtttttttcgggaaccatattctgtccttaagttggattcttcaagctttgagagtgcctgggagaaaacacctttgggtttacagatttatattgtgcccaaggccccactaaccagatagcattgtccttcccaatggtcactcttctacgacatcccccacatgcagaagcaagaagaaactggtcttctcctctcaagcacttgtaaagaaacacaaggggtggggtgacttgcattcatttcttcccattgcaaaggtggcacccagcactgaggaaagcaagccaggatacccaggctatggaagtattcatatagagaggatgaaagggtagggctcctaaggaatgactcagctggcatgtgagagccaggccaggaaaaggtcatagtcagtcacacctgctgcaaggaaggggctgcctcaggtgggatgtacatattctctagagcagatgggtgtctgcttgagggttttagacttgggtgcatgaaaactctctgctatggggagtttgtgtgggctaggccagaaggtggctagcagaccctctacatttatgtccctgagccaatcatgttttcactctccatattgccagttatgttaactgcttaatttatttagtctgatcaatggcccagttcaggcccaccactcctacacttgctggggacagccaggaaacaaccagccacacaatgctgaactgtgctgctgctgggagtccagggctcagccctaaagcaagcttgcaaacttcacacataagtacagtctatatagcaagtaaactctgaccagagatgacatctggtcccacaactcatcaggtctatgtacaatatttcacataccacccaatagataagataatattaacagcaaccactctcctttatcaattccccctgctccaatacaaccaccacacattgcattaataccccaaacccattcccaatttattaaatatggtgcaagctcatagacacttagaagaggcaaatctagttgtgatgaagagttcctagagctctgggagccaagatggaggttttccagtacctgcacatgtggctcaggaggatgctgcccaggagctaatgagttgggagagcaaacatgggaggtagaagtcagatggcccagctcagggagctatctctctcagcatctcagctttgagactctgccaccacctcttcccagcccaagctgctgcctaaaccaggcatgttgaagggtgagcagtggttgccatgaagccaagaccaagagattgctgagactcccactcccctccctcagactctaggcctgtgacaagccacactgtcctccagaacccatcgagctttaggcaaaatgttttaggcatctgactaaggagcccacccgagtatgagtaacagaagccaagatctgagctttctagagggcagggcctctttctagtcccccagcctcttcctttgcttgtgactgtttgtttcagacagaaaggatgttgtccgtaagttctcagccagtctccagtattaagtttgaaaacatgaggtggaggcttcctctcacattgatgtggtccctgggctggctagagccagtgagcaggtaaacagaagccagccctttctctaactcctggcctgttccaccacatattaagggactcttcaaaacctactccctcaaccttgctccaggaaggacaggatctggagtagaaagggggagcatcactgactttttcacaccctttgagccatcagtctttctttcgtccacacacttgaagtcctcctgcacccagctggactagtgacttcagagttcacaggcaggttcaccctgggatcctgcccagcaggtccaggtcacgctgattagtgtaagcaagagcctcccacaatccactgccagggagttcctgggtggattcgagtaacagattcctcctggcccaaaggccaggggtttttttcttcttcacagctttcaggcaagtattggatttacagacagtaactaggccccagaacctgtggagatacatttccctggtgctgcgcccacttgcctcctggggaggtaataggaatggcttgttctgcttctaaacattccgccaatccacaggaagcccggacggccctgctcacagcaggaatggggcacagaggggcaatgctggctgtagaacacccccctgcagggggctgggccagggctagggaggtgagtcccgggtcaggccgtactgcatgctcacagtgtggtccaactcctccagctctgcaggcagcgggatgcccagctcccccaggtacagggagagggcctcaaaggagtcctccaatttcgagaatgctggtctagaaggaaaagaggtaaattagaggcaggtggaacatgagcagggccatggggtgggtggaagggatctaggctcagctacttcctggttgtataacgtcaggcaaactccttcacctagtagtgcctctgtgagaaatgggcataatgttaccggtacctcatatatttgctataaagattaggtaacactataacaaggctggactagctggagttaatacttaaaaacaataggagaaaaacttccctcccatatcttagagaaaatgcagttatcaaaggtggaatcggaaacaccaggctcctagtgccacggaaatggcttggctgccccggaagcctaagacagctcaggcttactcctcctcctccatgtttatgcttaaatgtcatgtcacctcagtgaggcctgctctgacgaccatatttaaaattgcaactggtaccctgaacaatcgtctttacttgtcttgactctttttccatagcatctgccacattctaatattcaatatagtttacttattgtatctactgtatgatacagtagataccatgctagaatctatgttctatgagggtaagcacctttattttgttcgctgctgtaacccaagtgtttagaactgtacctagcacacagtaggcattcaatactgtatatatatattttttaataaattaaagatatttagaatgacaagaggtattagaaaacaaatactgtgtagcttcacaatttctcctcaagcttttacactggtgttactgaaggactgcggtccttggcctataaaggaacaaggtatagattctcccaccagaaaatttcaactctaatgtggaccgctggaaatcatttttttttttttttttgagctgcaccaaaggcgtaccctacctcgctttattaaagggcccgtgccgcagagtcaatataaaaacacaaagtcccatcagtttaataacaataaaaaaatccaaaagtggaaaactgagggggcaggggaagagacccctgggccaggggcacgaggagccctgctcatggaaccaggcctggccgcagggtcccccggtattgctgttgctacgaggtcggggggtagcgattgtcctatgggagccaccgttcgcctgggtcggggaccctcacttcttctggggtgtgctcagcttctgcatggcccggatcttgtccagcaggccagagatgaaggcctctgtgggtttgtaacagtcaaccagcagctccttgaccctggaagcccaggcatcgtcactctccatgtccaggagctcatccacgtcaatctctagttctgagatctcctcttcctggcagtcgtagaggcgcgtgagctgctccaggatccactcctctaggttgaggtgcttccgtagctccttggggtcatacttgatggtgaccttcccttggcgcctcactgggccctcatcatccgcgcagcccgggccctctcctgcggccccggggggggctctgaaagtagatgcgtggtccttggccgccactgcctggcctgggggccggggccggggccgccaacgccgcgccccccgcggtgccgctgtccgccacggcggcctccggggccacgtgcgcgcgtggggcccctccttgtgccgccgcctccgtgacgcccgccggctggctcaggttagctcgccggctccgcggcgagggcggcggcgggggcgcccgggggcagctgcagcatgcggagcccccgggcctggcctggtcgcgccccgccccctccccgccgatccgcccgccctttgtcccctgcggccgccgccggggctgccgccgccgaagcgctttctctatccggaaaccatttttaaataaagattatgtcccaactggttatcctgggagggtggagttgggggtgaggagaatgttgagggatatattggttaagggagattacagaagacgtatttcctgtgctataaactttggtaatgtttgaacttgtttttaaaagaaacatgatttttgatggcaggaaaagaaccccatttttgagacagagtttcactcttgttgccgaggctggagtgcaatggcgtgatatcggctcactgcaacctccgcccctgggttcaagcaattctcctgcctcagcctcccaagtagctggggttacaggcacctgccaccatgcctggctaagttttgtatttttagtagagatggggtttcaccatgttggccaggctggtctcgaactccagacctcaggtgatccaccagcctcagcctcccaaagtgctgggattacaggtgtgagccatcgcgcccagccagattctcgttttttaaccacacacttgaaaagacctagggtaactttggtaataatgaaattattacctgagaagaataaaggtaattttgaaaatacttcctcaaaggagaaattagctaaatgcataaaactgctcactgtagttaaatacctattgtaaagagaaactggaaaaacctgaacatctacattacaatatgttcagacagtctctcaatagaatttcatgttgtcgacaaaaatgataaacaggaagactggatagtaaacacaagggaaatgcagggcaaaatacagaactatttactataaaaaaaagtatatgtgtagatatggacaggggaatatcgaaagatgaatacacttactgtattcaaatggtttgggtgaatttccttcttttaaactttcttttaatggctgtgtttctgtgtcctatccagattacttgctgctatgtctttacctctctcttctccaacctgtacatatgtgttgtcagatggctcaggggttgacagccacattcttgacctcaaggcttctctcacccctgtgcttgcagagggctcaggggtggccttagacagaggcaaacgtcccaggaccctgtgagctgggagaaaaaggcaggataccaacctgctctcaggctccagtctgcagcagatggcggccagcgggaagaaggccgggggacaatctgtgggaacaaacttctcccagaaaagcttcacgttgaggccaaagtccagtgttcggggaaggcagtcaggatctgcatacacctgcccaatgatctgtagggtaagaagacagctgtttacaaaggactacagaggccacagatacttggcaagggaaagggatgctgggatgtggacaggaagaatggcagaagaggaggtggtaaaataggttagagagctctccccaatccccaatcatctctccaaatcttactaatccagacctgtatccactgagagctgggttactgaagaggactaagaaggggcttcactgcagaagccaagtgttccaaatcagcatctgctcctagcttccactcatcctaccctgccttgtctgtgtctccttgtggctgtgtgtgtgtgccagagttaaggctctatgaggtgctggatctgattcatgtctgaaaccctctggcaccagcccagtgctctgaacagaggtgttcaattaatattaaagaaaacaattttttaaaacaaatcttccttcatggccaggcacggtagctcatgcctgtaatctcagcactttgggaggctgaagcgggtggatcacctgaggtcaggcatttgagaccagcctggccaatatggcgaaaccctgtctctactgaaaatacaaaaattagccaggcgtggtggcgcacacctgtagtcccagctacttgggaggctgaggcaggaggattgcttgaacctgggaggcggaggctgcagtgagccaagattgcacctctgcactccagcctgggtgacagagtgaaactccatctcaaaaacaaaaacaaaaacaaaacattccttcattatcctaaccatcccttgtctctcctctcctctacccctcacaactttgtaggaattacagaaggctttgaatgtgtgtgtgtttgagtcgctgagatatgctgtcacctgactaaactcctaaaggtaggaatctttccaagattcctcactctgtccacgtggtacctggcacagggctgacacttcctagagtggctacttctacttgaagggaactgagaagggctacatttggcccaagagctagctagacagccacatgaacagtctcttgcccttccttctggaattctgagtctcatctgccccttatcgaccatgtgcaagccactgccctcttccaagcctcagtttcctcaactaaaaaaaaaaaaaaaaaaacctggccgggcgaggtagctcacgcctattaattccagcacttttagaggctgaggcaggcggatcacctgaggtccggagttcaagaccagcctggccaacatggtgaaaccctgtctctactaaaaatacaaaaattagccgggcatggtggtgtgtgccggtagtcccagctacttgggaggctgaggcaggagaatcacttgaacccagaaggcagaggttgcagtgagcccagattgtgccactgcactccagcctgggcaacgaagtgaggctccatctaaaacaaaaaaaccctgccagtccttctcttaagaccaatgaaacacgaacgtggcaaagatgtgcagatgcgttataaaccataaaaccctacacccatgttgattttagtcaagctagtcatccctaggaggagatgccccagttccgagggaaggcagagctgctaggcctgctgcctcgggcatggccttggtgccagagctcacctcacagagaacgatcccaaaggagaagatatccaccgtctcatcatagctctttccttggggaacacaggagagcacactgttaagtttacatcccttacctgctctgcactgggtctagggtcaatctaagccacagctaagaactagggctagaacaggttctgtagggacaccccacaggctgtcctgcgcagacaccacctgaaaatagtccttcctcagctgtaggtgaactgccttggagagcccttataacataacactgcctaggatgaaactgcacgttaaagtggaaaagaaccagactagggttcatctagcctctgccattaggcagctgtatgctcctaggcaattcactgaacttctctgggcctcagactccaaaatggattgtattcagaccatttctgaggcctcacaaccctgatttcaagaatcccaaccagcatctctggttggtttgagcattatccaccagagggcaccacacttcagttctcaccatggagagagaaggctaaagctgggacaatagcctgagctcttagcgatccctgaggcacaaatgccacagtcagaactcaccttatcccccatgatgggacactgatcagttcccagccccctgagctcaggagctaaatcgtgaggccccacctggcaagggaaaaatatcctcagctctgggtatccggtcctacgcttcacaggcctcccctggaattcccagggctctgatgcaagggcagcatctgtcctccctctgcgggtgtcccctccagggcttcaggactcaccgttcagcatctcaggggccatccagtaggggtttcccaccaccgtgtagcgcttcttgcggtcgttcttgcgcaaggtgcgtttcttggtggtggccttctccatgggggcccttttcctctcttccactatgagccgtgacagcccaaagtctgccaccaccacagtcttgtcctggtaggataaaagacaggtcaggacttcatggggatgttctcaaacctggccctggggaggaagcataggcaagagaagccactgagaaggggagaaaaggtgtatagcaagggagaatcagagcagaaagctctatcaaatagacacactcaggccaggcacggtggcttccacctgtaatcccagaactttgggaggccaaggcgggtgaatcacctgaggtcaggagttcaagaccagcctggccaacatggcaaaaccccgtctctactaaaaatacaaaaaaaaaaaaaaaaaaattagctgggcgtggtggcacacgcctgtagtcctagctacttgggaggctgaagcagaagaatcactagaacccgggaggtagaggctgcagtaagccaagattgcaccactgcactccagcctgggaaacagaatgagactccatctaaaaaacaaaacaaaacaaaacaaaaaaacagacacacttggcatttgtgtttctgagggtctggtatctgtgcacagcagactcccagcccacagtgggttcatggcagagccactggagccctggaggtgaggctcagggacttggagagtggaactcagaggtgggacagggggttgcttttgtttttccctgtcctgtcttattcctaaaatgatttcaggcagtggctagaaccaggataagacagaaaaaggcaaggtggaggcagtagatggggagacttgggggagacaagctctttgaatagctacagggcagtcatgtgggaaaggaatgaagattgcgtggtgtgggtctagagggcagagccagggccagccggtagacacccaggaagccagatagcaagtcagtaagacaaacaacattgtaaccaccacagctgaggggcagtgggaggaatgctggtctcaaactggtccctgtaaatttactagctcggtggcctcaggctgaggcttcaggtgccaccactgtaaaatggggtcagcaatgaactgttttacaagactactatggggcaaaagcaggtaaaatgacagggttttctacatatagtcaacaaacttctgaagtcccttctaatcaaattatttcaaaggttgctaatgagagaaggtgaaattatgtctgtgtgtgtctcggagctcccagaggacagagaagggcattggaagaagcaggaagggaaagataggagctcctaggcaacacctctgccctctagccagaggggacaagtcagcctcctttgtgacaaggaagccaggaaggataggaccctggaggccaggcccagagcagtgggacataccaacttgatgaggcagttgtgcgagttcagatcccggtggatgatgcacatagagtgcaaataggcctggaacagaagcatgagctgaggctacagggccagcaaatcaactagaccctgaatctggaattgggcgccatagatgctctcctaccaggccatgcccacccagcttcagaacccaacctggacaacagggccagggcctcctatggcctctcccttgtcccaataccaacaggaagcctggacttcctctgcttccctgctgccatctcctgcccatcctttggttcaccaatcactagcacagtggctggccaaagccctcacagctctctcctaatgtccccaacttcagaaaaccctggccgttgcagcaccccctccacctctacccattttacttagatccaggctgctccctcctccccactctcccaatctctggcttgagccactttggatccttcctgcctgcaacagagaagtgacttcttgctccagctagctctgtctttcagacattcacctcctctaagactccaccttccccactgtctaaactttaagctctcccccttcctaccaaaatgtttgtcaacaaatttgtttgttatgtctcctctccaggcctccaccactgactcttaccactctcaggagcaacttcctttctccttcccttgcaaatgtagaaggagccactccttgctctccagccccctgcaatactactttcatcccttaggctcctggagctgctcacacacccagggagctcttcctgaatcgctatagctcatgacctgcctgcctgcctgcctgagggagtgctcctcaaagactgtccacaactttcctatgctacctgatcctgagactcttgtgtgtctgtttttttcttccagccttttcagtgtcagccctgctcaaagccatctcctcttcacaagctgagacacccccaccagctacatggatgcctcttctgtcccacagctccagctgccccttctctgcagattaggtgactagcagcctctccctaagccagtctcatggagccagtttcctgcccagaagatgctgataggttctgctagcacagaacagcagggatcaatgctagctcttcccaaaccagttgctcaacaatcatggctatcccccatcccccaaatgtctggtaagtgacacctcaagccactcgtaactcctcctcctcctcctcctgttccctcattgccaaccagtctctccattctgactccacccggcctcccaggctcctgtccccacagccactaccttaattcagaaatttgaaatgtttcattagccccctatgcagggctccattccctggaccctccgcattccaccccaatgtactaaccatatcagtctctctttttttttttttttgagatgaagtctcactctgtcacccaggctggaatgcagtggtgtgatcttggctcactgcaacttctgcctcccaggttcaagctattctcctgcctcggcctcctgagtagctgggactacaggcgtgcaccaccacgcccagctaatttttgcatttttttctttagtagaaacagggtttcaccagttggccaggctggtctcaaactcctgacctcaagtgatccactcacctcggcctcccaaaaaagtgctgggattacaggcatgagccactgtgccagcccagactcattttggaaaaaccacagctcttaagctttcttgcttaaaaatcttttcctgccgggcatggtggctcacaactgtaatcccaacactttgggagggcgaggcaggaggaatgcttgagcccaggagtttgagatcagcctgggcaacaaagtgagaacctgtctctaccaaaaaaaaaaaaaaaaaaaaagaaaaaaaaattcaaaaaattaggtgtggtggtacacacctgtagtccagctacttgggaggctaaggcaggaggattgcttgagcccaggaggtcgaagctgtagtgagccatgatcgtgccactgcactccagtctgggcaacagagcaatatcctttctcaaaacaacaacaacaaaaaaacctccttcctgattcaagccccagaaacaggaaaaaaaaacaaaaaaacaaacaaacaaacaaacaaaaaaaccaaaaagccagtcaaccaaaaaactcttttacatttgtctcctatagtccagactccatagcttaaaacacagcgaccttgatgtacccccaaactgttccagactactactattttcatggacccccatgtgaagggcagtggctaaagtctcaggcttggcgaccagactgattagcccaggatcccagctctgtccctttccagtccagcttatctggaaaccaaggttgtcatgaggaataaacatgcacatgcatgttaatccctcagcccagtgcctagcatatagagggcactcagtacttgtcagctgttattatttctatgcttggaatcatttgtttccaggtgaaatagatgattttctcctctttcctcccaggtctttgctcctgtcacttcaatcctggtgcctctctgccaataagaactttatccaattctgatccttcagggctccgctagaactcatttccccttcattgatttcctaggcagtgaggtgctctagttggtctaagggccctcagcacctgaatacctgtgatggcaagcccaggccatctcaggctacagtttgcctctccagtttgccttgtccgtgccctgtttgcctttagagatgtgtaattctttgaaaacagggctgtgaactgagaacagttggctggggtcagtttcagtgacacagacaaactcaatgaatagctgctgacccagcccacacaagttgcataggaaggggtctctaccttccagtgaagcccacaattctcacacctctccctactctcgccctgctggcaggtttgttggtgggactcaccattccggaggcgattcctttggcaaacctgaccttctgctgccaggggaacggatcctgcagaatggggaatgattttcagaggctgttgagccctgtcccactcgtggtccaggccccatgggtcaatgtggtctcccagtgaagcctccctgtgtatgctcagtcccacccagcatggtcctttggaggcaaagcagggcccctctgccctttaagctcctagggtagtgatagcataggtgtctgacaacccaccaaggctcctggagactatggggtggtgtgctcaccatactgcgcagaaagtccttcagtgtgcccccctcaatgtactctgtcaggaggttcagcttcttatccttgtacagcacaccaatgaacttgagcacattggggtggtccaggctgcgcatcactttcacctgggggtgggggaagccaaggaaagctggtggttaacttctcactgtcttccttacctcttccctccaaggaatcagcttgacaagtgttaccacctgtatctcctacctcctatcttgtgatatgacagggcactaagatcaggatgagggaagaccaccaccatatagatggagatggcttcataggccttacccttggaactgcattgggagaactggggtgggagtggccaagtggcttggagggcaatacccagaccacaggtgtccccaacttaagttactccatgaagtaacttgggaggggtagtgaaaactgtaaatgcccaaggagtgtgagtgctcagggagctcccctccaggctcccttagcagggcgttcaggtgaggattataacattgagttgtactaaattggagtgttttcatgtccatcatcctcataacctgagagctcttctgaaccctgtatcttttgttactgcatcccttgtaccctgtttgtgttgcttttagtaagtgttcattgaacaaataattacgctgtaatttagagggagtgggatattcctctagggctcttttctgcttagtctttaagacagtaattccaaactgtattttctcttgaagccattatttgtaaggtcttctctcttccaatggtgacaccaacctcccgggccccctccatcttcttacctcagtcagaaaagttttctgggtctcctcatcacatcgaattaactctttcatgaccatcactttgcccgtggctttgtgtgtcacctacagggagggtgactgttaatggtgctgagaccagaggaagttctggagaactgtttgagaaaatctatgcagctggccatcccatcccttggagggcacactgagccgggtcagaatgacagagttcatgtgtggaagatgcagcgtggagcaacatgggactcacacggaagcaaaccctctttcctggagagctgggcatgcacagaggacaggcaagaacccagaaaagggaagtggggaagaaggcaggaggggatgctgccaagccaagcaggggctctggtcatttggcatagaagtgagtctcctgagtgaacagaagtctgggggcaggaaggtcagtgccaaagacatgcaccagggagctgggtggatcgggggtgagctctccagccctgctgcccccaagctgagacacacgtcttacctgaccccccctcccagttctcagcagaagaggaggaggaggagagaaagagagaggttagtccctgagactgttcaccagggaggcaggagccattcccctgtgtgctccttgtagcatgcccggtactgaggtctgcaggcacctaacaaacacccactgactggaggcaggagggccacaggcacagctcaacccaacctggatctccaggtccacaagctcactgtaacagcaacattgaccttaggtggcctgggtgggggtgaaggatacctctcacaccaacacccaaagccaggaaggaggcctggcatcctgcatggtgtggggtggggccaagtgatgagaaatccccgaaagacagtgacagagggactgggggcagaagagcaaagcaattgttgcctgcgctcaccttgatagcctgcccaaagaagcccttccccaggacctccccatggattaggtcacagggccggaagatctgctgtgaatagctgctggaacaacgaagggattctgagcggctgatgtcacggctgaacagcaggggctcctttggggagctggggccaggggacttggagatactgttactgcgcctgaagatgaggaaagacgggagtagggatgtgtagtcctcagagaccggccaagaaaccctggagggaggaaacttaggggcacctgttcattccaatgtctatagtttagatgttattattggggaacaggggctcttacatcagatgtatcattttggggttgctgacatcagtcatttatttaagcatagtaaaaacacattcaaaatgggaactctgcatacatcacacatagaacaattaactagattctactagctgataatgctcagtatgtgacatatatgacaacactgtagatggtaattcaccatctcccatatctgcttgatttaagtactaactggtttagagtgatagttatactagtatccaaaaaatgagcaaatgggattttttttttttgagacagagtctcgctctgtcaaccaggctggagtgcagtggtgtgatcttggctcactgcaacctctgtctccctagttcacctgagtctcatgcctccgcctcctgagtaactgggactacaggcatgtgccaccaggcccggctagttattgttattattattatttttgagacagagtctcgctctgtcgcccaggctgaagtgcaatggcacgatctcggctcactgcgacctccgccttccaggttcaagcgattctcctgcctcagcctcccaagtagctgggagtataggtgcacgccaccacgcccggctaatttttttttttttttttttttttttgatggagtctcactctgtcgcccaggctggagtgcaacggcgggatctccactcactgcaacctctgcctcccaggttcaagagattctcctgcctcagcctcccaagtagctgggattacaggcgtgtgccaccacaaccgaataatttttgtatttttttagtagagatggggtttcaccatgttggctaggttggtctcgaactcctgatctcgcgatccatctgtctcggcctccctaagtgctgggattacaggcgtgagccaccacacccggccctaatttttgtatttttagtagagatggggtttcaccatattggccaggctagtctcaaactcctgaccttgtgattcgcccacctcggcctcccaaagtgctgggattataggcgtgagccactgcgcccagcctaattattgtatttttagtagagatagggtttcaccatgttggccaggctggtctcaaactcctgacctcaagtgatttgcccgcctcggcctcccaatgtgctgggattacaggcgtgagccaccgtgcctggccagcaaatgggattttggatgatattttgcacatctttgtacctgtccatgtttcctgaattttaagatgataaacacgtatgatttttacagcaataaagtcactatgtttacattttcaaaagcggtcgataatagtcatggtcaatgactgttattttcacttactgaagaaggaacaagaaggttgaagtccacagcactgcaggtgaacagccctgcgaactttctctctggggtatgctcctgctttacttgggctacccagagaggactgacgctggatggctcttggcttgtcccgacctacaggtttacttacccttgtccttttgctctgcctcctgctgaccatgcccaccagagcacacaaggctagctgcccccctcctctgcatggtggctctacagatacctggccactcccaaatcttcccttttccaggccatggatttctagctcttccctgccctctgttgccctgcctcccactaatttcatcatactgaccaaggccaagaggcaatgggagtgagggcagcactttaatgagagggcactgtttccaacacatgccagctgagagggctctaacttactcagtttgtttggtgaggagagtggataaaaaaaaacaaacttttttttttggagacaaggtctcactctgttgcccaagctgtagtacagtggtgtgatcaaggctcactgcagtcttgaactcctgggctcaggcaatcctcctcctcagcctcttgagtagctgggattacaggcatgtgccaccatgcccagttaagttttttattctttgtagagacaggaatgtggcccaggctgctcctgaactcctggcctcaagcaatcctccggccttggcctcccaaagtgctgggattacaggtgtgagccacagtgccctgcccatctaattaaaaacaattattattattattttttttttgtagagacagtgtctcactatgttgctcaggctggtctcaaactcctgtgttcaagccatcctccgacctaggcctcccagagtgttgggattacaggcatgagccacggtgcctggccaagaacctgattcttagtgatactaagaatgtgtcacgtttactgaacactgtccctatggcagcactatacaactttatgtccttttccacatttaatccttacataattggtgagacagccacctttatcttaccatcttatgtcacagatgcagaaacaggctcagagagatgaagtgatttgtgaagggaggagctcagcctgaagccccagtagggtatcagtatttctgcctgggagccagtgctcttgacttcttttctgtaagtctccctacttggggcttccactcaaggcaacttctccttccccatggacctggcagaatctggggtttgggggttgttggtccctcaagtctaaaaaaaacgttcattcatcttttgctttattgttttcaaagtctttctacacaatttattcaatcctatctgtgcccctactccaggctctgagctccatgctttctccataggccatgttgcccttcagggtttagcatcactgcctcctgtccagcttaggagttcagtggacagagactgactctcaggtttctaaggaaacctggcagacagctgggtccgcacaggctctggctgtaaactgtgatccccacaggggcagctgggtcagcacaatcctcatagtctgtccctggccagctggttcctttcctaactctgcaggcttctgaaagccagctcagcttcatccgagagacagacataggacagaacagagccagggtgggaggtggcaccttagggaacgtctcctcagtgtcccctccagattctccttggtgtccagggtgctgagggcgtgggggtgtccggcattctgcatgtgaggagcgagccgggcctccagccgcagctggtccaggcgttgggagacggggtcatgttcaatcaacagctgaagtgtctggctcgtctggctaattgcatcctccacctgtggccaagagcagtataaagctcccacaggctgccccatcccaggccacccatggccaacccagatgactcaggcacagtgtggccagtgctcaacttgtctaatggtggcctttagctgccagtggcctcacagtgccctctgcctggcatcctgtcagctctcccgtccatcaaccatccctgctaccctgggaacctgttacgctgaaataggtcaccagtggtcacaggctcaatgctaagacaaagagatgggctgggggtaggaaaaggtaaaggctacagcctgatttctcagaggatctgttccatgtcccaccctcacaagacagattagacacacactctacctcctccactcgaagtgtgcggacgggggtcccattgatctccaggatgcggtccccagggtggatggcgtttcgattgttgggactgatgtgcatccggttgaccctgggccagacaagagttgaggcagggtaaagatgtcctaaaaacctgcttgaccaattctgcttgtgcagggaaggtttaccaggtcccaggccaccagtggcccctaaggggcccaggatacccacacagaaaggcaacaccttttccaggatgccccatctcagtgaagggaattgccactcaccctgtggcctaagccagaaacttgaacatcatcttcccaatctggagttccctcatctctcctactcccatctctaagaactctgccttctttccatcattgtagttattcacatctcttacctggatcacggtaatagcttctattttttttttaaactttgtttttaatttttatttgagatggcatcttactctgtcatccaggctggagtgcagtggcatgatctgggctcactgcaacctccacctcccaggctcaagcaattctcatgcctcagcctcctgagtaactgggattacaggcgcgcaccaccatacccagctaatttttttgtactttttgtagagatggggttttgccatgttggccaggctaatcccaaactcttttttttttttgagatggagtctcgctctgtcgctcaggctggagtgcagtggcgtgatctctgctcacagcaagctccgcctcctaggttcatgccattctcctgcctcagcctcccgagtagctgggactacaggcgtccgccaccatgcccggctaatttttgtacttttagtagagacggggtttcattgtgttagccaggatggtcttgatctcctgaccttgtgatccgcccacctcggcctcccaaagtgctgggattacaggcgtgagccactgcgcctggcctaatcccaaactcttgacctcaagcaatctgcccaccttggcctcccaaagtgctggcattacaggcgtgagccactatgtctacgtctggacttttcttttaattaagaaaaacagagacggggtcttgctatgttggccaggttggtcttcaactcctggcctcaagcaatcctcccacctcagcctcccaaagtgctgagattacaggcatgaaccaccatgcccagcctacaatagcttcctaactagtctctatacctttaggctttcccctctccaatccaacctccataccagtgatccttctaaaatgttaacttggtcacaacaccttgctgcttaaactctcaatggatctgctggattttcataatccaggccctctatacttaacagccccttttctggccacactcaacctacatcagacatgattaagactcctacttttggagaaatgcttctccctctgccctgaacacaattccctctcctcttcatctaataaggttgtagaacagaccttagctcctcctgacttcccaaactctagtatctttcacctgctgtgcaagcactagcctagtgtccaacacatggtagatacacaatcaatatttacatggtaagcggccagaggtacgacattactggtattagatagacacagactctttctccatctggtctctggcctgaatctaggatagggtcttaacttcttttgggccatggaccacattttctccattcattctctcgactgacaaaataataatcaatcaactcctactatatgccaggtactcttccaagccctgggcatgcagcactgaataagacagcaagtttcttctggaatttacattctagtggaggggatagaagataaacaactaatacacataatcaagccagatgatttcaaagagcaaacatgacctgaaacctgacacctgaaaggtgagtgattcttgccttaagtatcgggtaggaagtagcctgggcagagagaacagtaagtgccaaggcccaggtacggttacagcatagtggggtccaggagaaagatatgagatgagaataaagggagttctgcatgagactttggaggtctaagccctctgaggcccatttacagactctgctcaagaacccctgctgaagggttctcaaaatacttactctttcacttgcacagtggtggcgtagttggagcaggcactctccacggacacggagaagccccgcctgccttcagtggtggccggcatggagatgagcgtgacagagtagggcagctgctcctgaacagactctgtggagagtctctcaaacatgggtgccagcaccacctcattgtggcacttcccactggggagagggcacaggggggaataagatgctagagtcccacacagaagccccccagcaaccactgcaccatgtggctttaagcaacagtacccatagtctcactaccaccctctttgtcatgattctagctggctgctcagaatgaggagcctgggttctcagggtgggctgggactgggggtgctgagctagatctgcagcaagtggtatatttggaaaaacactggcctgggttggggtgagatggtctgggttctcttcactctacctttgactcacaatgagaaccttgcccttgtactattctattccatgggccccaggctgacttcttttatcaaccaaggtggttggacagggtgagctctaaggggtctttgactttaatgttctgggatcgtccttgaagagtgcctcccactgggaggattgcagggcagagtgaagacattttcaaggttggtaaggaaaaagggtagagacatgtgtaaatcattctgcttacaagttaaagagctggttaagagcactgctgtggtaagaatccaatgctctgactaccctaacactccttctgcccaactcaccctgccactgtccctccccgccagccactcttatatgggagaggatagacaaaggaccactatcttaccagtagagggtggcatgctgcaccagtgcatatgcatccccatcctcaatgatcaccttgcagctcatacaggcaaagcactctgggtggtacttgaactccccagccacctgtgagcaggtggggagaagggtgtacaaagggaggaaggaagtgagttatcactgttgctggagtgaggacaggggtgggtgaatgacctccaagcaaggcccccgtcaaaatccactctttcactctctgccctagagcttccaaaggaagtgtcagattggtacctcctgtcatttctgagactgcacaaaactgttttggtctcagttatgagaagaaatccccagaagtaatcatccccactaaaaaagatcagttcttccaatacagggttggcaagtctgtcactatgcttaaagtcgtttgtccagagcaggtataggaggtagcccctctctctgccagcctattccagagtctccttttctgattccctaaagacaacctaagtatatcctcctctcagcctgtaacactctccttggaggtccttatccaactatattgtgtctcctctctgcctgcctctcctcccactcccaacgttcaactattaagtctttgagggaaggatcttacctttcacttagtaggtgctcaattgatacctgctagttgaatgaatgaataaataaagggagatgccctggctgatggaaagactaaaagattaacaggccacagggaactggaagcactgtcaatggactctgaagaccaagaggggcagatatgaagggattcactcaccataaaaggccctgtcatcagcagggagcacccatgacagaactccccaaacttcccccagtagtccttggggcagtagagcttcccatccttctcatagtaccagttggtgagggaatcctggcattctgaacacctgaaaggcaagacaagaactgaaattctcctggatccctggaaccaggccacataagctgtccctggttcctaggtatgacaacaaaatggacagtcctctttgatccaaagccaagatggggcaaagttacagccttgtgctatctccccaagggaagctggttcagactgaacaaggccccagaaaccagctctgtgttgcctgcctcagtggacagactagtgtttcataacctctttgggtcttggggccctctgagaatttgataaaagccaagaagcctcccctagaaaaatgaatatataaagaagatgtgtatataatttaggtgggggacagggtgtatatataaaggattctctgaaacctatttatggcaccagttaaggatctctggtcttgacagatacttcaatgaacaaaagcagtttaatcatctccactcttcaaaactgacccatcaccaacagcgttaccaatgtaatgttcttgccaaaaatacgttaagtataaaaaaactaatcaggcaaatctagaatgtgggttattctataagaataaccggtcttgactcttctaaaaagtcatggggagaagaaaaggcacagattttaaaaaccctagagacacagcaaccaaatacaatgcctcaaacttggattcaaatttagattaaaaaaggaaacagccatgaacattttttggaacaactgaggaaatatggatttggactataatattatattgtaaaattgccgtgaattttcttagatgtaatgatatctgacttatataggagaattcttagcagaaacatattgaactgttcaagggtaaaatcaagatgcctttaagttactctgaaatagttcagcaaaaataaataaataaaagtatacagatagagggagagagatatatacaaagtggcataacattaacaaatcatgaatctatgtgaaaggtatgtaggtgttctttgaactacattttcaacttttctatatatttgaattttttttcaaaataaaatattggggaagaaacccaacattctattagcactgtgtaagatgtacatgttagatccatagctcgctgggcggggtggctgatgcctctaatcccagcactttgggaggctgaggtgggaggatcacttgagcccaggagttcaagaccagcctgggcaacatagtaagaccccgtctctaaaaaaaaaaaaaaaaaaaaaaaaaaaaaaaaaatctatagctcccttctcccctaatgacctggctatgaagctccacctctcaaaagtctggtgtgttctcaggacttacctgcacagacaacctcttcctcccttctgagcttcccaacacacacagctaagagctccctggcctgctgagcccatgccatctctttccttctagctccttcttttccctattcttgttgtcaaggccttgcaccttccacagtggccacattcttgcttccaagaggtttgaacattgcttggtttgaatcttgatcctgccacttactagttacatcatcttgggcaagatattttacttctctggcctagtttcctcatctataaaatgaactgctgtgaaaattaatggaaataatatgtattaaaaatatagagagcagctgggcacagtggcttatgcttataatcccagcactttgggaggccgaggcgggtggatcacttgaagtcaggagttcgagaccagcctggccaacatggtgaaacctggtctactaaaaatacaaaaaattagctgggcgtggtggcatgcacctataatcccagctactcgggaggctgaggcaggagaatcactggaacccaggaggtggaggttgcagtgagtcgagatcacgccactgcactccagcctgggtgacagagtcagactctgtctcaaaaaacattatagctagctagctagctagctagagatagcttatataaaagtcctaatataggcagggcgcggtggctcacacctgtaatcccagcactttgggaggctgaggcgggcagatcacaaggtcaggagttcaagaccagcctggccaacatggtgaaaccctgtctctactaaaaatacaaaaattagccgggcgtggtggcgtgcactggtagtcccagctactcaggaggctgaggcaggagaatcgcttgaacctgggaagcggaggttgtggtgacccaaaattgcaccactgcactccagcctggacaacagagcaagattccgtctcaaaaaaaaaaaaaaaaaaaaaaaaaaaaaaaaaaaaaagacccaatatagtagaaactcagtatgtgttaacttctattaaagatgatgacaatgtaatggcagctcactttatcagccacttactgtcactagctggacaacttctcttagtagctttctctcattgaaaataactaatagcatcctattactacaaagagccaatgtgaagaggaaataagctaatgtatgagagaaagccttttgccaggcaagtgcattattataacttgctaagcactgcagatataaaagataaatacacagggcaccctacttcacctttcatgagcttatgaagagttgaggaagagaaagtctaaataaaactcaacaatgcaaggtgagaggccacagtgagttctactacttctgagcactgcgggaggtagagaagaggggcaggaatgagttgaagcagctgagctagggaagtctagagaagcaagtccctgagaatccctttatctttctggagtgcccaattcctcctgggtgctcaacaaacactgatggctatttttaccctatagcttttcctacttgtcttatggaaggggaacttcagggtcttaagggctgggtatggcatgaagagtatggctgtgaagtgtctcaaaactgcacagtgaggttggaggcagaggggaagactgttcttggtatgtggctcacactcctctcaatataagatacatgtgggatgagctctaaatgaggaggagagagatatgggttcaagttcttgggtgctaaattgccttggacaagcccctttccctctctgggttgtttccccacctgtgaaacaagaggacaaacaataccctgggtccccttaactctgtgcatatctgtgtttttccctagatgatctgaggttctaatcttagcaccaccatttaccacctaagtgatcttgggctagccccttcacttctcatttgtgaaatggcaatgtcatcacctactttcaaggtagcagtgaggattttttcttttttctttttttttttgagatggaattttgctcttatcgcccaggctggagtgcagtggcacaatctcggctcactgcaacctctgcttcccgagttcaagtgattttcccacctcagcctcctgagtagctgggattactggcgcatgccaccacacccggctaatttttctatttttagtagagacggggtttccccatgttggtgaggctggtctcgaactcccgacctcaagtgatctgcccgccttggcctcccgaagtgctgcgattacaggtgtgagccactatgcctggcctgcagtgaggattaaatgtggttctgaagaactatggggtgcccaacagagggctggcagtaggagcaggggcttccttcttgcctcctgccttctgacttagaagttcctgggcaaccatctttcttcttcactagactgttagctccctgaggacaaaaacagcatcccacttactcttggtagactcagcaccaagcaaaggacctggaagagcaaagccttaacaaatatttccaaactgaaaatggtaggagtggcaagaaccagtagcccaggtaggggagcacaagggttccatggctcctggtcaccaggtccttcttttcttctgtgtgcagacttatttgcacccaaatgcaggcctgggctctgttacgcccttgcaatggtatgtgcgccgcagggcatgggagcaccagaacacaccctcctttccattgccaatatcctgcttttgtttgctgcaagtagctctggccaggcccaggagagggagcagggagacaaacaagtacaggcatgcaggagacagccaggccagcctgctgggaagaacacctggctggagagcaacgtcaccagtccacatatctgtgtcaaggaatgcctttaaagggcacagccagctatgtggccaaagtcactgccacacatgtctctgaagaactggaaggtgaacagctgacaggagggctgggtatggatccctaagctgtgttttgccacagaacacaactgggttctcagaccacttaagaagttgccatggtagacttcagagttctagcttagctatcaattaacagctactatttattgaatgccagccataatccaggtcctatatgaggtaccttatttatattatctctaatcctgacaaccctacggtagcaggattatccctgttttacagaagactgaaaagcagagttaaagtcaaatcattctgcaaagctgcccaatacataattgatggagctggaatgtgaagctatgtgtgcttggctgcaaagccacatccactgtactatgtcaccggagtgagacagcacatctcaacagctgagcctcaggattctcacctgtgaaaataaggaagctggagccctgacagctcaagaccctttgagtgttaacacttcgtgatgcttctcctttagcccaagtactgaatgttaaatagcacaattctcctccttcatatacttcacagtgttcaattccccagcagtctctgttcttttaaacaaagaacccagaacacactttggaactgtaaggtgctactcgaacatgtcccacctcagatgcttagaggccatggacatcatacgttcttcccaaagccaaggctgtttttctacctttcaatttttggaagtttcaagtgaaagtcaaaatctgccctggctgtaggtagaagagtacccagctgggaggtggtaaagctgaggtctgaaccagtcatcccactgtcctgaggagccagagtgaattgagctgaaatcctcaggttaggggagatcacctagaggcctacatacgctgaggctatgcctaaggacaacctccaaaactcatcttccaaaacattactgaggggttctgagggcttgggcagatacaaagtgcatggaaccctgatggtcagttcagtgggtcaacccagatccacacagagaccttttgagtcagcagagaacatatgagttttttaaaaaagataatcagttgagattttctctttcaagacctggatccatattccttctctgccatttaccatctgtgtcacccaaggccagttacttcatgactctgagcctcagtttcctcacttgtacattgctaataatatcttatggggttatgagaattaaattatgtacagatgtcttgcatgatgcctggctcacagaaggtagccagtaagtgttcatttctttccctccccaatttgagaccaccaagggcaaatgcagacagacccctttttctcctatgcctagcaatatggacctgcttctcagcccagaatgaaacagatttctgtaagtgaaaaagaaaggtcctaaaatgacctttatttatctatccaaatagaaatcaactttttttttttttttttaagagacagagtcttactctgtcacccaggctggagtgcagtggcacaatcattgctcactgtagtctgacctcccaggctcaagagatcctcctgcctcagcctcctgagtagctgggactacaggtgcacaccaccatgcctggctaattttttattttttgtagagacagggtctccctatgttgcccaggctggtcttaaactcctggactcaggtgatcctccagccttggcctcccaaagtgctgggattacaggaaggagccaccaagcccagctgaaatcaattgattctaatagatttctaataattaggaaatagttactgtgcatctaggatgtgtaagaacaagcaggcaaggtgctgtgctgagagaagccaagtgagataagatagaggcccagccctcacttacatccaaattcttcagacaaaaatgtttacaggtaaattctcaaccttatggggtaaaagaaccagtcattattgcagtggatttacacatgttaaagcataagccctcccatgtcctgaggaaggcctggctggatggtcatcccttaacctcccagtgaacagccagttgtagagaagcttctttcagcccctagcctctgaattgagtgggctgaaggagagaatgggaagctccctccaccacagcctgagggcacctggagagcaccacaactggggatgccaacttttccccagggcccagaagggcagatatgacaggggcctagagagactctgttccataagagctcagtcaaaaatccctttattactcctccttcctgcagatcctatagactgaaacagtctgccaattaagctgtaattattatggaatatgttattgttgttttaaaaaattaaccaaacacataatgaagcctacgaacagcaagaaataagtgttgctagagtgcactgattcagttccaaccaaaaaccaggaagactgtagtttcaagtattttgtgtagttgtactgcagttaaagacagggcctccattatttggcaaataatggaaaagagcttgtgtgcctctgaggagccacataagttgcagagctgggaaccattcacctgatccaagtccttcatttttcagataaggaaaagagtcccagaggacctaaggcacctgccaaaggttactgtgaagctgggcagagttatgcataattttttccctttaaacatggattgctttggaacacaaaggttcatttgttttcttcaagagataatgtgtaaacccaagctcattaaatcagtattggacattaagtgaaattctataaaaagaaaaatgctttaaagatgtccgacaaaagccactccctaatttacctcttttgtaaattccaatttgaggtattttcttacttggaagcacagtggtaattgcagctcacttctcacgctagtgtggtaggaaagacagtgcattctctgctgagtatgtatggcctgtcaggcaggggtgtatgggacacagaagttgtattcttcattcccttgctccctcttcctccctcacatgtcacgcctgatcatgtccccatggaatctggttgcgtcactttccttgcaaccacagccccagaactcccatagactttgtactcccccagaggcctagggtcaagaacttaatttgtttcacagaatccagcaaggaccctgttcaggagcccaagaagtctagcttctactttctgccaaggatgaaactgaggcccaaagaggagcccttgaggatatcctataataaaagagggaggggctaatggcagaaacagctttctgaccaggtagtgatgtggtaacggatacctgggagagcagagggtctgggtggtccctccctggggggaaagagccctgtgtggcagctatctcttcagaagtgacttcaggaatgtggcctcttatttggggaagggaagaatgtctacgaaagtcagtcagtaccccccagactctagctgggcaaacggagcttgggggtaggggcaagaagatcaggttctccagaaagcctgggacagaacaagacaaacggcaggtggacttgggtggcattagtggtctggcccttaaaggttcaggttgagagttcactatctgctctagcttctcctcttcctgagaagttgtgtcctccctggcttccctgcctctccaagggtaaaaggggtatagttcctggctcctaaaggaacaacccttctcctaagctgccttcccaggattaagagaaattaatgaggacctgaaatgtggctacttcaacacttggcatcttaattccacatgtaaaagctttctcctaaactcaagatcaatttccattggctctttagaaaacaatctcagccacaccttcaacaagtcaggcaaactatccctttttttactctctgctaggagaggaaaacaaacctgagaatttcctctccactaggagaagaaaacaaacctgcagccccctgaaggatgagagaaagtcaggaagacagaaaaagctgcccagtgaggctccatatgttaactctgttgaaactggttgcctcatctgtaaaatggggatatataatctctttaggctgttgagagattaaaggataaagtgtctagcagggcgcttggtagagtcagcattgaggaccagttcccttcccccttccccctgtccagacacttcccagcaatctaccagggtccggtcattccacaaaaccacatggtgcactgcttttctgcccagggcctggccacctgactagtatcccggcagcaagatctgggcactggacctagcttagagaagccagaagggaaaagtcgaccaggaccactggtgagggggaggcagcctttttggaacaacaggctgctcccaaagaatgaaaacaaaccccaccctagcctggaatggctccattcagaagggacccagagggccagaaaccccctggggagtttctatgggaggtggagtggggcaatgagcaaagaaagccaggttagaggtagagtttccacatctccctctgagaagccccacagagagaggctcgtggaggtacttaggcctagggactgaggaggtgtgggggctggcccagcagctcaggaacactctaaagcccattgctccagtcttagaagcactcgcccaggtctttccccagcaactacattcacctgggagctcagaagcccttcaaggccagaggcaaatgtgcctgccattaagagaacaaacgtttataaggtgcctactgtgtaccaggctacccacacccaggacttgccagtttccacagtttggcaaaacctgcccatcctgcttgttgggacaaattcctgggcaggcagcatggcccgcaggtaagacatgtgagagctggaaacagcactctatttgggctattccccccggaagcagtaacatctacaatgggcaggtcagtggcatcttttggaggctccttcaggtttgtctgggatagaaggggagctggagctccctaagaagttccttctgggtatatccctcccctcaccacttccaggacataatgggggtacctcacaaggccgattctccttgggtataacctccgctggcttctgcccggcagaaccgatggtaaaggactaagtgagaaggagatttagggagaccaccctcctctcaggaccaggggccaggagagatggagaggggaactcggagaccaactcaccgaaacaggtctctggaggtgaagtaagccgggactgacaagtaactccccatcttcttcccacaccagatagacaggctcagctgcaaatccgtctgtgactgcctcaggccggctgtagatggccaccatgacaggcccggggctcccggcacctctggctgcaggcaggctgccctgagctcacctctccctccggagcagctgcgggagcctgaggactccaggccacttggcccccagcagattcccacaggggctcatggctgggatggctcctccctagttctcagaagctcaggcggcccctctggactccgagaaaacgacctctctgtggaggctacacacacactggcattcttgagcaggggccggtgactagctaagaaagaagcgctgctgtcaagttagccttcttcttcagtcccacccctgaatgagggagggagggaggaagaggaggggctcccgcagaaccgaggtgtgtggttggagcagctgttaggaaacagaccttgcaggcaaggggtggagctgggctggatcgaggctgcaggcaggcgctgcagacaataactgggaccaattgagcgtccatcctgagctcagggaagggcaaggcaggatagagtgtgaacatatctggccccagatgtcctcaagcagaggagctgcctacaggacagtaattctgcttggaggtggaaaaaaaaaaaaagcagaggatgccaggtccaggaagagccacaccagacggggggacctctggtaggagagacaggtccagagagccatcctagctctgagctgccatctgttctgtcctggcactagggctcccattcattccctccctctgcctgtcctggggacagcctcaagagctgaccaatgggaggtgccacttccactccagggcagggctgtgttgcaaataaggaaacaaggcccagagtattaacctacacctgatgtgtctccatgtggcaaacactatatgcactcttttatttctctgagacaggaattattcccactctacagacaagaaaagtgaggtacagagagattaggtaactcactcaaggtcaaaaagggagtcagtggcagggctggaatttaaatgtaggctcatgtgactctagagctggagctctcccactaccaggcttcattctggctctttaaggagaaaaatcttttccaaagctctctgcaaataggatggagcccaggttactctcattcactcactattcactgagtgttcacatgcagaacaccatccattggcctcagtggacagtggagcttcttctacttgtcctgtgataaccatgcttttcaaactgaaaaatggggcatgagggagaaaaaggcctggggtgccaaaagggattgataagcctaggtatctggaatgggagcccacctgaacagcccccagttgtgacgatgaccaaaccagagcctaccatgtagaaagcccttgtctccctgcctgcaggattgtaaaggaaaaagcaaggctgctggaggaaaccagaacactcagatctcactactggatttggggcagtgacatcagctctcccttaccaggcacacaccgctcaccattgtaaagagccagaagtcaccgtgcagcttctatctcttactgtgaaccatggcaggaaagtctgataaagatggtagatggggttacaagggagccttttcccattccaccaactggacacagggacaacaatgcatgtgataagagcacatgggtttgaatactgttaagaagctaccatttattgagcagttaatatcttctaggccctgtgttaagtgcttagcatttattatccatcatgtttaaattgccagtaaaaggaggaaacgtcatcagcctcatttaacagattaggaaataggttctgaggggttatgtcactattctcaagacaaatagctgataagtggtgagggtgttttttttttttgtttttttttttttgagtcagggtctctctctgtcactcaggctggagtgcggtgatgccatcatggctcactacaatcttgacctcgaccttctggactcaagtgatcctctcacctcagcctccagagtagctgggactacagatgcgtgccatcacacccagctgtgaggctgagtttcaaacctggtacatatggctctagagcacaggtcaaggcactttttctgtaaagggccagagagcaaatatcttaggctctgcaggccatacagactgtcgtggccactcaattgtgtcattatagggcaaaagcagccatatataaaacataaactaagggacatggctatgttccaacagatatttacttatggaaagatttttttcttttttttttttttcttttgagattcagtctcacactgttgccctggctaaagtgcagtggtataaacatggttcattgtagtctcaaccacctaagctcaagtgatcctcctacctaagcctccagtgcatcctgggaccacacgtgctggccaccatacccagcgtgtgtgtgtgtgtgtgtgtgtgtgtgtgtgtgcgtgcgtgcgtgtgtcggagtctcgctctgttgcccaggctgcagtgtagtgtcgcgatcttggctcactgcaacctccgcctcccaggttcaagcaattctcttgtctcagcctcccaagtagctgggactacaggcgcatgccaccatgctcggctaatttttgtgtttttagtacagacagggtttcaccatattggtcaggctggtcttgaactcctgacctcaggtgatccacttgcctcggcctcccaaagtgctgagattataggtgtgagccactgcgcccggccctggcttatttttttttattttttgtagagacagggtctcactttgttgcccaggctgggacactgatatttgagtttcatgtaatttccacatgtcacaaagcattcttttgctttttttcccctaaccattaaaaatcacaggtcatataggccaggcatagtggctcatgcctataatcccagcattcgagaggccaaggagggaggactgcttgaagccagaagtttgagaccagcctgggtaacaaaccaagaccctatctctactaaaaaaatcagtcaatcaggccagtcatggtggctcacgcctgtaatcccagcactttggaaggctgaggcgggcagatcacctgaggttggaagttcgagactagcctgaccaacatggagaaaccctgtctctactaaaaatacaaaaattagccaggcgtggtggcacatgcctgtaatcccagctactcgagaggctgagacaggagaatcgcttgaacccaggaggcagaggttgcggtgagctgagttcgtgccattgcattccagcctgggcaacaagagtgaaactctgtctcaaaaagaaaaaaaaaatcaatcaatcacaggccgtattaaaataggcaatgggccatagcttgccggcctctgttctagaaccacagagctcaaccactctgtttactacctctaatagtgaagaacagctcttggtgtttgtgcagagctcagccatatctatctatctataccacgaagacaccacactctagccccagaggcagccagaagaaggaagcactgaacaggtgctcaccctgtattaaacattgcttgcagcactacttgtatgaatgaattttaacccccactattccacagtgctgtgatttttctctttacagataaagcaactgaggtacagggaggttaaatcacttgcctgaggtcactcagctgtaaatgtgagaagtgaagccaggatttgaacccagactagacattatagacaacgttctaccatgctataccaaagctcagcctgggcccagagccagactgtctgggtttgaatgcgacaatgcactgcatgtaagcccttggcacaaagtctgggacacattaaaggttgataaatgttagccattaatatcattaagactattgttacaactactgtgggctagctatgtggcctttagcaagtcactctctctgtctgggccttggttaggtctctaaatagctcccagcatcaacatttttcacccctatgaggttgcagagggctctctattttccttgggtctcaagttgagtttaaactcttgagcaggaggtcaggatcctagccgaggggacacacaagggccacagaggaggtgaggtgggctggaagtggggaaataacatacgggatactgaaagggctgcccagctggagagctgggagcaatctttctcccagccacacagacaactatttctcaccaaaaatctattatgttcccctgtaattcaatcaggcaagaagggggccccaaattaagtctgggactagcaaattatcttttaattgtaccctctgatttccatgtgatgaacacagtactaatggaagaatatgcaagccacaaagagactgaggccagggagcctatgagcataactcctcttgacatttcacacagctctgctgttccagcggcgacgggctcagtgagtcggtgtctaggaatgtgagcaggaggctgcaggcgctctcctctccccctactcctcttacaaaggacttggtgggtgggtggggaataagtgagaggacatctcaatgccatgaaaactgcctccccctggaagaggaacagccttctccccatgtcctgagttgaagcagaagcccctcccaggtggaatccatttgacctccaaaaattcagacttcaggaggaacctttgaaggattgatcaccagatgtgataagctgctggctgctcagacccaagtgtgtggttcctcagagccaacttcaaagggcccaagccacccatcactgggagatgaaatgtcacactggaggatatatttcaccctcccacccttggaaactggtcctggatagaaaactgctcttctaggtcctcagagcagctggcagaacattcatcagttatggctgccagaggcaactgcaggaatcctttgactggcaattatagtagggataaaatggcaggagaggtgttaatctccagcacatttcataagttggaaacctggcacggagctgaacaaactgactccttagaaccagctgaggcacaggtcttcaaagcgtctgtgacaggctggagaacaatagccttcataaccggcagccccaagtgaatgttcaggcaaggtgtggtaagtgaatgaatcaccccaaccttttgtcggaagaaagctctggtcaaacaattcaaaacccaagaaactgtttgtgtgaagccctctattggctgggaggactccaatcaaggaagagaatttttgaggactccgaagcctccaaatactgaaaggtaagcattaccacccccatctactaaccatctttcgtgccccactcctcccctcttccaaatcactttctacattatagcagcagtcatccttctaaaacaagggtcccgggcaggcatggtggctcatgcctgtaatcccagcactttgggaggctgaggcaggcagatcacttgaggtcaagtgttcgtgaccaacctggccaacatggagaaactccatctctgctaaaaatacaaaattagctggatgtggtggtgtgtgcccgtaatcccagctactgcggaggctgaggcaagagaatcgcttgaacccgggaggcggaggttgcggtgagccaagatcatgccattgcacaccagcctaggtgacagagccagactccgtctcaataaataaataaataaaatgtcccagcaattcccagcttcacagggttatgagcattaaatgagaacatatgtgaacaagctcacttcagtatctggctcatggaactcagtcagtgttttacagagtgagagtttagtatctgctactcctgtaatgtgatgtcatgttcacaaacaccaggtaaaagacaatatttggcatctatcttaggtatcatggaaagagaaaagaatttggcatctggatagaactttagagatttagtctaatcctttgttttacagttcatgaacttgaaactaggaatggagaattggaagcccaagacatatgaggataccaagtcacatgaaatgtgttcagattttcagactgggagaattatttcccaatatattgaaaaaagaaaatatgttggcacagtgatggaaccattgttagtaactttggagaaactggagaatgggtgcaatatctccaaagtgtaatgttccatatctactatataccaggcgctggggatgtattcatgaaataaaaatggagatagctaactggcccagttttcaaaaaggaggaaaaacatactggaaaaaggaagccttatgatccttttgctttgattccttcacataaattctaggcagatgatggaataagtggacagtaagcacttagaaaaggagctgatcatcaggagtcagcagtagtgaaatagtagtgactagttagacttgacttcatgttttcactgggttactcatcatgagaccttatcttggatttccacaggcatttgataaactctttcctgatatccagacagtaagaatgtgggcaggaaatctagaaaaatcagatacaagaactcaacatacccagcaatttgaggctctaaactgtagaggcaggattcctgaataccttgctagagctcacattgaggaaagggcatgggatttgagctcagaaaacttttcttttaatttcagtgctgcccttcccagcagcataaacttggataaattatttaacatctctgggcttcccttgtcctgcttgtgctatattcctcaagaggttgttgcaggaactgaactagatgatgagtacaaaagccctctgtaaactgaagatgcattataaacattagttattatcactgttctagtgctatagttgctcatcatgggggtcctgaatcataggtttctttactaggcatctgtggacacctggtatgggccaggcctatgctgggcactgacagtacctagtgcctgccttcacgtagtttgatctggtgatagacagatatggccacagggtccttcctgggtgtgatgtgcttggagacacattgaaggaacccttcccagaggagaatgaatgctgtgtcagagcagggcctggaaaaaggaggagaagacagcacctgcaggagatgtaggaggctgtaaaaggagttaagagagcaaaggtttgggggactcccagggagccttatgtggtgagtcatcaatggagtacagcaggaggtgaccagagccgttcctgagggaactaaggttcacagagaaggttgctgtttaaggtcacaggtctaggaactgacaaagctggagtttgacccaagtctttggactccaggtccaacatactaaaactgcctcaaataactattttattcttgccatttgatttacagtaatatttctgaaagtgtaactaaaggaatagcagcattggaccctctggtcagcttgttgaaaatcaagattcctgagtcccacttcagatatacagaatcagaatcgctgagactggggctaagaatctgcattttaaacaagccccagtgtttctgatccacactaacaattgaaaaccaatgcttttctttttcctaagtgcttttccacttgatttcattttattctcacaataaccctcagaggcaggcaggatagatcactatcattaccttgttacaaacgagaaaatgaatgtacagatagcttgttcatcttcttatcctgaacgtagcttaataaataaatgtttggtgattgacattttgttaagccttggctaagtagagactttcaccttcctggtgccactcttacccatttgtaaccccacagtagctgcctctctctttccttggtgacgcggcagtggtgctcacgttatggtataaaaaggtgattctaggccaggcgcggtgactcacacctgtaatcccagcactttgggaggctgaagcaggcagatcacaaagtcaggagatcgagaccatcctggccaacacggtgaaaccccgtctctactaaaacacataaaattagccaggagtgggggtgtgcgcctgtagtaacagctcctcgggaggctgaggcaggggaatcacttgaacccggaaggtggagattgcagtgagctgagattgtgccactgcactccagcctggcgacacagcgagactccaactcaaaaaaaaaaaaaaagtgattctagaagatagcgtcattccatgaaagtgctatctctggaactaaaacaaatttcaaacaaacaaacgtgagggatgacattagccaacttcagaaacggtgcttctgcaagagtcagtgctactgatggcagtggagcaccctctgatctcagcaaaatctctatagggcatcatcaggaagtcatgaccagaatacagctgacacacaaaagaaaacaaccttaactcaagtctggcatgagatgctgagggttttttttgtaatcgtaagcagtatggagaaagaatttgttagcacacttccagcactgcccatgggagaagggactctagcttttgggggaaaaatgaaaaacacggcaaaataagcacagcaggttgctacagttgcagaaggcatgccattccttgaggccctggttttgatggtttaagacttagggatgacatttacagactgaggtcttagtctacataagtttgagcttatcttatcacctcaaaagataagctcttgcctaaaagaatattgtagagcgaagagatggtaatggtgcatactggatggactttattcaagtgtccaaagagtcgttcaacaaatacatcattcacccagcaaacactctgagcacccactacattctaggcactttgctaagctctgggatacaaagacaaactagatacggctccacacttggagaatttcacactctaagagtgatgctagatgtgtaaacaaatactgaaatggatataactgaggtatgaagagaataacgaagagaataacaaagagagaagaagtctctgattggtggggagaggtatgggtggatttggcggggggctcctccacagaagatgggatggtattggcagactctaataggctgattgccaggcagtaacaggcattctggcctgaaggaacaacatgtgcaaatgcactgaggcataaagagtatggtatgctcatataacgctgagcaggtctgtaagctctagtgcatggcacatatgggcagcaattagacaggaggccagaatggtggaagagagtaggggcagagcactaaagaccaagtctgctaggctaaagagttgcctacaggcagtgaagagctatcagaggtatttaagcaagcagtgatttttaacagaacgcaaagctgaaatgccaaagagaatgctgatctttagttgccagtttggctctctgaatgggtataaatgcctaaagtctacagttggccgtgtatatgcccatgtgaaatttgctggccaactagtgttcactaacagcagagtatgcctttgtcctggggccacatctctactgccttgtcattttaacagctgatatttgtctatatgggctgtaagcacataagcatggaattgcaaccccttatagataatcatccactgttgctccatgatactaattagaaaattgaatgtctaacattgagtaacaaatgctgtgttgacagggacatccttctccaggctgcactgggaaaaatgcttcggatatctcaagaaatctctaggcaattcaaggaaaaaagccctcgtctggcagggaacacctgaaaaatcaccctggttaacagaaaatctgcgtgtgatcttaggcaagccattaaatctctctgggcttcaacttcttcctctgtaaaaggaaggagttaggtgagcaaaaaattccatacccattacaggtcaatgcttaaagaagcaacgaggaaggaggtgtgatcaaaggaaggttgactggtggaccacccagagaactcttcaaggctgatgttttcttggtgaatgaccctaatctaggcctagcttttggcctttcaggtttttgaccttcctaatgtccaaagaggtgtagacattctgtgatggttctgacctaaccatttatcaaaccctctgtacacttatgaattgactattaaaatcagaacactcatatcccctatacaggtactacttccagacccttcctgttattaagtatcccaggaagctgaattaggcatcagaaggttgctctgtgagcatggacttaaaataaagggaaatgagtagccactgaaagaaatttcatcctggcagtggtgagtcagccaaactagcccaggttgccacaaaggaccctattctggtgaccaaatctagattcagcatctttatctgaatacagtactagttttgcttcactaacttttcactttctgtttcattgctggccacttatttattatattggttttggttttttttttttttttttgagacagtgtctccctctgtcacccaggctgaagtgcagtggcacaaactcggctcactacaacctccacctcctgggttcaagcaattctcctgcctcggcctcccaagtagctgggattacagggacctgccatcatgcctggctaatttttgtacttttttttttttttagcagagacagggtttcaccatgttggccaggctagtctcgaactcctgacctcaaatgatctgcccacctcggcctcccaaagtgctgggattacaggtgtgagccactgcgctcggccttatattggtttttaaactaagttttaattgaaaaaaataactacttctttagatatgtgcgacaatcaccaattcacacatattattcagccctggcagacatttgcctctctagtaactaataacaaagaacaaacattcatgagtgctctgtgaatagtgttcccagtgctacacacacttttattcacagtaatactgtgagggtaggttgtaaggaggtaggtagtaagtttgtatctccatttcttctttttttttttttttgagacggaatctcactctactggagggcagtggcgcgatctcagcacactgcaacctccatctcccaggttcaagctattctcctgccttagtctcctaagtagctgggattacaggtgcctgccatcgtgcctggctaatttttgtaattttagtagagacaaggtttcaccatgttggccaggctggtctggaactcctgacctcaggtgatccgcccgcctcgacctcccaaagtgctgggattacaggcgcgagccaccgcgcccaacctccatttttttttttttttttgagacagagtcttgctctgtcgcccaggctggactgcagtggcgcgatctcagctcactgcaagctccgcctcccgggttcacgccattctcctgcctcagcctcctgagtagcagggactacaggtgcctgccaccatgcctggctaattttgtgtatttttagtagagacgcggtttcactgtgttagccaggatggtctcgatctcctgaccttgtgatccgcccccctcggcctcccaaagtgctgggattacatgcgtgagccaccgtgcctgctggcctccatatttttttattttattttattttattttattttattttatgtttatttatttattgagacagagtctcgctctgtctcccaggctggagtgcagtgacatgatgttggcccactgcaacctccgcctcctgggttcaagcgattctcgtgcctcagcctccaagtgagtagctgggactacaggagcatgccaccatgcctggctaatttttgtattttcagttgagatggggtttcaccatgttggccaggctagtctcgatctcctgacctcaagtgatccacctgccttggcctcccaaagtgctgggattactggcgtgagcaaacgcgcctggctcgtttctttttttttttttttttgagatagggtcttgctctgtcatccaggctggcatgtagtggtgcagtcatggttcactgcagcctcaacctcctgggctcaagcaatcctctcgcctcagcctcctgagtagctgggaccacaggcatgagccaccatgcctggctaaatttttgattttttgtggggatgaggtcttgctctgttacccagactgatcttgaaactcctgagttcaagcaatcctcccgcctaggcctcccaaagtgctgatattataagtgtaagccctgcacccagcctgtatctccagtttgttttttttttttttttttagactgagtctagctcttgtcacccaggctggagtgcagtggtgcaatcctggctcactacaacctctgccttccaggttcaagtgtttctcccgcctcaggctcctgggtagctgggattacaggcacccgccatcatgcctggctaatttttgtatttttgtagagacagggtttcaccatgttggccaggctggtcttgaacttctcacctcaggtgatctgcccacctcggcctcccaaagtgctgggattataggcatgagccactacgcctggcctctccattttctagatgagaaaaatgaagcacacaaagggcaagtaacttgcccaaagtacacagataataaaaggcagaaccaggatttgaaactaagcaatctggttctagagtgtgctcttaactacaacacaatactgctttcattacttgtggatctaattagttcaactcacagaggacaaacttcatttccaacttcttgggggaactgccaacctatccaccccactccccatcataaatcacctataagtaaaagatactatgcaagtattccattttttccactctatattgaatatatatctttagttaatgccatctttcaaatatacaatttaagaaaacaaaatgaaacaaaacaaacttacgattggaattgaaatttttcagatttcagggcaattcataatcagtttggtggctagagtagctgaactcattcttcctctcttgccctcctctccggaggtacctagggcttgttcctgcctggattgtagctacagagaagtgcagctcaagacctgctgctggaaagaaggactcctggggtcagcttctctggcttctactcactatgggatagctcctctgagggcaaaagacaaagctttaacttatcaccctgacacttgcaggcaattttctaaaacaacccaatgtccggaactgattccgtcttgccatttacagtaactgcagccacggtggctgctataggaaggatgtggggaaggggaaggggaagggcagggaaaagcctgacttacatcatatctcttggccacctctagcaattcattcaacaaatatccctcctatgccaacaatatgctcagtgctgacacaatgaggggcaaaaaccccacagtccatgaccaaattgttctattagaggtcttaagatatcattaaggagatgatcacatgaataaatgtgagattaaaactacttttttaaaaaaagcctcaaaggaaaggtctatgaaaacataaaacagggacctaacctatttttcagggtgaggaattacttctatatttctctgagccatccaggtaaagatctaaacgataagcaggagttaagtgaacagagtaagggggcattctaggcagagggagcagaatgaacaaagcccttgtcagaaggagggcctgtccagaagagaggtgaggctgaagtgcagggagcaggaggttgtggagatgtggagagaggccacattacggagggctctactgtaggccaaattaaggaatttttttttttttttttttttttgagatggagtcttactctgtcaccaggctggagtgcagtggcgtgatctgggctcactgcaacctctgcctcccaggttcaagtgattctcctgcctcagcctcccaagtagctgggactacaggcacacgccaccacgaccagctaatttttgtatttttagtagagatggggtttcaccatgttggccaggatggtctcaatctcttgacttcatgatctgcctgcctcggcctcccaaagtgctgagatgataggtgtgagccaccgcgcctggccaagttaaggattttggtctttatccaagaacactgggaagttgtggaagtatacaaggtaggagagacaacacagagtgacacagtcaagtttttttttgttttttttttttttaagatcactccttccagccaggtgcagtggctcacacctgtaatcccagcactttgggaggccgaggcaggtggatcacttgaggtcaggagttcgagactagcttggccaacatggcaaaaccccatctctactaaaaatataaaaattagctgggtatgggggccggtgccttaatcccagctacttgggaggctgaggcaggagaattgcttaaacccgggaggcagaagttgcagtgagccgaaattgtgccactgcactccagcctggggaacagagtgagactctgtctaaaacaaaacaaaacaaacaacaaaaatcactccttccaactgctctatagagaacagattagggggtgcagagtggctgtgggagatgaggctattgcagacatccaggtgagatgatggtagcttggagcagggtggtggtgggagaaaaggaaagaagtaaacctaccaaaatataatttagagataaaactgataggcttggatatgcaggatgagagagaacaggtatcaaggattcctaggtttctggcttaggcactgggtggatggtggtgcctctcaatgacatacatgtttcagtggaagaggagccagttttagggggaagagtgaaagtccagcaaagtctagagaagagagtctgaagtgcctggaagacattcaaatggacaagccaggttgatagtacaacatatgggtctagaactcagtggaaaggtttaggctggagatactgattttagggtcatcagtgtgtggaggacaatggaaggaagtcatgagtgtgtgtaagactgcctaaggagaaaacagcacgcctgaaggaatggtaacatcccagagctggacaaagaaggataagcaaacaggtattaccagagaggtaagagaaaaccaggagagtgtggaatgtcatgaaagccaagggaagagaacatttcaagactgacagatactaataataaatgctaacatctgttaagtcccagtcatggccagacattctgctcaggactttgaatacatgattgaatttaatgttaacaactttttgaggtgggagccatttcccttttcatagacaaggaaactgtggcaaagaatggttaagcagctgactcatggtcaggtggctggtaagtgaagctggcatttaagctcaagcagcctgactccgaactttatccacttttctctaatacaacccttagtgcagtttgggaggtcatataagatgaagcctgaagagtggtcggtagacagactgatgaagctgttattcggaatattactaaaggaatgttgtttcaggggagaaacagaatgaaagccaggctggagcccatggttaggaatgctccatgacattctctatttccagctgtcttagggaaccagttaagagaccaggccaggtgccgtggctcatacctgtaatcccaacactttgtgaggcccaggtgggaggatctcgagcccaggagtttgagaccagcctgggcaacagagcaagaccctgtctctacaaaaaattaaaaaaaaattagctgggcatggtagtgtgtgcctgtagtcccagctactcaggaggattgtttaagcctgggagattgaggctatagtaagctatcatcatgccactgcactccagcctgggcaatagagcaagacctatctcaaaaataaataagctaattaatgaattaattaagaggccaggctagtatgccaactccgtatcccccacagtgcctaatttgatgacttttatatatagcaaatgacgcttgatatatttggatagttaatataagatgcacaatgttgccatgtgctgctgctaatccttcacattaaaccattctaatgttttcagagtccttgatcatcacaactactccatgagatggatttcttttatgacattttacagataagaaactgaggctcacaggggctaaggaacttgcccacagttacacagttagcctagctcaactaagactcaaatcagattttctgtctccaagtctactgttttttttttttttttctcctgggagtcctagtggaaagcagactctcttgggagccagggagacctgagttcaaatatcatctgtgtgaccctggacaagttactccaaacctttctgggccttcctgttttagtataaaatgggggttgcactggccaggcacagtggcttacttccgtaatcccaagcactttgggaggctggggcaggaggatcgctggagttcaagaccagcctgggcaacatagtattaataagaccttgtttctacttaaaataaaaaaaaatggcaaggtgtggtggcacgcctgtagtccaagctgcttgcaaggctgaggtgggaggattgcttgagctcaggaggttgacactgcagtgaactatgattgtaccagtgcactgtagcctggacaacagagcaagaccctgtctcaaaaaaaggtgggggttgcagggttattatgaagattgaatcagataatctaagtgaggttcttaatacaacgtttaattaatatcagttatctatctctggcctcatctctctccatttttctacctctgcctcctatagaagctgtgaaacatctgtgggtccttagttctctcttctcaaagtaaagagcaggattaaggcacattcaagctcatatgctgctgctacatcctaggagtaccactctgtggtcaggctggagtctcttgtaggggcagaggaagaaccagatgtctgcccttccttcctctgtcaggcaggccccagccccctgtccaatagccagccttaatgatctacgggctggctgtttcctaaaagataaactggacaaatgagtaaacaccttctggagaaggccacagccagaatcaaaggtttaggttagtaagtgtggcagcaacatcaacagcataacagcagatggcagggttgctccactgactctacatcaggagcctgagacccagaagaaagttaacagcacttttgttgacattatagagtccatgaagcctttaaactaacacccttcaatgttatctgacactaccagtgtgtggcaggcagggtgagggctctttaccccatattatataagaggaaactgagcctcagtgaggttaagaaatatgcttgcattcaagaatgccaagagactcttgcaggcaaggagtaagaatgcctgagttcaaatctcagctatgctacctattagctctgtgactttaaacaagtaacctccatttccctattctcgaagtaggtaagactagtactacattttattaagtcattgtaaggattaaatgtgctatgcatgtcgtatgctcaggagggtgtctggcacagagtactcaataagtggtacctattactgtaattatgattctaccaggcttgcttagatggggatgaggggagagaaaatgaatgtggctttcagcatcacagaaagtaccctgctgtcagccaacatattacaacacagtctctggttgctacgtgtgttatttcttcactggccttcctggagtcactaaatttagcggaaatggtctgttgcctgatgcagtgaccacagtcttctatctgcattagccctttcccagagtataggtattagtaaccgcttttcaaaagtgaaagctcaaatagtcttatgtttgcaatcctgagaaaggaagtcctgaaagttcccaggagccttaagagcggtggattttccttctgataatgctgctaggaaccaggtcaagcaatagagacccacgctggggccatcaagactaataggggtagcttttcttccctcctcctaagccaaacacctttgatcagggtgaacggacaatcatcaaaaaagttgtcaaggtcctctggcttgctaacatgccaagaggccaggtcaccattgatagctccacactttaacctcagctacaaatgacatgctctctggctactctcctggcctctcctaaggagagagagccaggtccagagaacatcagaaaggattgccccagatacagaattaatggcactgctcaaggaaaggaaagagaggtaactcagagttttaaaaaaggcctactgggctggtccaagtacaatagtgtttacaagtaattgatcactaccagttaccgatttctttgttccttttccactcccacaatttcacttcactagcctaaaaaaaaaaaaaaaaagaaagaaagaaagaaagaaaaaaaagaaaagaaaaaaaggaaaaaaaagaggcctgttgggaaggcttgggaggactagtcagccatatgtccaggagatccaaaagattctggccagctgcctaatcgcaccagcacaattactgacagagctactttcagttttgtcactggcctccattgcacagtctgaggttccagctttaagtagcttcctgttgtcctgggcacctgagggtctgtcggaaggctaacagaggcaggattatggatgtggctgcagacagaagaatggggtaatgtaagggagagatgaggggaggagtttaggatggaccccagcaatttctccattcaatatccagccccaccctgtgactaggaaaacaaaggtactgggggaaggggagaagaaaagtcatttcctttattgtaactgtagcccagctgggtaagagcaaggctggaagggggccttgaagaatgaatttctctgagtagcacagagggagagtcctcctcccagcaggcctgcactactcaggtactctaaattcatcagagaaacactggcaagctggcgtgggagagatcttacaagaccattcaggttgatgccccatgttcctcaaaacccaggttatctctggggtcagacaaatacaatccttcctagccctgaagattttcctccaactggggcaaaagtcaaattagatccaaaagacagtcactctccccagggcaaattaccaggctctatctgagggcgccgtgacatccagtttgaatttaccaggggaaagctcagaagtcaggagatgtgctccttcagcacagctggattagagtctctgtcctcaaggtaaagctgcaactaggagacagaacctagatactctacttcctccacgggaatgatatttggcttgattgtgtcagggtagttcaaagttgcccttaatccctggggctccacatcagatcaccaatgaatgtgtaataagagaaatgtatacatataggtgtatatagacacacactcacaacataatataaagtgacagttactgattattaagggttttttttttcatttgttttgttttgagacaggggtttcactctgtcccccagctggatggagtacagtggcatgatcacagctcactacagccttgatatccctgggctcaggtaatcatcgctcctcagcttcccaagtagctgggactacaggtgtgtgccatcacgcctggctaatatttttgtattttttgtagaggtggagttttgccatgttggccaggctggtctcaaactcctgggctcatgggctcaagcgatccttctgcctcggcctcccagagtgctaggattacaggcataagccaccacgtccggccctattaagagttttctatatgtcagatgctatgctagccactttatataggttatcacatttaatcctccctaacaaccatgtggcatgagtaatattcttatcctcattttacagattggtgcctgaagctcagggaagtcacttaaggctagttaataaattgcaaagccaggatttaaaaccatagtctcattccatagcctgtactcttggtggtggttgtttttttgcgatggagtttccctcttgttgcccaggctagactgtaatggcacaatctcggctcactgcaacttctgcttcccggattcaagcgattctcctgcttcagcttcccaagtagctgggattacaggcatgtgccaccatgccaagctaatttttttctgtatttagtagagatggggtttcaccatgttggtcaggctggtctcgaattcctgacctcaggtgatccacctgccttggcctcccaaagtgctgggattacaggcgtgagccaccacgcctggcctgcctgtactcttatctaccatgctaacgtgtctacttcctctttatgtatttgtgtacatatgttatctttctgtctctatctcacacacacacacacacacacacacacacgcacgcacagagctaacaagctagcatctgactagacctacaaatgacccaagagttcagtgctagggccagctcttgtcatccatggcctgagcaagtctttttggtttcaggcctcatctgtgatatgaatgggttataccatatagtgggtggtttcttctagttctgaagttttttagctctaagagaatccagaaattccaaagattaacttgctctaccctgtcctgcttattttggatagaaaatattcatacacataggaaaacagcaagaatatgaacatatgggttacatgccaaggcgagacccaatctgtgaactcattgggttttgacgttacttattagtcccagctataaaatgaaaggaccagccaaaggctttaactataaggtcccttacagctctgacattctctgctcctgtcatactaaatggaacagaaaagacagaatcaacttccctgggagtaaaaggggcaagaaccaaggcaataagatccacagaaaagacttgagagctctgagttatagctgaaaggaaaggataataatgatggttgctttccaactcttccagaggccagacgtctccaggccaatcccctatatggttcccagggaagaggcaagtgtttaaaggtcaactcaattacttggtataagcacagggatgttttacaacaagagctatgtgcaggagctggaatctacagcacaaggtgcctgcctagtctatctcattctcaggatataggcacagccctaccacttcagaccttgggggccaggcatgcccatccagcctctggagtggactgctcttctttccaccaacaaatttcaactattttacgttgtgaagaatataaagacaagttcccacccttgagaattccaatccgatgggaggaaggaataaccattcactgggtgtctaccatgtactggatacactgcatatattatttcattcaatctcaacaagattattaccatccattttccagatgaagaaactgagcctcagacagcaggaacaaatctgatttgaagtctgtataatttttaagaaactgagctgcctacaaaaataatgtagctataggcagggcgcggtggctcatgcctgtaatcccaacattttgggaggccgaggcaggcggatcacctgaggtcaggagtttgagaccagcctggccaacaaggtgaaaccccgcctctactaaaaatacaaaaattagctgggcgtggtggcaggtgcctggagtcccacctactaggggggctgaagcaggagaattgcttgaactcggggggcagaggttgcagtgagccaagatcacatcactgtacaccagcctgggcgacagagcgagactctgtctcaataataataacaataataataataatgtagctataataaagctagtaacaaaaagtaggaacctagggaggcaacctgtggtgaggaagagctggctctgccaaccacactaaaaacaactcttggctgggcacagtggttcacgcctgtgattccagcactttgggaggtcgaggtgggtgcatcatttgaggtcaggagttcaagaccagcctgaccaacatgttgaaacccccgtctccactaaaatacaaaaattagctgcgcatggtggcaggtgcctgtcatctcagctactcaggaagctaaggcagaaaaatcacttgaacccagcaggcagagattgcagtgagccgagattgcaccactgcactccagcctgggcaacagcaagaatccctctcataaaataaaataaaataaaataaaataaaataaaataaaataagaatacaaacaactcttgaagtacctgcataatctgtagtgcagccacaggaaagtcactcttcctgggcctcagtttcctcacccataaagtgagggatatgggacaaccctggaaagggctcctctcatccccccaccctgcctccagctggcccatttatggctcttccaatttaacctgggttcaggggggccacacttgaggtttggtcatgagctcttccttggtacattcctttccccaccctaagattgaaattctcaactcagaagcttgtttctgtgttttccatcagaacatgaaatagtgcttggcccatagtacactggtaaagatgggaggataggcccacctaccggaagcaagagccgtgccaggtttcgttgacagtcctgtaccatatctggcttggagcaatgtggtccccacagcctggacacctccagacatcttcacctgcacacaaaaccaagaggttgagaggcccaaagtagcaggaggcaaagggacaggattcctaccatgtagaataagactgagttaacagcatctcatttgaaagggttaggccaatgctctgctagatgcacagtttctgcctccacaagatctctggtaagcacttgtccaacctctgctcatctctccagggacaaggaactcatggcctcaaaagtagtctcattccattttctaaaaatggttctgattatccttttttctactgaaacaaaacttgcctttttctagaactttcagcctttgcttatagctctgagaagaagaaacgaacacaatctccttcttttcagtgtcagcccttcctatgactattcccagccaacagccagaaacttctctctgggttaaacatgttactgccttttcctattcctcaaaagccctgttttttcagatttttccatcacctaatccaagagctcatttactcaaccaacattgaataaattggtcctctagatcagcagtcctcaacctttttggcaccaggggccaatttttccacggaccctaggctgggggttggggggcggggggatggttttggtatcaaactgttccaactcagatcatcagccattagtgagattctcataaggagcatgcaacccagatcccttgcatgtgcagttcacaatagggttcacactcctatgagaatctaatgccaccactgatctgacaggaggcagagctcaggcagcaatgctcactggcccgccgctcacctcctgctgtgcagcctggttcctaacaggctacagacccgtaccagttggcggtccaggggctggggacccctgttctagatacaaagctctttgtatgttggaggctgttagattacataatctctgctccttaagaagcaaatccactggaaaagaactgctctttcatgttgttgatttttcacttggatgttatttcagagatagaaccaagtattattttagttcagaaaaagaaaagtaatgggtataaaaggggaagaacaaatatttaatgaatgcctcctatatgccaagaactctgctaggtgctttcatagacctaatctcatttaattctcaaaataatcctgtgacacaggtattattatattcacttaatggataggaaaattaaaacttgaggcagggggcagggttgactagctaagtggtggatctagcattcatactcaggtctggctcattctaaagcttctgctctttccattctaccatgtcaactcttgttcactccaatgaggggaaccaggaaagtctttgtagaggaagctgacacttgagctgagccttgcaagatagggaagacttacctatcactggctgagaaaggagggtgaagggttgtgtgagctcagagaccagcatagacaaaagcacagagtcggtccatgttcctccaaaaagagaggcctcaaacaaaatacaatactcctggtatggctcagatgtcaacttcttgaaataaagaggacagctgagatcaagctgtggtacctgactcagccctagaaagcaggacaaggttgttacaagactcccttgtgcgctctgtgtatgcagctttgttctctctgggtaactacagactgccacaggcacagtgacagtcaccgaaccctgtttcacaggcacaggggccatgaatagacaaagcacagctcctggcacttcaagattgctcaacatcattctggagcagccaatgtacacagttgtccccctcgttccccagagaagagttaaacaagctggcaagaggccttaaaacaccacctcaacccacccattccactcttctcatgcctcagtaataggatatatatatgcccatcactcattcttcctgggtctaaaatcctcagactccttgtcaagaggggcctttttggttttagggtgacagtggtcacagagtatgccatctctctcacaaactccaaggcagaaagtctgagagactcactcaaaccaatcccaggttgggttacggacagtggacaagacaatgaattagtgagagattttaatgaacacaaacatccaaatgaatcttccaagttttggaaatatttttggaactcttacatgtaagagctttcagggtcagtttatgagctgccatgccccacccccagcacatctcattattttagagccacaccttgtttcttgtttttactttttaacccaaaattaagtctgtaacctgaccacccacttactcaacaattcaatctcttggctctgaatgatttctatttccaaaattcaaacaggatcaggactttccaccatgaggatattcaagataacttgttattgccataccctccagagcttgccctgctttctccagtcttgagaaacccaaagacattcaatcaacacatactttagtacctgctttgggttaagcatgaaagacccgaaatcaagaccctctactctctcctctcatatccacctggtttcactttccaaatgtctctctagcccttccctgtccttcaccccagccctacttcagatttttggcttcttttccctatctgctgtactcagctggctcatccacactgcaagctatctcagctctgggttagactccccagtgtccacggaacaaaggctgggctactcggtatgacacccctgttctggatcccattccatcttacttcttagaagaagtgcacttttagttatctttacagcacccctctccctcactggctcctccttatcttttaaataagttcaagtcactgccatcaaaaaaacctctggtactctcgcttcagcagcacatacattaaaattggactgagacacagaaggttagcatggcccctgcgcaaggatgacatgcaaactcgttaagttttaaaatctaatttagttttaaaatctaattttaaaaaaaaccaaaccactggatccttttctcctctagctaccatccttgtttctccccttcacagccacatgtatgaaaaagttgtcttgggaggccaaggtgggtggatcacttgaggtcaggagtttgagaccagcctggccaacatggtaaaaccccacctctactaaaactacaaaaattggctgggcatggtggtgcacgcctgtagtcccagctactcaggaagctgaggcaggagaatcgcttgaacccaggaggtggaggttgcagtaatctcgccactgcactcacgcctgggcaacagagcgagactctgtctcaaaaaaaaaaaaaaaaaaaaaaaaaaagaggctgggcacggtggctcatgcctgtaatcccagtactttgggaggctgaggcgggtggatcacctgaggtcgggaatttgagaccagccatgaccaacatggagaaaccacatctctaccaaaaatacaaaattagccaggcatggtggtgcatgcctgtaatcccagctactcaggaggctgaggcaggagaatggcttgaacccgggaggcagaggttgcagtgagctgagatctcgccattgcactccagcctgggcaagagtgaaactccaactcaaaaaaaaagaaaaaagaaaaaaagttgtctacacatcgctgccctcatttcctcacttcccactttctgcataatgcactgcaatctggcttccacccccaccatttctctgaaactgtctcaccaaggtcaacagtaacagtaactgcttattgctaaattcaatggacccgcttcagtcattctttcagcaaatatttattgcatgccaactatgcatctgacactgtgttggggaaagaggagcaaacaagagagagattaaacacaaagcaaatattaaacaataatataattatttattgagggccgggcgcagtggctcacgcctgtaatcccagcactttgggaggctgaggcaggtggatcacaaggtcaggagttcgagaccagcctggccaatatggtgaaaccttgtctctactacaaatacaaaaattagccaggcatggtggtgggcgcctgtagtcccagctactcaggaggctgaggcaagagaattgcttgaacctggtaggcggaggttgcagtgagccaagatcattccactgcattccagcttgggcgacagagcgagactctgtctcaaaaaataataattattattattatttatttataattggggcaagtggtacgaagatatcaagttcataactaggaaaagggcgggcggccaaagtattccttgaggaagtaatttccaagctgagctctaaaggatgaatacaaattaacggggcaaaaaaggggggaaggaaggctaacactggagaggggggacatgtgcaaaggccctggggcaggaacaaaaacttctcacacatcattaaagttggcttttgctacctccaaagggctagcaaaccatgtctggcccctggtctgctacaatccttcaataaacagttactgaaagagcaaatggtccttacaatgtggtcccaaaggacccttctctctcaccattccttacaaaagaatgctctagttacattttgacctattttctattcctgccacttttattcatgtacttgcatcctgacattcacacctccagttattctctatgtataagcttctctatcttttcccttaatcaaaaaaaaaatttttttttttgaaacagagttttgcttttgttgcccaggctggagtgcaatggcacaatctcggctcaccacaacctccgcctcccaggttcaagtgattctcctgcctcagcctcccgagtatagctgggattgtgggcatgcgccacgacgcccggctaattttgtatttttagtagagacggagtttctccatgttggtcaggctggtctcaaactcccaacctcaggtggtctgcccacctcggcctcccaaagtgctgggattacaggcgtgagccactgctcccggccccttaatcaaatttctatcctttctttaaagttccctaaaatcaggcagtgtttgtttcattttgtctatacctattttacataatttgttatttaattacagttcactgcatatgtttctctctccttcagtccctctctctccactctcctcccccacaccccattcagagaactaaggtgtaagaactgtatctttattatgttcttatctccagggcctaaccttgggcctggtgcaaaacagacattcctttgtgtggtgaacccaactgaaaatttggatccaactgccagctataaaagcaatttccaaagataagttccaaaggtcagcacagatgattccactggaataactgttctggctcccagattacctatgagtagtctcatgtggataaacctggcctcagtttacctgttatgcattcacactgcttttctgttaggaagtacctgagcaaagatattcacccaaagcacacagcctcctacgcccagaccctcttcaagagaacactcttgacttctttagctctcttacagtcttaaaaattcattgatctattctcttaccacctttattctaggaaatgtaaaagaaatgtaatactgtaatgcaaagtcttagggatttctgtgaagcctagtggaggatcaatccaaagtccagtcagcctgggaagttctttcttaagaaaatatctcattgtaccaggctgttcattctctccctctatagtgtttacctctcatatttgcagacttatcaacagtggctactgattgttaagagtccagaaaagagccgggcgtggtggctcacgcctgtaatcccagcactttgggaggccgaggcgggtggatcacgaggtcaagagatcaaggccatcctggctaacacggtgaaaccctatctctactaaaaaatacaaaaaattagccgggcatggtgatgggcgcctgtagtcccagctactcgggaggctgaagcaggagaatggcatgaacccgggaggtggagcttgcagtgagccgagatcgtgccactgcgctccagcttgggcgacagagccagactctgtctcaaaaaaataaaataaaataaaaaaaagaagagtccagaaaaggagcttgatttaagtaaatgttcacagtaccttcaaacaataaaggacccttattaggtgtttaataaacagaaaactgtgttttcagttattattggaatttgttgcttttaataagtgcaactgtgcaacgtaaggtgagcactgcaacaaatgtctcattataggggttctcacctttaagaccttttcaatcttggtataaaatacattcactttacattcactttatgaatgcttctctctcccaacttaattagcaatgtggccctcaaacaaatgtgaatccactggggcaggcgccaaaaaaaaaagaaggaaaatagacttgcctaaccaccacaaagctactgaaagatggtccaggagggattcaaacccatgctcagagactaccatgccagtcatatttttaataccctatgcagcctcagacaagttgagacttgctcaagaacacacagctattcagtggaagggttggcctggtatcccagctcagagccaatgcagtccccacaatgttcaccttaaatttggtctaagagcttggtttctgcaaatgagtcctttttaggcttcaaaatggtgagaaatcctcaagcactgagagctcatgagactctaatgcctagcttaaatcaacatcctatcctttcatttaaaaaaatctttgaagcttctcacgttccaccagacaacgagaaccaggaacaaaactcagccaattcagtgcagcataaaacaagtatggtaacccctgggccccttgggaactggcgggtcaggtgtataaatcccacttgttctgggacaaagcagaaagcagaagggcagggcagcagctgctggggaaaagccaagagaaaaagatcacattttaatgaagtgactatcaaaaagactaacagtaaggattaacatgcctctagatactctccctgtaacccaaagggttttcttcctcactagcttaccaaattttaccaaaaggagtgtctcaggaaaaaaaaagattagatgatttttaaaagagctttcgagcttctctaaaccttggattgttcttttgtaaaaggagggatcaagtgatttcttccagctctgagagactgacaccaaaccaagggcctctcctttttcaggttaaggcacagacacaggtatctcagaaagtttccttcttgctgttattctcttcttcccttctttggtttatttggaaaaatttgtgaggggtaaatgtatgtgtgtttgaaacctgaatctgtcactgtttgcctctgtgtccttgggcaaattatttgacctctctgagcttgtctcctaatctttaaaaagaggataataccacctgctttacaggattaccaagtggattaatagaaataatgtaatagatgtgaaaatatctcccatggtgccaggcacttagttggaccgatttgtgactaacttctcttccttcctgcgtgtgtatctaggaagttggctggggaaaaggttaagctgaatacagaaacttctaaaatctgaagggaaggttttcaaaacaaactcagcaaacttttttctatgtgcccatgtacaaggcacagagtaggccaggaattactggggcccttggtgtgtactcatggggtgtgaaggacatggatatacacagaaataacatgtcagagagggacaaaccaggtgctacaggcaaggcaaactcagtacattaacaaaatacactgcagtgacaaatgagacagatggttcttatgtctttcaggccacccagactgcaacttccaaccagaagttcactcaactgtgaatgagtaggcattttcttatctatggagggcctataaaaatatctttatcagagaactggttaaccaattgatatattctcatacagcagttctctgccagttgtcaatgatagaggaaaaaaactactttatgccagacaatgtcctaagcactacgcaagtatgagctaactgaatacaaagatcccatgagatcaggactagtcttaaagaactattattgttctcattttacggaagaggaaactgaaatactcagctaataaatgtttgagctgggattagaccacaggtctagtctccaaagcctgtctttttttttttttctgagacggagtctcgctctgtcacccaggctggagtgcggtggtgcaacctcggctcactgcaacctctgcctcccaggttcaagcaattctctgcctcagcctcccgagtagctgggattacaggcacctgcccccatgcccggctaatttttgtattttagtagagatggggtttcaccatcttggccagactggtttgaactcctgaccttgtgatccacccacctcagcctcccaaagtgctgggattacaggcgtgagccactgcacctggctcaaagcctgtctttaactacattttagactttctttcctggacaaaacaaattacaggcagaaagacatgataaaaaagaatcccagaaagaatgttcaaggaacactttaatgaaaccaggcattggtttcatgttctagttactattcaatgtaaattaataggtaaaatagtctaattctttctactatataaaaatagataaaggatgagaaagaaggtagacttgtaagagactgctacagtttcaggtcctctcattgaaatgagatgtgtgtgatggtgggccctatcagacccgctcaaggttacactaacaagaaggcagccctgttctgggaatcagctcagcctccagaagatgcagaaaatccaccatgaatgtggaaagcctaatacagccccttgatcatgacggatttttatttagttttgaaatcttgtggtcattttggaccctaccctgctccatcacatatccaggaccatccaagtcaccctggcctgcctatgtcaggaggcatcttttattggttggtgccttcttcattgctaccactaagacctcatctcagggcccactatacccacctccagattggtggccctgtgcccacatcatgagtcttcctttctctaaacctacggtgcctactgtagactagaaacttccaaaatcctcagcctggcattaaaccctctagtccggttgcacccacattctcagctgtaccttccacttcctatgaatcttccacctcccaatccttgcctctaccacacgtatttgctaccctttatgaagacctgaaacttgcctacttttgtctcctactcccaaagtttcttccctactaagatatcatcttccccaccttctttaagcctatttaagatttctcaagtcttacccacttcaagaagtattccctaaccaaaactgatggccaccctggataccctgctattctttaaacatgccaaacacattccctgacaactcacttcttctatccccttaccctacttcacttctcttcaatggatttatccctgaatatgatgttcatacatttacttgctgtctatctctccccaccagaacatacactacatgagggaagggatttggtctatcttgttccttgctgtatccctaggggccaaaagagtttagcacatagcaggaactcaatatatatttgtggaataaatgtttgaagagaattctccctcatctttgaaattctataatgttatcatacgcaagccttataacagcttgtcttatcaatttttttcttttttttaagagatggggatcttgctatgtagcccaggctggagtgcggtggcttttcacaggcgcaatcccactactgatcagcatggcagttttgttttttgccttaattaccttaactagacagtaagtttctcagaggcacaaactatatataactcatttccacaaatacttattaagggcttaccatgtgccagaccctgtacgtcttaagcagcctggaatactggaaagaacactgcagaagtcttaccttggttctggctctaccactagttgagtgaccctggacaactccgttttttttccctgagcctcagtttcttcataggtaaaacaaggagactatacattatctcaaaactctctcctggctctaacacctgttaaaatttataagaggtaaaacttggtcctgcccagtgccacagacatcacaggcactcagtaaatatttgatttgttatcgattctccggttacacgaggaatctgaggtgtctcagaacatggtttgaatggaataacaagtgaaagtttaagtcccacttccttctcagactccatagtcaacttcattctgctttttgtgctacagagaggaggaagcactaaacttgaagttggaaaatatgaactctgaccaccactgctcatttagctatggaaccttgtcatttctgggcctgtctcctcatctataaaaaagccatacttggctgggcatggtggctcacgcctataatcctagcattttgggagtccaaggcgggtggactgcctgagctcaggagtttgagaccagcctgggcaacatggtaagaccccgtctctaataaaaatacaaaaaattagctgggcgtggtagcacttgcctgtagtcccagctactcaggaagctgaggcagaagattcacttgaacctgggaggtggagggtacagtgagtctggatcgcgccactgtactccagcatgggcaacagagcaagactcttcctccccaccccctacaaaaaaatcaaaaaaccatattgacctcccagctccaaggctcaaaggcactacatgccttcctaccctagggcctttttatgctgtttcctctgcctggaatgctctgtgagctttttttgccaggctaacttttacttatctccaggggtcagcataaacttgcatttttaagaaaagtattcccttcaaaaaaaaaaaaagtagaggatgggcatggtggttcatgcctgtaatcccagcactttgggaggttgagacaggaggatggcttgaaaccaccgtgggcaacatagtgagaccctgtctctaccaaaacagaaaaaaaagtagagaaaaccctcacccctggtgcactcttacagcacttatctcaattgtttaccttaactattatagcatttattgcaattgttacaattatttattgtccatctctaggattattaagcaccacaaagccaagaactatgtcaccactgtactcagcatttggctaagtatatgacacagaagaatccaacaaatattctttgaatgaaagaaagaatgcataaactaatgcatctagaggctttatgcctctagactattgtactgtgaaacctttcacaattttctaagaaacagggttcaagacaggcaacctatattacacagctgttagaaaaagttactggaaatcggccgggtgcggtggctcacgcctgtaatcccagcactttgggaggccgaagcgggcggatcacaaggtcaggagttcaagaccagcctggccaatatggtgaaaccccatctctactaaatataccaaaaaaattagccgggcgtggtggcgggcccctgttgtcccagctactcgggaggctgaggtaggagaatcgcttgaacccgggaggcagaggttgcaatgagccaagattgtgccactgcaccccagcctgggcgacagagcaagactccatctaagaaaaaaaaaaaaaagttactggaaatcattcgagttgaaggactctgtaagcttaaaaaaaatcttttttaagagacaaggttttgtttttaagagatgaagtctcgctatattgcccaagctggtctcaaactcctggactcaagcgatcctcctgccctgccctcccaaagtgctgggattacaggcatgagccaccacgcccagcctaaaaaaatttgttttaggcatttccacccctagctctctccagaagtctgttatcaccagtgaagagaaaatcccatgctcccttgctgaggaagtgacccactggtagcccagtccttgcattcaagatgaaggaagtgactgtccacagacggaaagccaggaagcagggggcagatagccagcccccctccacctcaataccctcttgccgcctctccaaagcttctggacgctgaccctggtggacccagaggtgggccacccacacaggtggctgggaaacataggagacagaaggttcctactgctgggggaaaagatggggaaggcaggaagctgcagggtggtgtgtgaggtggcggggaggtgactgcaggtgcaactaacccaactctgaagctacccttcacccttagacaactcttccttccaggaggtgtttggccgaatccctctagtctttagtctagagaggccaagggagcttccacaggaggactcagaaccccaggtggcctactttcgccacctgtagcagagatctttgggccccaaaaagaatggtccgatctctccttacccttagtcctgtcctaaacctcaaggggctccatactcccttattttctgcaaagagctcccagccccgggggactcccagacaccaagatgcccgcgagaagccttgggtcttggcagggaagtcacatcctccatttccctcagaaaacccagaacccggggtaactctcctaattgtcctgaaccctagaggatcctgtactcctcaaattccacagagcttccactataagagaaccccatgcttttcaacttccttaaaaagggttaatttgggggtctgcggccgccaggtccctccaaaaagctggattcctggcagacccagaatctcttcctccccgggacctcaactcgcgggaagcctcccaacccgcctgcccctcggagccctctgtctccaggatgccctgcctccccattcccggagtcccaccctccaaatgcctggggagcgctgtgcccaccccgcctcccagcttttctgaggagctcggacccacgaggacccaaccagcccgaaacccccgagagacagccggtttccctcaggcgccatggaaccggacttcggagataacagcgggacagggcggagcagcccttccttacccgccagcgcggacatggtcccgggagcgcggaaatggggaggaggaggcgggggacacagcagctcccctcagttccctacaactcccctcagctcctgccgccgccgcctcaggcgcgggaagaccacagccccaggcgcgaacgggatgcaccgcctacggcgccctgggaggaccaaaccacacctggcacaggggactgcccgccgacgccccgccccgccgctctcaggcctcgctcccgagacgcggccccgccccctggctctggctcgggctctgcagcggccctggcgccccctagtgcgagcggcgtcccctcgaggtgctcccgccggtaaggttgattctgcgggggccggaagtctcaacacggatgacagtccgcacccatctagtcgccctcatttacagatagggaaagttaaggatcagaggctaagttcgactacattgaaatggcgtcgctcattaggaggagagccgggatgggagcccaggcctgctaactgccagttcagagctctttccagtagtgtttggaatcaggaatattacaatggaggagccaggtctatcccacaaacagctttgaggatggacttttcttagaagcttctagctcagagaaaccacttctctgcgccactatgagtaagctgacagtaaataatctctaagtcaaagacagttggaggcgaccaaccagcattccaggagcagatcctcagccaggccaattaggtttagcgcaggacgctggagcttgtgcgccgcattggaagacgagcactcccctgcaggaacatgggcctaccattcccaggtcttccaacctttcaaaacatgccaaaaatccagatatttaggtgaaatttgccacttttaaaaaatgttgatagcatcaaaaagttcttaaaatgccatgtagaccaaatgaaacacacctggccactagatttgccctgtgggctgccagtttacaatcttctatgaggaggagggattacaggactaagagttaggacagctgactgggttatggcagctgctagctggctgagtagctttgagaaccacttccgctcattaggtttggaaggagattggggtcctctgtgtgattaagatattaatacatcatcagccaggccagctggtccctgatgacccaccctcccatcagattctctcacgctgggtctttcacaattgtcatttccttacatcagatttagatcacaggaaacatgtccaaatgaccagaaagaggatggagcccagggaaatggattctgtcccctccacccccacccctgaccaaagacaaagttcaacccagctgcctctggtcccagcagttgggtaagcaaaggcaaaggcaaagacaaaggcgagcacaattctcttccttcctgctctaattcaaaccggatgccggtcagatttttctcttctgggtgtggcaggtggctcacgatgtcctgagtgtgcacaaagtgctggggaggagggctctgtcccatttccgttaattcctgggaactcttttcagtactcagttttgtagtttctgaggaaatcattatagtaaacacaagattgtgtattgaattaaagtgacaggaatccagagactctcctgacaagctgcctcatggctagcaaacaggggacagggactttccccatccttcctacagaaagatgtaacactgtattttcccaggcaacaaagcactggcatcctgggaaccaaaacctcctgggtgtcttccctctccctccgttccacaccaaggcacccaggtctatctcttctccctcctcattctctctcacattccacttcctcctacctccagcctcatggtcttcaccagcagggagctggggaatagccaagtcccccaagttcctcccagggaagttcaggcgactctgagaaacacaagttgaaaatgtaatggaagggaatagctttctatagaaatgctatagccaagagatatatttttaatatggacccaaagaacattccagaaatcacttgtgaactcaagggggacttctggagggtagagaaagcctgggcagggagtagaccaactgagtttcaatagcacccaggttacctgtccacagtttgtttcactggccatagcttggtcagtccctagggccagatcctgccagccgcctcacagtcaactctctgagcctaggatcctgaaacctggaccttgaaaaacaactcaaggttctgccctcttgaaggtactggtccactggtacccaaccagacttgcccagtgtcacttccacttgcttcaaactgagccagtctctgccctccctgaatcatcctacccaaaactgactgtgttaatcttccaaaagtatgtttctggacctgtcatctctctgttcaaaacccttcaacagcaccccactgcctacaaaataaaagccaaaccagtcctcatgagctgactacatctcaccctgcggacttgtctccctattcccttcactccaggactctgctttttcctgagcacatcctgccttgcgccacctgccattcctacaacaaccagctctccaggttctctgtaattttgtgccccactctgcccagagtgcagtcttgtttctcaactctaaatgatatagtggcatctgtaacatcacaaagtaggactaccagacattaagtgcctccaggtaagacgcaccaagtatatactatcacctatgacgtagtcttacaaaacaaaaataataagcttgaatctggtcaagcttctagatctaacaaccaacttacaggaaatacatggagaagaggagcttaataacatttccatgatgcaaatagcaaaaatgatgctgtgggaaatgcaacaggacaaataacctagtttctttaacagataaactgcagagtagaaaaaatttcatagacaggccaggcaaggtggctcacccctgtaatcctagcactttgggaggctgaggcgggtggatcatgaggtcaggagcttgagaccatcctggctgacatggtgaaaccccgtctgtactaaaaatacaaaaaaaattagccgggcgtggtggcgggcacctgtagtctcagctacttgggaggctgaggcaggagaattgtgtgaacccaggaggtggagcttgcagttagccgagatcccgccactgcacttcagcctgggcaacagagcgagactctgtcacacaaacacacacacaaaaaaacaaaaaattagccaggcatgatggcgggcgcctgtagtcccagctaccaaggaggctgaggcatgagaatcacttgaacccgggagacgggggctgtagtgagctgggatcgcatcactgcactccagtctgggcggcaagtgaaactctgtctcaaaaaaaaaaaaaaaaaaaattcagagacaaataatagcaatgtatgaaactgatttggatctcaattgaaactacacaagttatgagacaactagggaaatctgaacaatgtgattggatatgatgattttaagaaattttttaaaggtattttgctttttttttttttttgagatggagtcttgctctgtcgccccgactggagtgcactggtgcgatctcggctcactgcaacctctgcctcccgggttcaagcgattctcctgcctcagtctcccgagttgctgagactacaggcgcctaccgctacgcctggctaattttttgtattttagtagagacggggtttcactatgttgcccaggttggtctcaaactcctgagctctggcaatccgcccgcctcaccctcccaaagtgctaggatcacaggtgtgtgccatcgtgcccggcatattttgcttgtttttaaaatacttgagatgcatatcgaaatacttaataaatgacatgactggggtttgtttccgaatagttcagacagtgggagaggaacagcgtgcgggaggtatagatgcaacaagactgatctgagttgatagttactggagttgggttatggctacatggaggctttattgtcctgttctactactgtttttttttttttttccccatcgaaaacaaaaacctaaggccgggcatggtggcttaaacctgtaattccaacactttgggaggctgaggtgggagaacctactgagaccgggagttccaggctgcagtaagctgtgatcacaccactgcactctagccagggcacccgagtaagaccctgtttctaaaagggtctgttgccctggctggaatgcactagcatgatcacaactcactgcagccttgacctcccaggctcaggtgatcttcccacctcagcctccctcccgggtagctgggaccacaagcatgcaccactgtgcctggctaatattttttatttttgtagagatggagtctccctgtgttgcccaggctggtctcaaactcttggcctcaagcgatcctcccacctcagcctcacaaagtgctggggtttgtaggtgtaagccaccatgcctggcctaaaattaaaatctttcaaaaaaaaaaaaaaaacctggtcttttctcattgggcttatgagctcctgaagttccctcacctttgcattccccactgtatcttggtactattcaatttgataactgttagatcaaaatctaagaggaagaaaaaaagctcttttcagaggaattacttgtagctctggcatgttgggaaggctgaggctgggccagatttgtaacctcagcaacatcttccatctcacactacaccctgctactaaggaaccttagggagggacacaccttctgctcgagagagaggacttggctgacagcccacctgccctgttactaaacagatggagagacgctgacagtgagtaacctgattgttctaaaggctctgataagtgacaagctaagctctattgtggcagcttgtcacttacgaagctcaggaatgccatgtacttgtcaggactggggctgcctgtcagacaggttttatattgggcaaggctgtgtatgaagccaggcctccagcctacatttatcatctctaattatcaatagtcgtttaaagactttctttccttttttttaagagacagtctcgctttgtcacccaggctggagttcagtggcatgatcatagctcaatgcagccttgaaactcagggctcaagcaatcctcttgcctcagcctccagagtaactaggactacaggcataagtcatgcccagcttctttgaagactttcgttctcagtgtgacattacggaggatgcacaggagcctccaggagggcataccagtgtgactactccccacccactcgccctccacaacacagacaagaagtccaagctcatagtaatgtaaaaccatttgtttaattctaaatcaaatcactttcacaacagtgaaaattagtgactggttaaggtgtgccactgtacatatcatcattttctgactggggtcaggacctggtcctagtccacaagggtggcaggaggagggtggaggctaagaacacagaaaacacacaaaagaaaggaaagctgccttggcagaaggatgaggtggtgagcttgccgagggatggtgggaagggggctccctgttggggccgagccaggagtcccaagtcagctctcctgccttacttagctcctggcagagggtgagtggggacctacgaggttcaaaatcaaatggcatttggccagcctggctttactaacaggttcccagagtgcctctgttggctgagctctcctgggctcactccatttcattgaagagtccaaatgattcattttcctacccacaacttttcattattcttctggaaacccatttctgttgagtccatctgacttaagtcctctctccctccactagttggggccactgcactgaggggggtcccaccaattctctctagagaagagacactccagaggcccctgcaactttgcggatttccagaaggtgataaaaagagcactcttgagtgggtgcccaggaatgtttaaaatctatcaggcacactataaagctggtggtttcttcctaccaagtggattcggcatatgaaccacctactcaatactttatattttgtctgtttaaacactgaactctggtgttgacaggtacaaaggagaagagatggggactgtgaagaggggagggcttccctcatcttcctcaagatctttgtttccataaactatgcagtcataattgagaaaaagcaatagatggggcttcctaccatttgttggttattgctggggttagccaggagcagtgtggatggcaaagtaggagagaggcccagaggaaagcccatctccctccagctttggggtctccagaaagaggctggatttctgggatgaagcctagaaggcagagcaagaactgttccaccaggtgaacagtcctacctgcttggtaccatagtccctcaataagattcagaggaagaagcttatgaaactgaaaatcaaatcaaggtattgggaagaataatttcccctcgattccacaggagggaagaccacacaatatcattgtgctggggctccccaaggccctgccacctggctttacaaatcatcaggggttgcctgcttggcagtcacatgcttccctggttttagcacacatacaaggagttttcagggaactctatcaagccataccaaaatcagggtcacatgtgggtttcccctttccttgcctcttcataaaagacaacttggcttctgaggatggtggtcttttgcatgcagttgggctgacctgacaaagcccccagtttcctgtggcaggttctgggagaggatgcattcaagcttctgcagcctaggggacagggctgcttgttcagttattactgcctcggagctccaaatcccaccaaagtcctgactccaggtctttcctaatgcacagtagtcagtctcagcttcggcagtattctcggctgtatgttctctggcagagagaggcagatgaacatagttttagggagaaagctgatgggaaacctgtgagttaagccacatgtctcaccaggaataatttatgccaggaaaccaggaagtcattcaagttgttctctgaggccaaagacactgagcacagcccagagccaataaaagatctttgagtctctggtgaattcacgaagtgaccccagctttagctactgcaattatgatttttatgggacagcaatttcttgcatctctacagaggaagaagagggggagtgggaggggaaggaaagagaacagagcggcactgggatttgaaaggggaacctctctatctgaggagcccccactggcttcagaagcaacttaccaaggggtatttaaagacatgaaaatttccagaaataccatttggtgcatccctttgtttctgtaatattaaactcaggtgaaattatactctgacagtttctctctttctgcctcttccctctgcagagtcaggacctgcagaactggctgaaacaagatttcatggtgtcacccatgagagatgactcaatgccaaggcctgaagttatagagtgtttacagcggtggcgatattcaggggtcatcgccaactggtctcgagttccaaagctctgatgaagaaacaagactccttgatgtgttactgatcccactgattccaggagtcaagattagccaggaagccaaacaccaggagttggggtggcacgtcaccagtccagagccctgccacggatgtaggcaggagcccagcattaggcaatcaggagccagaacatgatcaccagggccacaaataggaagaggcgtgacaggaactgctcgtccacatactggggtgtcccagggacagctggagagacagaaaggagaaaacaggctattagaacactgcagctatgcacactgcccactcaggccagaagttgacagcatcaatctttatctctttacaacatcagaatcctacacacaaaaagatttcttttttttttttttgaaatgtagtctcgctctgttgcccaggctagagtgcagtggcacgatctcagctcactgcaacctccgcttcccaggttcaagcgattctcctgcctcagcctcctaagtagctgggattacaggtgtgcgccaccaagcctggctaatttttgtatttttagtagagacggggtttcaccatgttggtcaggctggtctcgaactcctgaccttgtgatccgcctgcctcagcctccaaaagtgctgggattacaggcatgagccaccatgcctggcctttttttttttttttctttttgaggtggagttttgctcttgttgcccaggctggagtgcaatggcacgatctcggctcactgcaacctccacctcctaggttcaagcgattctgctgcctcagcctcctgagtagctgggattacaggcacgcaccaccacacccggctaattttttttttgtatttttagtaggaacagggtttcaccatgttagccaggctggtctcaaactcctgacctcagatgatccgcccacctcagcctcccaaagcgttggcattacaggcatgagccatcgcgcccagccaaaaaaaatttctaaaccccaaataatatcaggcaaaatgaaactatgtggaacaataacaataaggacaagacacggtccaatttatcataaaaggtttggcctgcacatgcaaataaaccaggtgattaacaggaaactcttgcaggaaataatgaaagcaagcctactatttgttaagtatcttctatctgctaagtgttttgtacatgttattatttggtggatattattatttccattttgagtaggaagcagctgaaacataggtttgaggtgacctgttcaagattgaaaggctcagaaattagtggcagagctctgcagcctctccacacactgcctctcaagggccccacagggattgccttccttttccagaagagaactaggatccagacaggcaaaatgacttgtttttcaaggtagaggcagaactggggtgagaacctaagtctccactcctctctgctttaggaaaagctaccatttagagctccctgtcctgactttgggggaaggaggataaaagaatctgtgtccaggatgggcaaattgtaccaagcatgacaagggaaaactgtgactgtggcagggggataaagtaatccagagtctagcctggctgtggaactctgcttagctggggaatccaaggttagccttcgaccaggttagaaggatgcaagctatcaggcaggttcttgctggcttcacaggaatttgccctttcttcagggcagagtacaccctatcttttggggtatacttcctctgaaaaacaaatgtgaacagaggataaaccttcaaggcagataaagtaagaaagggcatccccagggccgggcgcggtggctcacgcctgtaatcccagcacattgggaggcccaggcgggcggatcacgaggtcaggagatcgagaccatcctggctaacacagtgaaaccctgtctctacaaaaaaatacaaaaaaattagccaggcgtggtggcaggcgcctgtagtcccagctactcgggaggctgaggcaggagaatggcgtaaacctgggaggtggaacttgcagtgagccgagattgtgccactgcactccagcctgggggacagagcgagactccatctcaaaaaaaaaaaaaaaaaaaaaaaggcattcccaagatatcttggtgctgagattcctcagctagatgctctgatggattcacgaagacagacaggcaggcaggcaggcagtcaagaaagacttatagatcacctgctgtgtaccaaggaccagggtggggatgagaataactgggatgacccagttaccatctttagggcataagctcttggcgtgaaccacacaatggtcacttctgtaccatatgctgtgtccagtgcacatgaagctccaacaagtgcaggcagagctcaaccgatcatggcatctctgcaggctccacagtaaggatcttggcttgggtgtcagactgtgataagagttcaaggcacccacctcatagaggtggcttgcacctatagagcaagggctctataccgaatgcggatggcactttcaagcagtaggagggagaactgcagcagcagttggtagacctaggcatggttcccacagggctgaggctgcttctgaccagcctcatgttgtgtcctgaaggaagctagacagagatgccagagaatggagatgccttcactccttatgggtcatctcacatttccaggcccccaaatggtcaaagtgggaagtaaatgtgcagaactaggcttttcctcagctgagtatcacttacagttttccattttatagacatggggtatgtcttggtaacattactgagcattttctgatctgttaaacgcagctaatcacacacctgttccatagggtggttgtgatgatcccctgagcttggaatggaaagtgctatatatatgcatgcctaatagttggtaagtgctcagcattgttaccatgtctgtaagtgatctaaaaacagcttaagatattttgaaaaggctgattatccatgtagtgacaattatctgtaacttatatactgctgaattccaaggagctttcaagcaatattactaagatatcttcctaatttctcaaggaaatagggtcttacctggaggaggccgcccatcatttatattaaatgctgtggcaaatatcccaaagggaaatgccccaattccaaaagacatctggaagccaccatctccaaatccaaatccttgaaatccctgtgtggaagaaaggcaattaagggcaggagaatcaggcaggtttctcctgtgcctgtcaaaactcaacatacctcacgttgtcttgcatgtggcacctgcctcttctccctaccttgtgccacatgtttcgaaggtgggggacagcttttcctcccatatataccctgaagtagaggaactctggcaagccctctgcccttttagccttagcttccagctaagaatctatgaatgggccaaaaaggactggctctgacccagtgtgaaacactctgctgacataagtcagcactcacagggcttgaggatattttccatagtcccacattagctagtaacaccttctacatgctttataggagcaatattgacagccacccctgtgcccaagggaacatcaaacaagctacacattatctttaatagcaaaaatgttgaaactctaattagccaacaatggaagtcatgatcaaaatcttgatacatgcattcaaagaaccattaccctgacttaagcggtaacactgaacaactcttgtgaccaagttatcagacaaaattgtttgaacactgtggtcacaactacatgacaatatgtaggtatatggacaagttacggattaaaatttcttttaatactgttacatagaatttttacattttaaaacactataatgttttctggttataaaagtaatatatacttgctataagaaactcacatattacagaaataattgacagagtcagagatcttctattcaccttcccacttcgcagccactccactttacctctgaaataaccactatcagcagtttggtatatcaccctcagttttctttccatgtgcatgttctacactgcatcatctttcacatgaaaagattcagcaggaacaatactgtgaataaataactcccttttttaaagcgtgagctctgtgctaggcaccatgttaagcactaggacatataaatcatgtttaatttttacattggcttcatctgcatttcacagatgaccaaactgaggcttggagaggtgaaataacttgaccaaggagtacagtttagatctaaaactaggtcaatttgatctgaaaacacatgcttttctttttcttttctttttttttgagacagggtctcgctctgtcaccaagcctggagtgcaatggtgcaatcatggctcactgtagactcaacctcccaggctcaagcaatgctcccatctcagcctcttgagtagctgggaccacaggtgtacccctccatgctttgctaatttttaaattttttgtacagatagggtctcactttgttgctcaggctggtctcaaactcctgggctcaagtgatcctcccacctcagcctcccaaagtgctgggattagaggccagagccactgtgcccggccttcatgctcttaattactgtgcgcatctttcaaatatttttttctcttcccctgcacccctgatgagaggtttagaacaaatgattttaaaaataataaaaagcagacagactattgggtcaaatgctcttcacaaagagctcaatggccttcatttatgagttttttgcaagtcacaaaaatagctgctctccatcacacactgatcagcctggcatctagttccaaacttcttgccagatggcatcacctataaagcctaacagctgacttaatgagagggcaaacctaaagggagggaaaacaaagagtttccatctcctcaatacaaaatgcctcctactcagttcatggttgaatctaatggctcctgggactgaggctgccttacttgggaaggtgcaattgtttcatcaggaaccacagattcattcagtgcaatcctgaggactaaccgttctgcttcccttctagcaacatctttatgatctcaccagtccatacatttggtgggattatgttcctgggccagagtatgcaaaaaaacatcgctagtagctgcaggtgcttataaatgctagaggtatgcactttggtcaacaaggccagggcctctggcttctgggggcctctgattcctgcattagttgctaatgctctgtaggaaaccaaaacctaggaatgttaaagtggtgtcacctggtggtcaagagcagagacttcaataccagccagatctgggtttcagcactgtacgtgtggccctggacagatcactttacctatctgggcctcagtttcctcctccgttaaatgagttgatgtgaggcttaaatgagatcatgcatataaagctcttaacatatagttatttccatatagtaaccattcaacaagtgttcactgctagtattattattaagggtaatccggagaagagaaccttaatttctttctttctttttttttttttttgagacagagtcttgctctgtcgccaaggctggagtgcagtggtgtgatctcagctcactgcaacctctgcctcccgagttcaagtgattctcctgtttcagcctcccgagtagctgggactacaggcacatgccaccacacccggctaatttttatgtttttaagaaagcagagacagggtttcaccatattggtcaggctggtctcgaattcctgacctcaggtgatccacccgcctcagcctcccaaagtgctgagattacaggtgtgagccaccacgcccagccgagaaccttaatttctttcaagatccctgactcaataatcctactcctggaaatcctaataaaatgccattattcaaactcaaaaaaaaaaaaaaaaaaaaaaaaaaagaaagtggcagtgcgcggtggctcacgcctgtaatcccagcactttgggaggccaaggagggcggatcatctgagcttgggagttcgagaccagcctgaccaacatggagaaacctcgtctctactaaaaatacaaaaattagctgggcatggtggcccatgcctataatcccagctactctggaggctgaggcagaagaattgtttaaacccgggaggcagaggctgtggtgagccgagatcgcactactacactccagttgggcaacaagagtgaaacttcatctcaaaaaaaaaaaaaaaaaaaaaagtgtgcaaagatggttattgtagcattatttaaacagcaaaatggggaaacaactaaaaggtccttcgatgaggaaaacccaaattacaatgaaccaaaactcaatgggttcccagcaatagcatggaaaaataaaaaataataaaaaactcaataggataaatggcagcctaaataataaagaggacacttcagagcatcatggaaaacctgccaaaattaaattttaaagcaaacagaatggtgatggctacataaaaatacatatgcacagcctacagatgaagagaacatgaggatatgagaatatacttgttctgggctcttggcaatggtgggtaaatattttgcttttaaaatttctttaacattttaacagaatttttttaagagtaacatttgatgtaaatatgcaaaaaatgtaaatgtttttgttcctagccactagaccactagagacaaatgtgcaatttttttttagccagtaatcttacttctaagaatttatcctaagccaggtacagtggttcacgcctgtaatcctaacactttgggaggctgaggtgggaggattgcttgagcccaggagttagagaccagcctgggcaacatagtgagaccttgtttctacccaaacaaaacaaaacaaaaaaaagaaagacaaaaaaaaactcaaaaaactagctgggcatggtgccgtgcacctgtggtcccagctacatgggaggctgaggtagactgagcccaggaggtcgaggctacagtgaactgtgatcacaccactgcactccagcctgggctacagagtgagaccctgtcttatcctaataaaataataatgaacatgctcacaaatttatctgtaagttcatcaggattttttttaacttggaaaaagaaagccgctaatgtctaacaaaggattgaattatgttaaatccacacaactaaatgctaaacagctagttagtaaaatattgctggcaatgtaaaatctcaagataatactaaaagactcccactcacacaaagaaggtactaagtatctgtagaacaaatgaaattttaagagagggttacaaaacaggagccacatattgtaaaaaacaaaaaacaaaaactgtaaaaagtatacacacatctgtaaaatacacgcacagatttgtaaaatttgtgtgtatatataattatagaaaaatggaaaagaaaatagaaccaaaatgtttccagtggttacctctggattggtgtggttataagtgatttttttccccctcttttcctttctgtattttacaagttttcctttacttttataatcaaggagaaaaattgtaaggctaagaaggaaacttctaaagccatcagctcatttgtagaagcttctcctagaatgttcctcacccctctattctccggctctggcctctgtccttgaggacgaggaggggtcttctctctgaaacagaaatggtgtaaaataagtctattacaaattgctttgagttgctccctgtgaggacctggagctctttaccaacagggtcagggccatagcctctttcttgtccaggacatgaacttatgccagattaattctccaaatacgaactcttcattctacctgcaactgttcttcccacgtgtatagagaaccagggagaaaatcaactcgttatgagatattcaccagattgcactacagcctactcctcttacagagatcctgactcagatcggttaggaatcatggccagatgccttccctgggcctgttacagataacagaaatcccaaatccatactggaacagagggtgggttgtcagcagtaagggctgaggttcatggtttctctgaccttcccctattaacttcagctctatctcctactattcttgggcaaatacccaatgctattatttttgagtctcaccccctcaaatcactcaacccatgaatactcaattgagggcttagttatacaataagcattatgcaggatgctgtaatactgatgacagacccaacccttgaagtgttcatggtttcaagggggataaagccagtcatatgacactgtggtgggaactgggtgagagcaactaatgtgaagaagacagaccacttcaaggaagagggaactttagggctgctcataagagatgagtagaagttagaggagcaggtgggggtagaggggtagcttgagcaggactggggagggaagaaggcagaagagagagcaaatacacaggctgataaatgtgaaagagcaagtccctttaagagaaagtctaatatgtcgggtacacagcatatgctagggtagctggataaaggtaagagattcttctggagagcttggggatgccagaccatgaagggctctcaatacttgtgtttgttgaatgctggacccatgcacatctccatttctagaaatcccaaactccacaaagtcacccagatcctgtttcccctcccgccatgctttatacatcactgatgcagcaaccctgctccctggagcctctcctgctacatatcctgcttcccaggttgcagaaatgctctttcacagggctctgcacacttgtgattgtgatgtctgttcactgctgggtcctagcaagtggcaacttggatcccctctcttccctcccctcctagctgactctcatctggatgagactgcttcgaaaccaagagatcatctagtactaagtaaagggtggggttaggggatgctgaatgggagtgaattcacatccaaggggagaagtggttgggagaggcatcctgagtcctcacctggggtcctgttgcccagtgctgccccttccatagagggggatgaccttgtctcggctgatgccagctttgcaaacaggacacacctgtctgttaggtctggtctccaaccactgcaaacaggagagaaaaatgcatgtggatggcccaagacccaccagagtgatcagccagagccaccagaacaacacaggccagaggcctcaaactgggaaacaccagcatgagcagggaacatctcaaggaacctgactcccattccttctcctaccattcagcaaatacctaccagtggtaaaatcaaaattgcctttaaatatcatcataattggccgggtgcggtgctcatgcctgtaatcccagcgctttgggaggcggaggtgggtggatcacctgaggtcaggagttcaagagaagcctggccaacaaggtgaaaccccgtctctactaaaaatacaaaaattagccagacatggtggcgcatgcctgtagttccagctactcgggaggctgagggaggagaatcgcttgaacccgggaggcggaggttgcagtgagccgagattgcaccactgcattccagcctgggcaacagagcaagactctgtctcaaaaaaaagaaaaaaaatcatcacaattaggcttcttcatgctttgtttctctctagggcctcctagcaacacagggggagggaaactgcaagtctggggctgtcaagtctgacatgcccagcctcaatttaggctgctggtgtaagtacagcaaactttaaatccccaccttcccagtaggagcaactgtattttcctgtcagtcatattcttctttctgtgatttctcatttttttttccccagacagagtcttgctctgtcacccaggctggagtgtagtggcatgatctcaggtcactgcaacccctgcctcctgggttcaagcaattctcctgtctcagccttccaagtagctgggattacaggcgcccaccactgcgcccagctaatttttgtatttttagtagagacagggtttcaccatgttggccaggctggtctcaaactcctgacctcgtgatcttcctcccttggtctgccaaagtgctgggatcacaggcatgagccaccgcgcccggccaatttctcatttttatagcattttcccaacaactgtgtatcccaggcatcagaatcaggagataagctgatcattttctggtgacttaccacatgctaaaggataggttttgctcattatctaaatttgcttaatgctttttgtgtactttcattgattttttgcattcacctatttctttcaatataaaaaaaatcccgttttgggtttctcaggccctttcactggttacattaaaattttttgtttaggccaggcgcggtggctcacgcttgtaatcccagcactttgggaagctgaggcgggtggatcacctgaggtcagcagttcaagaccagcgtggggaacatggtgaaactccgttgtctctactaaaaagacaaaaaaactagccgggtgtggtggtgtgcacctgtaatcccagctacccaggaggctgaggcacaagaatcgcttgaacccgggaggcggaggttccagtgagccgagatctcaccattgcactctagcctgggcgacagaatgagactgtctcaaaaaaaaaaaaaaattaattttcttaaaaaaacaagtgataaaaaatgtttttggtttgtttttgtttgttttttgcttgtttttgatttttttttcggttttttggttttttttctcgaaacagagtctcactatgtcacccaggctggagtgcagtggtgcaatctcagctcactgcaacctctgcctcccagattcaagcgattctcgtgcctcagcctccctagtagctcggactataggcgtgcaccaccacgcccagctaatttttatattttttgtagagacggggttttgccatattggccaggctgttctcaaactccttgcctcaagtgatccacctgccttggcctccctacgtgctggaattataggtgtgagccaccacacccggccaaaatgtgtttttatagacattctataaacatgaatctaggacttcagggctgaggagatggcagcactgaatgattttatttactactcttactgttcatagctccaaaacttaatgtgttatgtgttcttcataaactcatagtcaatatgtactaccaggtcccgctggggacagaatgtgcagccctgttcccaccttctttctcccatccagattctgaagctttagcagtctggaacttctgtcctcccccacattcccaggccacctacgagtgtggtactctactgctgacgaccagggagactttcagcaggctgtgattattcacagccacttgtgaatgccaggcccagctctgtctcaccaagtaggtgctaaagctaggaaaatagacttttctctcctcacaaaagctctttgttgacaccaaaaaaattttccccttcctaatattttcataacctttaagggctgggggactgttgatatgataggaggcactgttttaatagaagcagaatctcaaaaataaaaaggacctaactaacatactatcaatccaatccaatttataaatgagtaactgagatccaaaaaggccctctgtggcagaattaggaccatcccgatttcatcaagtgtctgtcagtggacaggtatgtaaagaaggctgtgggggtaagtaagcaaatgagcccacaagcagggcagattgcagcttctgaaagcagtctcctgagactagggctctcttgtgcaaccagagctgatgaaagacaaagtaaaatgaaatgcatcttacctgatgtaaacacggccaactgccagagtccccagggcaaccagtcatcaaggagaaggagaaaaggggaaaggaagaaaaatgttttcattagcagaaacacttgatgggtggagtggtagtagcagaatgagaaaacaggagtaaactatggagcactgcatgcccattgaggttctgtagggattactggtatcggaaattaaaaaaaaactggggtaaaaatcacagaaaataaataacgcaatggagataagaccccagcctctgcccctgagatctcagtatatgtgaaatccccagggctcagaccacacagacccagcttctctacaaatcaccctgtgagaggttacaacatctgaaggaatccaataaaagctaaggacaccctgtgcaaaaaattgatgggggcattcacatacacatgtactacacactattttacactcaatttcagtgggttcatagtctcctcgggctcacaagggatgtgtggactctcaggtagtccagatccagtttaacaaaatcttcaggctgtcctcatccttgagaactctcctagcaggaagcagcttaaaagttcaggtctactctaaaagcatctttaagtaatagaaaggatggggatgctacttgacagaaagggttaccttcagcttagagagctgctgtccaatctctctccattttcaaatgaggaaaccaaagctcagaaacataaaatgaactgcatcaggattaaaaaaaaaagtctcctgacttctagttcattgccctttctataatctaacaccacatacaaaaaaaaaatgatatctacagaattgaaagaaaagtattcaactccacttttttttttttttttttttgagacgaagttttgttcttgttgcccaagctggagtgcagctcactcagctcactgcaacctccacctcccaggttcaagcgattctcctgtctcagcctcctgagtagctgggattataggtgtgtgccaccacgcccagctaattttttgtatttttagcagaaacggggtttcaccgtgttagtcaggctggtctcaaactcctgacctcaggtgatccgcccaccttggcctcccaaagtgctgggattaaaggtgtgagccaccgtgtctggcccacatttttaatttctttctctcgtttatttagttaacacatatctactgtgtacctactatgtaggccaggacagtggaaaatgcaggcatggcttctgtacctcacataccaagtatctttagctgagtacactttgaactcaaaggatagttccttttccaattcctgaaccacagtttagcttcacaaaccaaatacacaatcttcctggccataacatctgactccaacattaatcttgcaatgtcattctaaactgagtggagaataaccccaaatcatggcagatctccactggcaagttcccttaaagactctaggggagaagtggaggtgaatgaatgaccctcaggggaaagtcaggctttataacaacgaccattcctcccatttattaagcaacgatagtcatgtatcactgaacgacagggataattctgagaaatgtgtcattaggcaatttcatcattgtgagcatcacagagtgtacttacacaaacctagctgaaatagcttactacacacctaggctacatagtatagcctattgctcctaagctacaaacctgaatagcatgtgagtatcataggtaactgtaacagagtggtaaatatttgtgtatttaaacatacctaacatagagccaaggtgtggtggctcatgcctgtaatcccagcactttgggagctgaggtgggcagattatttgaggtcaggagttcgagaccagcctggccaacatggtgaaaccccatctctattaaaaatacaaaaactagccatgtgtggtggcacatgcctgtaatcccagctacataggaggctgaagcacgagaatcacttgaacctgggaggtggaggttgcagtgagctgagatcgtgctactcaatctggagtgctactgcactccagcatgggtgacgcagtgagactccatctcaaaaaaaaccaaaaaccaggctgggcgtggtggctcacgcctgtaatcccagcactttggaaggctgaggcggttggatcacctgagatcaggagttcaagaccagcctggccaacatggtaaaaccccgtctctactaaaaatacaaaaattagtcaggtgtggtggcacgtatgtgtaatcccagcttctcgggaggctgaagcaggagaatcgtttgaacctgggaggcagaggttgcagtgagccaagatcacgccactgcactccagcctgggcaacagagtgagactcctcaaaaaaacaacaaacaaacaaacaaaaaatccaacatacctaacacagaaaaggtaacgcactgctctataacattttaaaatcactagattataggaacttttcaggtccatcatcatcttatggaaccgctgttggatatgtaatccattgttgaccaaaatgtcattatgtactgcatgactgtactgtgtgccacgctgtggctgaataccttttcatttcttaatgtcactggacggtcacattaacctatgaggcagtaccatcatctccatcttacagatgaggaaaccaaagtacagggaagctagcagatttgctcagggatgcaccatccagactggaagcatctgtttcattttagagtctgtgttctttccaatggcattctgcctttaaaaaaaaaattgatagcaggcatggtggctcacaccagtaatcccagcactatgggaggccgaggcgggcagataacgaggtcagaagatcgagaccatcctggccaacatggtgaaaacctctctctactaaaaatacaaaaattagctgggtgcacctgtaatcccagctacccgggaggctgaggcaggagaattgcttgaacttgggaggcagagattgcagtgagccgagattgtgccactgcactccagcctggtgacaaagcaagacttcgtctctaaaaaaaaaaaaaaaaatttgacacagggccaggcatggtggctcacgcctgtaatcctagcactttgggaggtcggggtgggcagatcacttgaggtgaggagtttgaaaccagcttggccagcatggcgaagccccatctctactaaaaatacaaaaagaaaattagccgggcgtggtggtgcattcctgcagtcccagctacttgggaggctgagacaggagaaccacttgagcccaggaggcagaggttgcaagtgagccaagactgcaccactgtactccagcctgggcaagagagcaaggctgtctccacaaaaaaaaaaaaaaaaaaaaaaaaaaagatatacaacagctgtacatttaaatatatgtatagttaatatatacataaaatacataatttataatcttaaaatttataattataaaatttaataaatacatacacaaacacaaacacacacacacacacacacacacacacattttttttttgagacagagtcttgctccatcacccaggctggagtgcagtggcgcgatctcagctcgctgcaagctctgcctcccgggttcacgccattctcctgcctcagcctccccagcagctgggactacaggtgcactccaccacacccggctaatttttttttttttttttttttagtagaaacgggtttcaccgtgttagccaggatggtctcgatctcctgaccttgtgatccgcccaccttggcctcccaaagtgctgggattacaggcgtgagccaccgcgcccagcccagaatatatatatatttttaagagacagggtctctctctgtcgcctagactggagtgcagtgatacaatcatagctcactgtagcctcgaattcctgggctcaagccttcctcccacctcagtctcccgagtagctaggactacaggtaccgccaccatgcctgactagttttaaacatagtggggcctcactatgttgcccagactcatcttgcactcctgggctcaagtgatcctcccaccatggcctctcaaagtgtttggattacaggtgtgagccactgagcccagccataatagctgtacacattttttatgttatatgtgataatttgatacattcacataatcaaatcaggggtatcctgtctttgaattcttaattttgtcaatcatttcaagtcctggttttacgataccctgaagtatcctgaatttctaggagaatgtggatcacaacagcttttacacaagatggtaattagggcaagagcctcaagaacaaaaatctctgctccattctatttattcaccaataaattgatgttttacgctgttgccaacttaaaatcccttaaatattgtttaaacggccttttcttcacacgatttctctgctcaaaaatattcattacctctatgtccctttagtcgaatctgggtttgataatctggctcaacactactgtaaccattatttttcctaacactcccagaccctcatccagagtgctgtgagaggtatacagtagcctcaagggtctcagatgagtccaacagtgcatgtgcctgtccctagaaactccctgccttggagtgacacacacacccttcgcctttacctagcattttttgatcgacctttcaaggttcagctcaaaatctcaagacaaaaaaaaacacacacacacacacaaaaaaccaaaatccgaccttcacctagcacctaggttctcagagccagaaagggctcctgtaaccgtcaaggctggaacagacaccgaccttgacacttcattttgatgagtgtatctatctatatataaacataaaatatagtaacaattatagtcatagctaacacatagtatttactgcaagctatgtgctcttctaagccttttacatattttgagtcatttaatgcttgcaaacgaccctgtaaaatgaggcagaatgtgtgtaagtaccttgtccaaggtcaaacaggaaggtggcagagtcaagcttcaaaaggaggaagcccagttccacagtccttgcttataaccattatgctatactgcctctaggctcagcacagcaagtagcaggtagtaagtgctcactaaatggtaagtattattactttagagatggggagaacgagcttagagtggagacaggatttgcccaaggtcatccagctcattggtagcagagctgggatgggaactcaggtctcttgtcccttgagcctgagtgtattcccaaagtgagcaggaagcattctgctccaaaccacccagggccacaggctttccaaacttggcaatgtgctctctggggtggaagtaggggtactgaccagaagaggtggccacacaggctgatgacggcatccttggctgtgtccaagcagatgttgcactcgaaagtgctgtcctgccctccgctctcgccagcgccattgctgctcccactgggcccccctgcactggagttctcaggagatgcagaggccgagggccccttgcttgccatccttggctgtcagcgaagctctgagtgaagactttccccagggaaatcctaaaaggcagagaactcttgactgtccatttctgcagccctctccccccagcttccatgccaacattcctgtcttctctaggctccagagctgattatgactgaatccctgagcagacttcccaaagcgctacagaagacaagagttgtagggcactacccaaagggcagtgacccagaaacttctcatgaatatggtccagaatatatcacacagatacgcaaactccaccaaatacagagcagcctccagatggttctccacaggaaccaggaccttgtctcacttgtctttagattcccccatgacaatcaacccaggtgacaaatacatgctacattaaatggaatgttcaggctgtccagcctctatattgatgggtgaatctgctgaggcaggaaggttgtgattgtcatatgccagaacatatatatatatttttaagagatggagtttcactctgtcgcccaggctggagtgcagtggcacaatcttggctcactgcaacctctgcctcccaggttcaagtgattctcctgcctcagcctcccgagtagctgggattacaggtgcctgccaccacacctggctaatttttgtatttttagtagagatggggtttcatcatgttggccaggctggtcttgaactcctgacctcaggtgatccacctgcctcagtttcccaaagtgctaggattacaggtgtgagccactgtgcccagcccatacgccagaatattaagaaattcctgtaactatgaaaggataggaagctaataaggaccagaaagatcatctggtccaaggtcttccatattgcaatctttttcaatcctccttctgccacattggaatactattcaccttattttatctaaatatatcaactttttagcctcagtacatttaaagaagaggtttatgtcactgtaataaatggaaaaccagtaatacttaccataagtaaaaaggttaatataaaagtaacaaatgaaaagtttaccctcataccacctgacatcacctggcacactcatactatgttttggacaatcttgatctggtccaatttctttaggaaactgcagttaccttggctagctgactaatgtggggctgagactgggactcatggacaccctgtttgcaccgtaccactacatactaaactggccactaaatgctggtataaacagaccactgttgaccaccacctccaagtcaaagaacccagccaggagttgaacaagaaagaggataaaaccaacaccaagggatacccaggaattctggatgcacattaacaatctgtcaggagccttatctggccaccctcatcacctcagaaattccaagtaggaaatgttcgctggctaccacagtcagagaagtggaggcctggatactggactcagcctctagcttgctaggtggttctgggaacctccctttccctctactgatcataattttctcatctgtaaaatgaggcactggactccctggtgtcctgggtggccccctccagctcttagactgtgcctctccaggtcatcttaacctactgttacctccaaaacaagcggccccttcacaaatttaggacttaccactggaacaccagaaggtcaccctgatgtcagcttccagagtatgagaagacaaggaccaaaaaagttacagccttctcagacccagaaagcttcctgccttcacacggtggactcagagctctggcctcatgagtatccctcaccacgataccagctcagtgacttgagcagagagaggaggccagctcaccactttttcactcagttacatcattttacataatgtcccagaagggtagctggatgctggtggcaccagtttcgtgcgctggcctcggctccaagaccttctctctgaccttcctcttcttcatattacatgtgctctcttcatcttaggataaaacccacttttgagggccacattactatctttcctcattattccagctcaacaatcaatcctaagtacccaacctatgtgtgtttctttttaaaaaaaaaaaaaaatcttaaaaaattaaaaattgctctccctccccctccccctccctctcccctttgcacggtcctcgtctcccctttgcacggtctccctctgatgccgagctgaggctggacagtactgccgccatcttggctcactgcagcctccctgcctgattctcctgcctcagcctgccgagtgcctgggattgcaggcgcgcgccgccacacctgactggttttcatattttttggtggagacggggttttgccgtgttggccgggctggtctccagctcctgaccgccagtggtctgccagcctcggcctcccgaggtgccaggattgcagacggagtctcgctcactcagtgctcaatgttgcccaggctggagtgcagtggcgtgatctcggatcgctacaacctccacctcccagccgcctgccttggcctcccaaagtgccgagattgcagcctctgcccggccgccaccccatctaggaagtgaggagcgtctctgcctggccgcccatcgtctgggatgtgaggagcccctctgcccagccgcccagtctgggaagtgaggagcgcctctccccggcggtcatcccgtctaggaagtgaggagagtctctccctggccgcccatcctctgggatgtggggagcgcctctgccccgccaccccgtctgagatgtgaggagtgcctctgccaggccgcgaccccgtctgggaactgaggagtgtctctgccccaccgccacccgtctgggaggtgaggagcgtctctgacctgccaccctgtctgagaagtgaggagcccctctgcccggcagccgccccgtccgggaagtgaggagcgtctctgcccggcagctgccccgtccaggaggtggtgggcagcccccgcccggccagccgccccgtccgggaagggaggggcagcccccgaccggccagccgccccgtccgggaggtgggggggggcagcccccgcccggccagctgccccgtccgggagctcggggcagcccccgcctggacagctgccccgtccgggaggtgggagcccctctgcccggccgccaccccgtctgggaggtgtacccaacagctcattgagaacgggccatgatgacaatagcggttttgtcgaatagaaaagggggaaatgtggggaaaagaaagagagatcagattgttattgtgtctgtgtagaaagaagtagacatagcagactccattttgttctgtactaggaaaaattcttctgccttgggatgctgttaatctataaccttacccccaacccctgctctctgaaacatgtgctgtgtccactaagggttaaatggattaagggcggtgcaagatgtgctttgttaaacagatgcttgaaggcagcatactcgttaagagtcatcaccactccctaatctcaactacccagggacacaaacactgcggaaggcggcagggccctctgcctaggaaaaccagagacctttgttcacatgtttatctgctgaccttccctccactattgtcctatgaccctgccaaatccccctctccgagaaacacccaagaatgatcaataaatactaaaattaaaaaaaaaaaaattaaaaattatgcatatagattttggaaagacaaccataaagtcagatcagtcacatcagcctcctgatgtgatgcaacagaagtacacagcaccaccaatgaaacatgtttgcgttaaaactcagacactgatcaagcatctaaaatgaattaccagccaggcatggtggctcacgcctgtaatcccagcactttgggaggccgaggcaggtggatacctgagatcaggagttcaagacaagcctggccaacatggtgaaaccctgtctctactaaaaacacaaaaattagctgggcatggtggcacacacctgtaatcccagctacttgagaagctgaggcatgagaatcgcttgaacccgggaggcggaggttgcagtgaactgagattgtgtcatcgcactccaacctgggtgacaagagagagactccatctcaaaaataataataataataataataataataaataaaataaattacctatttacagaaaatatggaggataggtgcaagtattaaacgactccatgaagatgtcatcagccaaatccagaatgtgggactttctacaggacaaacaataaagttctacaaaaaataaatagcatggacaggattggggttatagattgagatacgagatattccaaccacttgtagtatgtgggtcttattggaacaagattcaaacaaaccaactgtacaaagacacttgtgacatgattgacaaaaactgtttagcctaggtattactcgatatgaaggaattattgttggctgggcatggtggctcatgtctataattccagcactttgggaggccaaggtaggtggatcgcttgagctcaggaggtggagaccagcctgggcaacatggtgaaaccctatctctaccaaaacaaaataaaacaaaacaaaaattagctgggtgtggtggtgcatgtctatggtcccagctactccagaggctgaggcaggagaatcgcttaagcttgcgaggcggaagttgcagtgagccaagattataccactgcattccagcctgagtgacatagtgactctgtctcaaaaaaaataaataaataaaaataaaaaattagctgggtgtggtggtacacacctgtagccccagacagtcaggaggctgaggtgggaggatcacttgggcctgggaggtggaggctgcagtgagccgtgattgtgctgctgcactccagcctgggtgacagagtggaaaccctgtctcaaaaaaaaaaaaaaaaaaaggaattactgttaattttgttgggtataataatgatattgtgtttttttttttaaacaaaacctgatctgctagagacacatttttttaaatatatatatatttttattatactttaagttctagggtacatgtgcacaacgtgcaggtttgttacatatgtatacatgtgctatgttggtgtgctgcacccattaactcgtcatttacattaggtatacctcctaatgctatcccttccccctccccccaccccacaacaggcccaggtgtgtgatgttccccttcctgtgtccaagtgttctcgttgttcatttcccacctatgagtgagaacatgaggtgtttggttttttgtccttgcgatagtttgctgagaatgatggtttccagcttcatccacgtccctacaaaggacatgaactcatcattttttatggctgcatagtattccatggtgtatatgtgccacattttcttaatccagtctaccattgttggacatctggcttggttccaagtctttactattgtgagtagtcccgcaataaacatacgtgtgcatgtagagacacatatttttgaagcaatacaatgtttgggatttgctttaaaatactccaggggaaaaaaataaaaatggagagaaaagatgaaacaagaacaaggaagttggttgttgaagctgggtgatgaatggaggttcactgtaatagtctgtgtgtgtgtttgaaaattacaataaaaggtattttttttttcttttttttgagatggtctcgctctgttgcccaggctggagtgcagtggtgcaatcacagctcactgcaagctcaacctcctgggctcaagcaatcccctgcctcagcctcccaagcagctaggactacaggtgcacaccaccatgctcagctaatttttaaattattttgtagaaacaaggtctatgttgcccagggtagtctcaaactcctgggctcaagcaattctcctgcctcagcctcccagtgagccaccatgcctagccccaataaaaggtattttttaaaaagattaagttgtagaagagtatgtatataaacttatttgggtaaaaactaagtatgtatatgagtatgtatgtgtgtggatccatacacagacagacaggcagacacacacacacacacacacacacacacacacacacacacacagagagagagagaaaatgcctagaaaatacacattaaaccatcaacagttatttctgggattataagggctaggagacattgaattattatattcttaccctgtttcaatgttttataacaaataagtattactttcacaagaacatttttaaaaaggaaatcataaaatgtgaagtattttacatatgttacaataatgaatataggtattagaaaatggctttaggccaggcatggtggctcatgcctgtaaccctagtactttgggaggccaaggtaggaggattacttatgcccaggagtttgaggctgcagagagctatgaatgtaccactgcactccagcctgggcaattagagcgagactctgattgtattaaaaaaaaaaaaaaagtctttaacaatgtggaagaacatactcaactgtattacttttttttcttctttttttttgagacaagtctcagtctgtcacccaagctggaatgcagtggtgtgatctcggctcactgcaacctccacctcccgggttcaagcaattctccctgcctcagcttcctgagtagctgggcttataggtgcccaccaccacgcccagctaatttttgtactttttagtagagacagggtttcgccatgttggccaggctgctcttgaactcctgacctcaggtgatccacccacctcagccttccaaagtgctgggattacacgtgtgagccactgcacccggcctttacatgtattacttttgaaatcagtcaaaagaataataatacataaaatttcctaccccccacccccccgccatgttctggtttccaccccatgttctggttttccccaatcctgaaagttctgagttcaagtcctggttccatcactgactgtccatatggccacggtagatctcttgatgatttgaatctcttttctcacctgaaaagtgagagtatcatgcctcctacatggctactgaggtggccttatgaaataacacagtgacctggagggccctccaaggcaggacagggctgttgctgttggggaggcacacatttcataccatgtaacctggtccactgccaccccacttcgtggacccaacaaagctgtgcatggcccatactcctacacacaggcatgaggggacaaccaggatcaaggtaggtgttggagtaggaatggttaagggacagtaacaggtcagctcagagtttgcagggagtggcagccttgtgccaggccaggcactgagacaggcctgcatgtcccaactgtaggcaggccatatcactctccttgtaaatcttagtagacaccacatggtccccacccaggatctacagcctcatcctagcaggcactcaaatatttgctgagtgaggatgggcacgcatgactgactttggtcaactcccagctggctggtcaccaacttttctttgtaacatattctgggccccacagctgcatactcatccctggagccacctcttctcaccttctcctacacctatgcacaggaatctcagtacaccaaggtggcatggcagaaatcagcagcttcccctggggattgtctactgagcacctacagaaccatatgggtctaccaggactgggacagtggcccaaaacatagaggttcctgatcggctcaggaactaggcagaaagagaatcaggtcctgagcatacctatatggccatcctgctaaaatttctcatggtccctgtagaagctatagactttcacctaaccacagagcaaccttgttgtggctagttctgtgcctctgtccctaccctgaccattcttttctcctgaccagaatccactctctagttttcaaagcatttcacatctatcgctgcattttatcctcatgccattttacagatgaggacactgggccagggacattagaggactgcctaaggccaggacaccacgcaatgccaaattcagacttcctaacacaatattcagcactctcttcattcttatgtttttctattaacatgctgctttacaaaattaaatacctggtttttgtcttccctcaaatttatcgtgcaatgttgtaacttttgtgctgtttgaaatgagtacagagtaaattaatcactcatccacttattcattcaaccaaccagcagttttccaatgccaattacatttgaggtctggtgctaccaactgtggaggagttacaaagaggaataagaccaagttgaggtcttggagtctagtacaggagctgaaggcacatagattaattttaagaattctaaacaaggggctccatcaaactcacctgtttttcctttcgttgttgtttttgcctgtttttcttaaacaaagcatcctctcaccccacgaaagatctggttcccagatcccttcagagatttaaataggatctggacctagatcaggcctaagaatctgtatgcttttaatgtagccctcactttctaccctagatgattctctaattaacagagttttggaaacccagctctagaagagggtacagctctatcaatagcacaaagcaataccaacaaaatacagtattttagaaggacagaaacctcagggcctatccagctacaatccacagggactacagagaggtcagataaacttggggggtaagggacaaatctgctgaattcagattaatcagcatttagtccaactggaacacagctgatcattttaagaaataagttcacacctagttttaaaaaacagtcctaactttgagatgtccagggcaacacatgtggtgctgggactaacgcggatttgcaatacttaatgatcctgtaggaacacagagcctggcggctgaagttgactgacccagtatcttcaatatattaccttcccagagctggcctttggtctacttggtctggcccacctcacaggaattgagcaagaaagagaacacgagagttgaatatccctgcaggaaccaccagggaacttgatc

SEQ ID NO: 1792 - protein, 102 aa, Homo sapiens
  misc_feature (45)..(45): Xaa can be any naturally occurring amino acid
  misc_feature (80)..(80): Xaa can be any naturally occurring amino acid
  misc_feature (92)..(92): Xaa can be any naturally occurring amino acid
PFQPPLLDLRRPSQQSQWPQHLAGQLPSLLICQTRTQTKPMRNGXTASESSDFTSERRGDKEAPPPVLLTPKAVGTPGGXGGGALPGISAMXRGDLSQRAKI

SEQ ID NO: 1793 - DNA, 4030 bp, Homo sapiens
ggtggggggccgcggagcgctggggagcagcggccgccggcgcggggaggggggtggggtgggacggcgcaccgcctccggtgctggcactaggggctggggtcggcgcggtgtcttctgcccttctgcagccgtcgacatttttttttctttctttttttcaattttgaacattttgcaaaacgaggggttcgaggcaggtgagagcatcctgcacgtcgccggggagcccgcgggcacttggcgcgctctcctgggaccgtctgcactggaaacccgaaagtttttttttaatatatatttttatgcagatgtatttataaagatataagtaatttttttcttcccttttctccaccgccttgagagcgagtacttttggcaaaggacggaggaaaagctcagcaacattttagggggcggttgtttctttctttcttatttctttttttaaggggaaaaaatttgagtgcatcgcgatggagaaaatgtcccgaccgctccccctgaatcccacctttatcccgcctccctacggcgtgctcaggtccctgctggagaacccgctgaagctcccccttcaccacgaagacgcatttagtaaagataaagacaaggaaaagaagctggatgatgagagtaacagcccgacggtcccccagtcggcattcctggggcctaccttatgggacaaaacccttccctatgacggagatactttccagttggaatacatggacctggaggagtttttgtcagaaaatggcattccccccagcccatctcagcatgaccacagccctcaccctcctgggctgcagccagcttcctcggctgccccctcggtcatggacctcagcagccgggcctctgcaccccttcaccctggcatcccatctccgaactgtatgcagagccccatcagaccaggtcagctgttgccagcaaaccgcaatacaccaagtcccattgatcctgacaccatccaggtcccagtgggttatgagccagacccagcagatcttgccctttccagcatccctggccaggaaatgtttgaccctcgcaaacgcaagttctctgaggaagaactgaagccacagcccatgatcaagaaagctcgcaaagtcttcatccctgatgacctgaaggatgacaagtactgggcaaggcgcagaaagaacaacatggcagccaagcgctcccgcgacgcccggaggctgaaagagaaccagatcgccatccgggcctcgttcctggagaaggagaactcggccctccgccaggaggtggctgacttgaggaaggagctgggcaaatgcaagaacatacttgccaagtatgaggccaggcacgggcccctgtaggatggcatttttgcaggctggctttggaatagatggacagtttgtttcctgtctgatagcaccacacgcaaaccaacctttctgacatcagcactttaccagaggcataaacacaactgactcccattttggtgtgcatctgtgtgtgtgtgcgtgtatatgtgcttgtgctcatgtgtgtggtcagcggtatgtgcgtgtgcgtgttcctttgctctggccattttaaggtagccctctcatcgtcttttagttccaacaaagaaaggtgccatgtctttactagactgaggagccctctcgcgggtctcccatcccctccctccttcactcctgcctcctcagctttgcttcatgttcgagcttacctactcttccaggactctctgcttggattcactaaaaagggccctggtaaaatagtggatctcagtttttaagagtacaagctcttgtttctgtttagtccgtaagttaccatgctaatgaggtgcacacaataacttagcactaatccgcagctctagtcctttataagttgctttcctcttactttcagttttggtgataatcgtcttcaaattaaagtgctgtttagatttattagatcccatatttacttactgctatctactaagtttccttttaattctaccaaccccagataagtaagagtactattaatagaacacagagtgtgtttttgcactgtctgtacctaaagcaataatcctattgtacgctagagcatgctgcctgagtattactagtggacgtaggatattttccctacctaagaatttcactgtcttttaaaaaacaaaaagtaaagtaatgcatttgagcatggccagactattccctaggacaaggaagcagagggaaatgggaggtctaaggatgaggggttaatttatcagtacatgagccaaaaactgcgtcttggattagcctttgacattgatgtgttcggttttgttgttccccttccctcacaccctgcctcgcccccacttttctagttaactttttccatatccctcttgacattcaaaacagttacttaagattcagttttcccactttttggtaatatatatatttttgtgaattatactttgttgtttttaaaaagaaaatcagttgattaagttaataagttgatgttttctaaggccctttttcctagtggtgtcatttttgaatgcctcataaattaatgattctgaagcttatgtttcttattctctgtttgcttttgaacgtatgtgctcttataaagtggacttctgaaaaatgaatgtaaaagacactggtgtatctcagaaggggatggtgttgtcacaaactgtggttaatccaatcaatttaaatgtttactatagaccaaaaggagagattattaaatcgtttaatgtttatacagagtaattataggaagttcttttttgtacagtatttttcagatataaatactgacaatgtattttggaagacatatattatatatagaaaagaggagaggaaaactattccatgttttaaaattatatagcaaagatatatattcaccaatgttgtacagagaagaagtgcttgggggtttttgaagtctttaatattttaagccctatcactgacacatcagcatgttttctgctttaaattaaaattttatgacagtatcgaggcttgtgatgacgaatcctgctctaaaatacacaaggagctttcttgtttcttattaggcctcagaaagaagtcagttaacgtcacccaaaagcacaaaatggattttagtcaaatatttattggatgatacagtgttttttaggaaaagcatctgccacaaaaatgttcacttcgaaattctgagttcctggaatggcacgttgctgccagtgccccagacagttcttttctaccctgcgggcccgcacgttttatgaggttgatatcggtgctatgtgtttggtttataatttgatagatgtttgactttaaagatgattgttcttttgtttcattaagttgtaaaatgtcaagaaattctgctgttacgacaaagaaacattttatgctagattaaaatatcctttcatcaatgggattttctagtttcctgccttcagagtatctaatcctttaatgatctggtggtctcctcgtcaatccatcagcaatgcttctctcatagtgtcatagacttgggaaacccaaccagtaggatatttctacaaggtgttcattttgtcacaagctgtagataacagcaagagatgggggtgtattggaattgcaatacattgttcaggtgaataataaaatcaaaaacttttgcaatcttaagcagagataaataaaagatagcaatatgagacacaggtggacgtagagttggcctttttacaggcaaagaggcgaattgtagaattgttagatggcaatagtcattaaaaacatagaaaaatgatgtctttaagtggagaattgtggaaggattgtaacatggaccatccaaatttatggccgtatcaaatggtagctgaaaaaactatatttgagcactggtctctcttggaattagatgttatatcaaatgagcatctcaaatgttttctgcagaaaaaaataaaaagattctaacaaaaaaaaaaaaaaaa

SEQ ID NO: 1794 - protein, 295 aa, Homo sapiens
MEKMSRPLPLNPTFIPPPYGVLRSLLENPLKLPLHHEDAFSKDKDKEKKLDDESNSPTVPQSAFLGPTLWDKTLPYDGDTFQLEYMDLEEFLSENGIPPSPSQHDHSPHPPGLQPASSAAPSVMDLSSRASAPLHPGIPSPNCMQSPIRPGQLLPANRNTPSPIDPDTIQVPVGYEPDPADLALSSIPGQEMFDPRKRKFSEEELKPQPMIKKARKVFIPDDLKDDKYWARRRKNNMAAKRSRDARRLKENQIAIRASFLEKENSALRQEVADLRKELGKCKNILAKYEARHGPL

SEQ ID NO: 1795 - DNA, 642 bp, Homo sapiens
tcgtgttcatgggagctcgttttcttttcctctaggcagagaagaggcgatggcggcgatggcatctctcggcgccctggcgctgctcctgctgtccagcctctcccgctgctcagccgaggcctgcctggagccccagatcaccccttcctactacaccacttctgacgctgtcatttccactgagaccgtcttcattgtggagatctccctgacatgcaagaacagggtccagaacatggctctctatgctgacgtcggtggaaaacaattccctgtcactcgaggccaggatgtggggcgttatcaggtgtcctggagcctggaccacaagagcgcccacgcaggcacctatgaggttagattcttcgacgaggagtcctacagcctcctcaggaaggctcagaggaataacgaggacatttccatcatcccgcctctgtttacagtcagcgtggaccatcggggcacttggaacgggccctgggtgtccactgaggtgctggctgcggcgatcggccttgtgatctactacttggccttcagtgcgaagagccacatccaggcctgagggcggcaccccagccctgcccttgcttccttcaataaacatcacaggacctgggactgcacaggaaaaaa

SEQ ID NO: 1796 - protein, 173 aa, Homo sapiens
MAAMASLGALALLLLSSLSRCSAEACLEPQITPSYYTTSDAVISTETVFIVEISLTCKNRVQNMALYADVGGKQFPVTRGQDVGRYQVSWSLDHKSAHAGTYEVRFFDEESYSLLRKAQRNNEDISIIPPLFTVSVDHRGTWNGPWVSTEVLAAAIGLVIYYLAFSAKSHIQA

SEQ ID NO: 1797 - DNA, 1208 bp, Homo sapiens
ctggtgagaagacagcgaaatggcgcctccggcccccggcccggcctccggcggctccggggaggtagacgagctgttcgacgtaaagaacgccttctacatcggcagctaccagcagtgcataaacgaggcgcagcgggtgaagctgtcaagcccagagagagacgtggagagggacgtcttcctgtatagagcgtacctggcgcagaggaagttcggtgtggtcctggatgagatcaagccctcctcggcccctgagctccaggccgtgcgcatgtttgctgactacctcgcccacgagagtcggagggacagcatcgtggccgagctggaccgagagatgagcaggagcgtggacgtgaccaacaccaccttcctgctcatggccgcctccatctatctccacgaccagaacccggatgccgccctgcgtgcgctgcaccagggggacagcctggagtgcacagccatgacagtgcagatcctgctgaagctggaccgcctggacctcgcccggaaggagctgaagagaatgcaggacctggacgaggatgccaccctcacccagctcgccactgcctgggtcagcctggccacgggtggtgagaagctgcaggatgcctactacatcttccaggagatggctgacaagtgctcgcccaccctgctgctgctcaatgggcaggcggcctgccacatggcccagggccgctgggaggccgctgagggcctgctgcaggaggcgctagacaaggatagtggctacccggagacgctggtcaacctcatcgtcctgtcccagcacctgggcaagccccctgaggtgacaaaccgatacctgtcccagctgaaggatgcccacaggtcccatcccttcatcaaggagtaccaggccaaggagaacgactttgacaggctggtgctacagtacgctcccagcgcctgaggctggcccagagctgtcaggaccatgaagccaggacagaggccaggagccagccctgcagccctccccacccggcatccacctgcatcccctctgggggcaggagcccacccccagcacccccatctgttaataaatatctcaactccagggtgttccacctgaaaaaaaaaaaaaaaaaaaaaaaaaaaaaaaaaaaaaaaaaaaaaaaaaaaaaaaaaaaaaaaaaaaaaaaaaaaaaaaaaaaaaaaaaaaaaaaaaa

SEQ ID NO: 1798 - protein, 308 aa, Homo sapiens
MAPPAPGPASGGSGEVDELFDVKNAFYIGSYQQCINEAQRVKLSSPERDVERDVFLYRAYLAQRKFGVVLDEIKPSSAPELQAVRMFADYLAHESRRDSIVAELDREMSRSVDVTNITFLLMAASIYLHDQNPDAALRALHQGDSLECTAMTVQILLKLDRLDLARKELKRMQDLDEDATLTQLATAWVSLATGGEKLQDAYYIFQEMADKCSPTLLLLNGQAACHMAQGRWEAAEGLLQEALDKDSGYPETLVNLIVLSQHLGKPPEVTNRYLSQLKDAHRSHPFIKEYQAKENDFDRLVLQYAPSA

SEQ ID NO: 1799 - DNA, 3291 bp, Homo sapiens
gaggaagtggctgggcctgaactggcactgtgcctgccacaaggtcttgtgcatcccccagccctcagctttgccttctgaagccactcctcaggggcacagaccctcctcctcctccatctctaatgttctctgacccctggttacctgtggcctgggaacgaacaaggaccagtctctgagcctaggagtgaaacccaaacgctggtgatagaattcgtcttagtttctgggaattggatttatttctcttgtatccacgtagagggtagcactagactgctgttattatatccacccgtctttggattgctggctggggggtctgcctgccttccagactgactgctgacaaataattcctgaggttctccacagttctctggtggctgcaccctgcctggcccctgtaacctagacaatttgtttacagaaagttcaggagccctggaaaggagaaggaataagacggcaggaggaagagagagagagggtagaatggaagaatctcacttcaattctaacccgtacttctggccttctatccccacagtctcaggtcagatcgagaacacaatgttcatcaacaagatgaaggatcagctgttgccagagaagggctgtggtctggccccacctcactaccccaccttgctgacagtgcctgcctcagtgtccctgccctcaggcatcagtatggacacagagtccaagtcagaccagctgaccccacacagccaagcgtccgttacccagaatatcacggtggtccctgtgccgtctacaggactgatgactgctggagtctcctgttctcagaggtggagaagagaagggagtcaatcaaggggtccgggtttggtaatcacgtccccctcaggctctcttgtgaccacagcatcatcagctcagaccttccccatttcggctcccatgattgtctcagctcttccccctggctcacaagccctgcaggttgtccctgacctctccaagaaggtagcatcgaccctaaccgaggaaggaggcggaggtggtggtggaggtggcagtgtggctcctaagccaccccggggccggaagaagaagcggatgctggaatcagggctgcccgagatgaatgacccttatgtcctctcccctgaggatgatgatgaccatcagaaagacggcaagacctacaggtgccggatgtgctcactgacattctactccaagtcggagatgcagatccactccaagtcacacaccgagaccaagccccacaagtgcccacattgctccaagaccttcgccaacagctcctacctggcccagcacatccgtatacactcaggggctaagccctacagttgtaacttctgtgagaaatccttccgccagctctcccaccttcagcagcacacccggatccactccaagatgcacacggagaccatcaagccccacaagtgcccgcactgctccaagaccttcgccaacacctcctacctggcccagcacctccgtatccactcgggggccaagccctacaactgttcctactgccagaaggccttccgccagctctcccacctccagcagcacacacgaatccacactggtgatagaccatacaaatgtgcacacccaggctgtgagaaagccttcacacaactctccaatctgcagtcccacagacggcaacacaacaaagataaacccttcaagtgccacaactgtcatcgggcgtacacggatgcagcctcactagaggtgcacctgtctacgcacacagtgaagcatgccaaggtgtacacctgcactatctgcagtcgggcatacacatcagaaacataccttatgaaacatatgcgcaaacacaacccgcctgatcttcagcaacaggtgcaggcagcagcagcagcggcagcagtggcccaggcccaggctcaagctcaagcccaggctcaggctcaggctcaagcccaggcccaggcccaggcctcccaggcatcacagcagcagcagcagcagcagcagcagcagcagcagcagcaacagccaccaccacacttccagtctcctggggcagccccccagggtgggggtggtggggacagcaatcccaaccctccaccccagtgttcctttgacctgaccccgtataagacggcggagcatcataaggacatctgcctcactgtcaccaccagcaccatccaggtggagcacctggccagctcttagagatccgtgctgccacccactgggaagaggaagaagtagtcctggtgtcttctttctccaactcttggtgggaaaagtccttttcttccttgacaggccttggctccatctccttgggcctctgtcacggctttccttcacaggataccatcctttttctgaactcttcttcaaaaggaacatcagccctcctgattgcaaaggaatactgagctgatggtgtcatccagcagcctcccctcccaagcaaagcttctaaaactgggggtcggtgctcaagggaaggatttgctatgacctcatagaaccttgtccagtgtggccacttaccctatccttaccctccttatcctcaaagtttgggctgatgtaagactagaggctggccctcccagataacagagaaaagggagccccaaatgcaaccagcctcttgttctattcttgcctgcaaaagaacagaggtttctcaaatgcctcagtccctgagagccatttcttcccctacatcgtctcactttgcttcctattgactgctggtagaaggagatttggggtaggggctagacctccttttatttgaagggggcaagggctgagatgtggtccccaaggggccagaaattcccaagttggtcacaggtggcttagaagtgtgtgttatggttttacggatttccttgaagcctctctccttctctgcctacaaagaccctatactctcagtctccccaacccacccccaaggagctgtgggaggctttgtgttatctgtgaaactccaaaacaggggtgttgcggagaagggagagttcaaggcaaacgcaaggactggacttagctccctaggtgccacagtcagatgccggacacggatttatatataaatatatatatataaatatattataccactcatcacggccatctttgttgtaaccatttctgtgtttataaatgcattatctctgagaattttcatatttgatgttttgtttatttttgtcctttttttccctctctccacccctgtcctctagccacagcatttttctttttgtc

SEQ ID NO: 1800 - protein, 576 aa, Homo sapiens [sequence omitted]

SEQ ID NO: 1801 - DNA, 1472 bp, Homo sapiens
cgctccgccgaccgaagaggctggacatgacaccagtggcatatcacggccatggggtctcagcattccgctgctgctcgcccctcctcctgcaggcgaaagcaagaagatgacagggacggtttgctggctgaacgagagcaggaagaagccattgctcagttcccatatgtggaattcaccgggagagatagcatcacctgtctcacgtgccaggggacaggctacattccaacagagcaagtaaatgagttggtggctttgatcccacacagtgatcagagattgcgccctcagcgaactaagcaatatgtcctcctgtccatcctgctttgtctcctggcatctggtttggtggttttcttcctgtttccgcattcagtccttgtggatgatgacggcatcaaagtggtgaaagtcacatttaataagcaagactcccttgtaattctcaccatcatggccaccctgaaaatcaggaactccaacttctacacggtggcagtgaccagcctgtccagccagattcagtacatgaacacagtggtcagtacatatgtgactactaacgtctcccttattccacctcggagtgagcaactggtgaattttaccgggaaggccgagatgggaggaccgttttcctatgtgtacttcttctgcacggtacctgagatcctggtgcacaacatagtgatcttcatgcgaacttcagtgaagatttcatacattggcctcatgacccagagctccttggagacacatcactatgtggattgtggaggaaattccacagctatttaacaactgctattggttcttccacacagcgcctgtagaagagagcacagcatatgttcccaaggcctgagttctggacctacccccacgtggtgtaagcagaggaggaattggttcacttaactcccagcaaacatcctcctgccacttaggaggaaacacctccctatggtaccatttatgtttctcagaaccagcagaatcagtgcctagcctgtgcccagcaaatagttggcactcaataaagatttgcagaatttaatacagatcttttcagctgttcttagggcattataaatggaaatcataacgtggttctaggttatcaaaccatggagtgatgtggagctaggattgtgagtgacctgcaggccattatcagtgcctcatctgtgcagaagtggcagcagagagggaccatccaaatacctaagagaaaacagacctagtcaggatatgaatttgtttcagctgttcccaaaggcctgggagctttttgaaaagaaagaaaaaagtgtgttggcttttttttttttttagaaagttagaattgtttttaccaagagtctatgtggggcttgattcacccttcatccattggctggaacatggattggggatttgatagaaaaataaaccctgcttttgattcaaaaaaaaaaaaaaaaaaa

SEQ ID NO: 1802 - protein, 250 aa, Homo sapiens
MGSQHSAAARPSSCRRKQEDDRDGLLAEREQEEAIAQFPYVEFTGRDSITCLTCQGTGYIPTEQVNELVALIPHSDQRLRPQRTKQYVLLSILLCLLASGLVVFFLFPHSVLVDDDGIKVVKVTFNKQDSLVILTIMATLKIRNSNFYTVAVTSLSSQIQYMNTVVSTYVTTNVSLIPPRSEQLVNFTGKAEMGGPFSYVYFFCTVPEILVHNIVIFMRTSVKISYIGLMTQSSLETHHYVDCGGNSTAI

SEQ ID NO: 1803 - DNA, 3872 bp, Homo sapiens
aggagggcgagcgaggaggatggcggagtcggggctcctgacggaactctaatgaatcattgattgaccagcactattttaccagttggaatgaatgatcagaaatgggcatagtgcttttagatccaacatgtaacagatggatgttactccatgctgattacttcttcaagccagtacttttttgattgtgtaggatctttgtctcttcatctttgaattcaattactggaaaataaaaggagttcatgtagtttttgtccaggcttgagtcaccatgagtagtagtttaggaaaagaaaaagactctaaagaaaaagatcccaaagtaccatcagccaaggaaagagaaaaggaggcaaaagcctctggaggttttgggaaagagagcaaagaaaaagaacctaagaccaaagggaaagatgccaaagatggaaagaaggactccagtgctgcccaaccaggggtggcattttcagttgacaatacgatcaaacggccaaacccagcacctgggactagaaaaaaatccagcaatgcagaggtgattaaagagctcaacaaatgccgggaagagaattcaatgcgtttggacttatccaagagatctatacacatattgccatcatcaatcaaagagttgactcaattaacagaactttatttatacagtaacaaattgcagtccctcccagcagaggtgggatgtttagtaaatctcatgacactggctctaagtgaaaattcacttaccagtttgcctgactctcttgataacttgaagaagctgcggatgcttgatttacggcataataaactgagagaaattccttcagtggtgtataggctggattctctcaccactctttaccttcgctttaatcgtataactactgtggaaaaggacatcaaaaacttgtcaaaactcagcatgcttagcattcgagagaacaaaattaaacaactacctgctgaaattggtgaattatgtaacctcattacgctggatgtagctcacaatcaacttgaacaccttccaaaggagattggaaactgtacacagataaccaaccttgacttgcagcacaatgaactgctagacctcccagatactataggaaacctgtccagtttaagtcgtcttggtctgagatataacagactgtcagcaatacccagatcattagcaaaatgcagtgcacttgaagaattaaatttagagaacaataacatttctactttaccagagagtcttttatcaagtcttgtgaaactgaatagtttgaccttagctagaaattgcttccagttgtatccagtgggtggtccatctcagttttctaccatctattccctcaacatggaacacaatcgaatcaacaaaattccatttggaattttctccagagcaaaagtattaagtaagctgaatatgaaggacaatcagttaacatcacttcccttggattttggaacttggaccagtatggtagaattgaatttagccactaatcagctcacaaagatccctgaggatgtgtctggtctcgtttctcttgaggttcttatcttatcaaacaatcttctaaagaagcttccccatggtcttggaaaccttaggaagttaagagagttggatctagaagagaacaaattggaatccttgccaaatgaaattgcatatcttaaggatttacagaaattagtcttgacaaacaaccagttgaccactcttcccagaggcattggtcaccttactaatctcacacatctgggccttggagagaacctacttactcaccttcctgaagaaattggtacactggagaacctagaagaactgtatttgaatgacaaccccaacctgcatagccttccccttgagctggcactctgcagcaagctttcaatcatgagtattgagaactgtccactcagtcaccttccacctcagattgttgctggggggccttctttcatcattcagttcttaaagatgcagggtccatatcgtgccatggtctgatataaatctgctggtcccacacactgttcaaaaatagactgccattaatgtttcttatctatatctgtatctatttatgtagatattggtatatggcagatttataaaaattgcattatgtgtttctgctaatagaggaatcatagccatttagaattttttttaaattctgtacaaaaggcttatataagttttctttgctgaatttgatggatgtttttctgttgtgtaatctgatatgccagtttgcttaaaacatttgccaacacattatgaagttattaaatttaagggacagaggtagtatagttagatatactttctcttaggaaaaataatgggcaaaaatttttgttgcaacttttcatatatattttccccttaccaattgttttatccttatagtattgtaggccctgaaagtagaatttttctttaacttattttgagatttgagatttaaattttatgtattgtttacagtcagagtaaatcactggatttcttttgtttgttttgatttgctctgttttattcagtcaaatctagagtttgaatcctctgctaaagaatttgcatccactggtgtaaacagtgaaaggtatttgcttgttgaaaaaaaaaactggcaaagtgaaaagatacagtcaaaaatctagaatttctttaattttgcttctctgacgagttgtgaagcaaaatacctgaagtgagtctttgggtaggggaagggtattgagaccttttctagtatgaatattttttaagtttgggggaagagaaacttgcagtgaaaaggagttttttcattcctgaaagttgcagatccacaaaactaacaggataattgggcaaataaattacatataaacacacacaatctatatatgtatatacaatgctatatagatatgtatttattatatcataaactacagtaggtaactttaaggatttcttcctatccttgtacaatgacatgaatgtctttctttgaaaactgcaatgtatgtatgtttcaaggttatttaacagtgtactatggttttatatcttgacttgccttgtacatctttcaattctggaatatctgtgtctaagcacaatatcttcacactgtgctgtattgctgctgaactaaatgcacttttccccacatatggggcactggcttcaaacaattcagttcagtatcattacttttaatctcatctttcctttcttggtagttgttaatacagttatggaaaagaggcacattgcatagaagccattggggagttcagtggaagttctgtaagatgtgcatgtactatttgatgcgttttctttgcttcactgcttttaatacttagcagtattgttggtctaagtcaatttgattattgaggagtctcagagcaaggtgcgttctagatgtcatcctaaaaaacacttcatatataattaatcactattttgtataattacatattgctgcttgtgtgtttttttttttttccatttagttgggcgttgtgttttacacaaaaccatttttgaattaaggctatgatattaagatagaaatttggactgttgttctgcttttcctggcactcaaattcatgactagttttgaggtcaaacctatgttcgtaatgagagattttataaggatcaactaagaaatggaaggcaggtgaagatataaaaccctagaatgcttaaatgtgctgtaaaactattgtagatgtcactggattttaccaagtaatatcctttcttttttttttccccccatctgctgtggcttttcagttaaaattttgtttataaaaggaatttgtttattacagctctacct

SEQ ID NO: 1804 - protein, 582 aa, Homo sapiens
MSSSLGKEKDSKEKDPKVPSAKEREKEAKASGGFGKESKEKEPKTKGKDAKDGKKDSSAAQPGVAFSVDNTIKRPNPAPGTRKKSSNAEVIKELNKCREENSMRLDLSKRSIHILPSSIKELTQLTELYLYSNKLQSLPAEVGCLVNLMTLALSENSLTSLPDSLDNLKKLRMLDLRHNKLREIPSVVYRLDSLTTLYLRFNRITTVEKDIKNLSKLSMLSIRENKIKQLPAEIGELCNLITLDVAHNQLEHLPKEIGNCTQITNLDLQHNELLDLPDTIGNLSSLSRLGLRYNRLSAIPRSLAKCSALEELNLENNNISTLPESLLSSLVKLNSLTLARNCFQLYPVGGPSQFSTIYSLNMEHNRINKIPFGIFSRAKVLSKLNMKDNQLTSLPLDFGTWTSMVELNLATNQLTKIPEDVSGLVSLEVLILSNNLLKKLPHGLGNLRKLRELDLEENKLESLPNEIAYLKDLQKLVLTNNQLTTLPRGIGHLTNLTHLGLGENLLTHLPEEIGTLENLEELYLNDNPNLHSLPLELALCSKLSIMSIENCPLSHLPPQIVAGGPSFIIQFLKMQGPYRAMV

SEQ ID NO: 1805 - DNA, 3311 bp, Homo sapiens
gcgagcgggggcgcgggtggcgcggcgggacgcgagcggcgagccggagcgcgagcccgctcccgcaccatggaggaggacgacagctacgttcccagtgacctgacagcagaggagcgtcaagaactggagaacatccgacggagaaaacaggagctgctggctgacattcagaggctgaaggatgagatagcagaagtagctaatgaaattgaaaacctgggatccacagaggaaaggaaaaacatgcagaggaacaaacaggtagccatgggcaggaaaaaatttaatatggaccctaaaaaggggatccagttcttaatagagaacgacctcctgaagaacacttgtgaagacattgcccagttcttatataaaggcgaagggctcaacaagacagccatcggcgactacctaggggagagagatgagtttaatatccaggttcttcatgcatttgtggagctgcatgagttcactgatcttaatctcgtccaggcactacggcagttcctgtggagcttccggctacccggagaggcccagaagatcgaccggatgatggaggcgtttgcccagcgatattgtcagtgcaataatggcgtgttccagtccacggatacttgttacgtcctctcctttgccatcatcatgttgaacaccagtctgcacaaccccaatgtcaaagataagcccactgtggagaggttcattgccatgaaccgaggcatcaatgatgggggagacctgccggaggagctcctccggaatctctatgagagcataaaaaatgaaccctttaaaatcccagaagacgacgggaatgacctcactcacactttcttcaatccagaccgagaaggctggctattgaaactcggaggtggcagggtaaagacttggaagagacgctggttcattctgactgacaactgcctttactactttgagtataccacggataaggagccccgtggaatcatccctttagagaatctgagtatccgggaagtggaggactccaaaaaaccaaactgctttgagctttatatccccgacaataaagaccaagttatcaaggcctgcaagaccgaggctgacgggcgggtggtggaggggaaccacactgtttaccggatctcagctccgacgcccgaggagaaggaggagtggattaagtgcattaaagcagccatcagcagggaccctttctacgaaatgctcgcagcacggaaaaagaaggtctcctccacgaagcgacactgagcgtgcagccaagggcgttggtctgcgggggccttggagctcctgctcttctcccgcacctccatggatgcactgctgccgagcagagcgtcctctgccaggccccgccctggattcctagagactagcttcagcttttgctattttttttaagtgggagaagggtgggcagttatcactggggaagagaggaccggccacctgtccagcatgggctccagagccttcctctctcacagggcagagctcttgtcggcagggcagcctcctggccagtttctctgctcagtgttctggtagcagagctcagagccaactgtttacctcttggttgtccccgtgaagaagccttcaaaccctgcaccataaatacatgtgtccatatattattatatgttaagagaaaaaggtggaaaggaagagaagccacatactataaagatctattttttttttttaagagagaacgtagggctgttcaggtgcattctgccctggctgcgctggggagcttctccctggagaagagcacctggggctgcggccaaggggcatcagcctgggcccgcggcagggcctggcctgcctctcctgtgctgtgggagctcgctgcctggtgcttgtcttggcgagatggacaggtgaggtcgaggacgcagagggcagaggcccagtggagcctcagacggcacagtcagagtcgggggcctgcctggccggggtcgcagtcggcagcagcgtgcagtccggcatctcccgcggatgcttttccatcccaagtgcctgcggagcccgaggagaggagagagctgactggacgcttacgttattttcctccttcagaatccaagttcttgttgggctttaaagtagaaagtcagcattttccttgagctaaatacctaataaccaaaactgtgaggaaggttatcgggacagaggttccggataacctgtttcattttgggttttcttcctcttccccagactccagtcctcgttctagaggaaggagtaggacttccccgatccccgtagcttcagctttttctgcctcaaaaccagccctaactggactactctggatgcattttgtggtgggccccctagagggaagatgggcctttatctgctccgtggggtgcactggagtgaggggggtggccgggctgcctctcgcatctctgtcttcccctgcaggcgctgtgtgagctggccctgcccctcctcattacagtatgaagggagccgtgacacgcagcattttcctgccgttctctcagggactctcagggcagctcctgccactccgccagggccagcatgccagtccaggcagagcaggtggctggctgtctggccgtctcgccccgcccctccacaggaccctggaccagggcggtgcagggcgcagccccgaggaggcaggtggaggagctgcgggttttcacagggccgcgtcgccacggctcctctgatcctttagggttggcgagcatctctggaaatagcttttgcagaggagtggtgggaggaatagagggggacagtctgtcacctccctccccgccactttgtgtagatcctacctggagggaatggctttaggcacttttgtgccagagcttgtgagggtgacagaagagggtccaggctggaaacctgaactttctgggtgggagaaccaggtggtgcctgccgaggtctgggcgtgtttgggccggtgctggagcctgtccagctggcccgggccctggcctggttctcaagtgtttcctagacagagaggcacctgggtcagtattagtctatttatcagaggtgtaaataatctatgtatagtttttctccttttagattattttgtatttgtttaaaagaagttttgtcaaaatacaaaaatataaagaaatgactgaaagttgttgacagggtttttaagaaataattattctaattgtttttgtttgtttgtttttgccttgtaaactagcgccaaggaactgcagcaaataaactccaactctgcccaagcaaaaaaaaaa

SEQ ID NO: 1806 - protein, 398 aa, Homo sapiens
MEEDDSYVPSDLTAEERQELENIRRRKQELLADIQRLKDEIAEVANEIENLGSTEERKNMQRNKQVAMGRKKFNMDPKKGIQFLIENDLLKNTCEDIAQFLYKGEGLNKTAIGDYLGERDEFNIQVLHAFVELHEFTDLNLVQALRQFLWSFRLPGEAQKIDRMMEAFAQRYCQCNNGVFQSTDTCYVLSFAIIMLNTSLHNPNVKDKPTVERFIAMNRGINDGGDLPEELLRNLYESIKNEPFKIPEDDGNDLTHTFFNPDREGWLLKLGGGRVKTWKRRWFILTDNCLYYFEYTTDKEPRGIIPLENLSIREVEDSKKPNCFELYIPDNKDQVIKACKTEADGRVVEGNHTVYRISAPTPEEKEEWIKCIKAAISRDPFYEMLAARKKKVSSTKRH

SEQ ID NO: 1807 - DNA, 3308 bp, Homo sapiens
gcgagcgggggcgcgggtggcgcggcgggacgcgagcggcgagccggagcgcgagcccgctcccgcaccatggaggaggacgacagctacgttcccagtgacctgacagcagaggagcgtcaagaactggagaacatccgacggagaaaacaggagctgctggctgacattcagaggctgaaggatgagatagcagaagtagctaatgaaattgaaaacctgggatccacagaggaaaggaaaaacatgcagaggaacaaacaggtagccatgggcaggaaaaaatttaatatggaccctaaaaaggggatccagttcttaatagagaacgacctcctgaagaacacttgtgaagacattgcccagttcttatataaaggcgaagggctcaacaagacagccatcggcgactacctaggggagagagatgagtttaatatccaggttcttcatgcatttgtggagctgcatgagttcactgatcttaatctcgtccaggcactacggcagttcctgtggagcttccggctacccggagaggcccagaagatcgaccggatgatggaggcgtttgcccagcgatattgtcagtgcaataatggcgtgttccagtccacggatacttgttacgtcctctcctttgccatcatcatgttgaacaccagtctgcacaaccccaatgtcaaagataagcccactgtggagaggttcattgccatgaaccgaggcatcaatgatgggggagacctgccggaggagctcctccggaatctctatgagagcataaaaaatgaaccctttaaaatcccagaagacgacgggaatgacctcactcacactttcttcaatccagaccgagaaggctggctattgaaactcggtggcagggtaaagacttggaagagacgctggttcattctgactgacaactgcctttactactttgagtataccacggataaggagccccgtggaatcatccctttagagaatctgagtatccgggaagtggaggactccaaaaaaccaaactgctttgagctttatatccccgacaataaagaccaagttatcaaggcctgcaagaccgaggctgacgggcgggtggtggaggggaaccacatgtttaccggatctcagctccgacgccccgaggagaaggaggagtggattaagtgcattaaagcagccatcagcagggaccctttctacgaaatgctcgcagcacggaaaaagaaggtctcctccacgaagcgacactgagcgtgcagccaagggcgttggtctgcgggggccttggagctcctgctcttctcccgcacctccatggatgcactgctgccgagcagagcgtcctctgccaggccccgccctggattcctagagactagcttcagcttttgctattttttttaagtgggagaagggtgggcagttatcactggggaagagaggaccggccacctgtccagcatgggctccagagccttcctctctcacagggcagagctcttgtcggcagggcagcctcctggccagtttctctgctcagtgttctggtagcagagctcagagccaactgtttacctcttggttgtccccgtgaagaagccttcaaaccctgcaccataaatacatgtgtccatatattattatatgttaagagaaaaaggtggaaaggaagagaagccacatactataaagatctattttttttttttaagagagaacgtagggctgttcaggtgcattctgccctggctgcgctggggagcttctccctggagaagagcacctggggctgcggccaaggggcatcagcctgggcccgcggcagggcctggcctgcctctcctgtgctgtgggagctcgctgcctggtgcttgtcttggcgagatggacaggtgaggtcgaggacgcagagggcagaggcccagtggagcctcagacggcacagtcagagtcgggggcctgcctggccggggtcgcagtcggcagcagcgtgcagtccggcatctcccgcggatgcttttccatcccaagtgcctgcggagcccgaggagaggagagagctgactggacgcttacgttattttcctccttcagaatccaagttcttgttgggctttaaagtagaaagtcagcattttccttgagctaaatacctaataaccaaaactgtgaggaaggttatcgggacagaggttccggataacctgtttcattttgggttttcttcctcttccccagactccagtcctcgttctagaggaaggagtaggacttccccgatccccgtagcttcagctttttctgcctcaaaaccagccctaactggactactctggatgcattttgtggtgggccccctagagggaagatgggcctttatctgctccgtggggtgcactggagtgaggggggtggccgggctgcctctcgcatctctgtcttcccctgcaggcgctgtgtgagctggccctgcccctcctcattacagtatgaagggagccgtgacacgcagcattttcctgccgttctctcagggactctcagggcagctcctgccactccgccagggccagcatgccagtccaggcagagcaggtggctggctgtctggccgtctcgccccgcccctccacaggaccctggaccagggcggtgcagggcgcagccccgaggaggcaggtggaggagctgcgggttttcacagggccgcgtcgccacggctcctctgatcctttagggttggcgagcatctctggaaatagcttttgcagaggagtggtgggaggaatagagggggacagtctgtcacctccctccccgccactttgtgtagatcctacctggagggaatggctttaggcacttttgtgccagagcttgtgagggtgacagaagagggtccaggctggaaacctgaactttctgggtgggagaaccaggtggtgcctgccgaggtctgggcgtgtttgggccggtgctggagcctgtccagctggcccgggccctggcctggttctcaagtgtttcctagacagagaggcacctgggtcagtattagtctatttatcagaggtgtaaataatctatgtatagtttttctccttttagattattttgtatttgtttaaaagaagttttgtcaaaatacaaaaatataaagaaatgactgaaagttgttgacagggtttttaagaaataattattctaattgtttttgtttgtttgtttttgccttgtaaactagcgccaaggaactgcagcaaataaactccaactctgcccaagcaaaaaaaaaa

SEQ ID NO: 1808 - protein, 397 aa, Homo sapiens
MEEDDSYVPSDLTAEERQELENIRRRKQELLADIQRLKDEIAEVANEIENLGSTEERKNMQRNKQVAMGRKKFNMDPKKGIQFLIENDLLKNTCEDIAQFLYKGEGLNKTAIGDYLGERDEFNIQVLHAFVELHEFTDLNLVQALRQFLWSFRLPGEAQKIDRMMEAFAQRYCQCNNGVFQSTDTCYVLSFAIIMLNTSLHNPNVKDKPTVERFIAMNRGINDGGDLPEELLRNLYESIKNEPFKIPEDDGNDLTHTFFNPDREGWLLKLGGRVKTWKRRWFILTDNCLYYFEYTTDKEPRGIIPLENLSIREVEDSKKPNCFELYIPDNKDQVIKACKTEADGRVVEGNHMFTGSQLRRPEEKEEWIKCIKAAISRDPFYEMLAARKKKVSSTKRH

SEQ ID NO: 1809 - DNA, 4373 bp, Homo sapiens
cggctcggtgttggggctaggccggtattctaggcccaagcccaggcccaggcctgtgttcccggcccttgctcaaagacaggccggtggccgctgcgacactctaggtacagcggagggcgcagcgggccgttcgctgaggtgtccggacccgccgccgagcgggccgtggagccacagtacgtggcggcgcctcttccttgcccgaagcggaactgctgaaggagcggcagcgcaggccggacgaggtgaaccaggtcatttaaccgccttcaggtgatgaatcatctgtctaataatcagatttgaggtccacagccctttgtggtcctgctacagggtgattttcagtggatgactgactggcgtggcccgaggggtgccgcagtgactgccttcccttgataaggaaacgagctttctgttctttctggacacctcgttacctgtaaaacattccggttataacttctttatccggcttgcatctctgtgcaagaggaaagctttcacatgaaagtgtcccttggtaacggcgaaatgggcgtctctgcccatttgcagccttgtaaggcaggaaccacacgcttttttaccagcaatactcacagttcggtggtattgcaaggctttgatcagcttagaatagaaggattgctttgtgatgtgaccctggtaccaggtgatggagatgaaatcttccctgttcacagagctatgatggcgtctgctagtgattatttcaaagccatgttcacaggtggaatgaaagaacaagatttgatgtgcattaagcttcatggggtgaacaaggttggtctgaagaaaatcattgattttatttatactgcaaaactttctcttaatatggacaatcttcaggacacacttgaagctgctagctttttacaaatattacccgttttggatttctgtaaagtatttcttatatcaggagtctctttggataactgtgttgaggttggacgaattgctaacacctacaatcttatagaagtggataaatatgttaataatttcatcctgaagaactttcctgctttattgagtactggggagtttctaaaactcccttttgaacgacttgcatttgtgctttccagtaatagtcttaagcactgtaccgaacttgaactctttaaggcagcctgtcgctggctaaggttggaagaccctcggatggattatgctgcaaagttaatgaagaatattcgatttccactgatgacaccacaggatctcatcaattacgtgcagacagtagatttcatgagaacagacaatacctgcgtgaatttgcttttggaagctagcaattaccaaatgatgccatatatgcagccagtgatgcagtcagatagaactgccattcgatctgactccactcacttggttacattaggaggagttttgaggcagcagctggttgtcagtaaagaattacggatgtatgatgaaagggcacaagaatggagatctttagccccaatggatgctccccgttaccagcatggtattgctgtcattggaaactttctttatgtagttggtggtcagagtaattatgatacaaaaggaaaaactgctgttgatacagttttcagatttgatcctcggtataataaatggatgcaggttgcatcattaaatgaaaagcgcacattctttcacttgagtgccctcaaaggacatttgtatgcagttggtgggcgcagtgcagctggtgaactggccacagtagaatgttacaacccaagaatgaatgagtggagctatgttgcaaaaatgagtgaaccccactatggtcatgctggaacagtatatggaggcttaatgtatatttcaggaggaattacccatgacactttccaaaatgagctcatgtgttttgacccagatacagataaatggatgcaaaaggctccaatgactacagtcagaggtctgcattgcatgtgtacagttggagataagctctatgtcattggtggcaatcacttcagaggaacaagtgattatgatgatgttctaagctgtgaatactattcaccaacccttgaccagtggaccccaattgccgccatgttaagaggccaaagtgatgttggagttgccgtctttgaaaataaaatctatgttgttggtggatattcttggaataatcgttgtatggtagaaattgtccagaaatatgacccagaaaaagatgagtggcataaagtttttgatcttccagagtcacttggtggcattcgagcctgtacactcacagtttttccacctgaagaaaaccctgggtcaccttctagagaatcacctctttcagcaccttcagatcattcttaggtctaaggtgtaacacctttgcagtacgtcatgggtgatctaatacttccccttcagttgtatcttcttacagtgattggtacagttattagatataaaggtaactgatgttattcgtcttgtatggcttttagtatgtttatcaagtggctaacaaatgcattctgaaaatgtatttaacatagctgttttaacaaatgaaaaaaagacgtagaaaaatgtttagatgtctttttgtgatgttatataaaattgtagatgactgtggtaaatgtgtaattatgtccattatgcttcaaagttgagttttcatctttgactccaaaatgtcagagggaggccgctctaaactaaaaataacgaaaggttgccaagtattaatactagttacctccctcttttcgtagtttttgtcatgtctgtcaacttactcgattgtgtggttgcattcagaatatttgaagtttcttacgtagacagaaataataaaaatattaactaggaaaaaacagtatagcaccaagccagtatttggtatctctctctagagcgagcaagagagggagagaggaggaaaaaatacacataatacaaacatacatgcatgcacacatacatacatatgtatacacacacataatttgaaaactgattggcacttcaacgatgctgaaattgtttttaaattgaagtttctttcttccacaaagcagccgtttctattcaaatggaaattcagtaccagagaataaatgtctatgtagtcatactgaatttagatagataagggctacagcatactaaatcgacaaccaaatttgtcatgtgactaaaccgttacttcagatgaagcttacattactgttttctgcttgtgtattttctgtagagtacttttacacagattggtaaagttcaggtttcagagaactgcttttgtgcagaaaatttaggttcttttttccacctttttggtcagtaaaacttaatgaaaaaagcaaagaaaaaaatattctgaacaaagctatagggttttaagttcagcctcccaacttagtcatcctaacatgattattttgtgatttggggtgcttgccctggtgctgttccagtccatgtgcatcctgagctgtgtgatctgcctcgaggctatgatctgagcaagcaggagataacattttcttctgcatcaagtgaggaaaaatgtgcttttggccatgtctcaaagacaggaccaacttcagattcccaaagaagccagctacagagcctctggaacactatggtcttacaagcagtactaaaatcaaccctcagcctcttcaatgccaaaggtatccctattggttgagaaccacatggtaatttttaatgggacttttatcagcaaatggagttacaggaattctctgtaatgagtgattctgaagaggtactttcctggaataattgtctacctgaagaaaaaaaatttatatatacattgtgtgtgtgtgtaatacacacacacacaaccccctatacctggaagattgtcagcatgtaaatcaggaacaactttctccttattgacaatcccataataaaactcaggaaccaaggcaaaatgaattggcttctaggggtctgaaccttactgcccatacaagtgttgattcattttaatgctgtttatgatttctgcattggcagaaattttcatactttctatgtttttttaattactcagttttttattactaaaaatagcacatttgagtacatttgaaaagtagaaaaattagaaattattaactttattgaataagcaagaagtgcatcctaatcctttgattattaatgaggttgaatatttgtgtgctatcggtagctgtgtttctttgatcaaatgttcctgtccttttgcccttctgttatctgttggagttgctttgtttttcgtatcaagttataggatctctttatataataaatgtaatttaacttgaaaaaaaaaaaaaaaaaaa

SEQ ID NO: 1810 - protein, 617 aa, Homo sapiens
MKVSLGNGEMGVSAHLQPCKAGTTRFFTSNTHSSVVLQGFDQLRIEGLLCDVTLVPGDGDEIFPVHRAMMASASDYFKAMFTGGMKEQDLMCIKLHGVNKVGLKKIIDFIYTAKLSLNMDNLQDTLEAASFLQILPVLDFCKVFLISGVSLDNCVEVGRIANTYNLIEVDKYVNNFILKNFPALLSTGEFLKLPFERLAFVLSSNSLKHCTELELFKAACRWLRLEDPRMDYAAKLMKNIRFPLMTPQDLINYVQTVDFMRTDNTCVNLLLEASNYQMMPYMQPVMQSDRTAIRSDSTHLVTLGGVLRQQLVVSKELRMYDERAQEWRSLAPMDAPRYQHGIAVIGNFLYVVGGQSNYDTKGKTAVDTVFRFDPRYNKWMQVASLNEKRTFFHLSALKGHLYAVGGRSAAGELATVECYNPRMNEWSYVAKMSEPHYGHAGTVYGGLMYISGGITHDTFQNELMCFDPDTDKWMQKAPMTTVRGLHCMCTVGDKLYVIGGNHFRGTSDYDDVLSCEYYSPTLDQWTPIAAMLRGQSDVGVAVFENKIYVVGGYSWNNRCMVEIVQKYDPEKDEWHKVFDLPESLGGIRACTLTVFPPEENPGSPSRESPLSAPSDHS

SEQ ID NO: 1811 - DNA, 733 bp, Homo sapiens
gaattccagagcaacatgcccaagttttattgtgactactgcgatacatacctcacccatgactctccatctgtgagaaagacacactgcagtggaaggaaacacaaagagaatgtgaaagactattatcagaaatggatggaagagcaggctcagagcctgattgacaaaacaacggctgcatttcaacaaggaaagatacctcctactccattctctgctcctcctcctgcaggggcgatgataccacctccccccagccttccgggtcctcctcgccctggtatgatgccagcaccccatatggggggccctcccatgatgccaatgatgggccctcctcctcctgggatgatgccagtgggacctgctcctggaatgaggccgcccatgggaggccatatgccaatgatgcctgggcccccaatgatgagacctcctgcccgtcccatgatggtgcccactcggcccggaatgactcgaccagacagataaggatagaggggaggccttattgtatcggttttatattacctgttctgcttcaccaggagatcatgctgctgtgatactgagttttctaaacagcataaggaagacttgctcccctgtcctatgaaagagaatagttttggaggggagaagtgggacaaaaaagatgcagttttcctttgtattgggaaatgtgaaaataaaattgtcaactctttcagttaaaaaaaaaaaggaattc

SEQ ID NO: 1812 - protein, 159 aa, Homo sapiens
MPKFYCDYCDTYLTHDSPSVRKTHCSGRKHKENVKDYYQKWMEEQAQSLIDKTTAAFQQGKIPPTPFSAPPPAGAMIPPPPSLPGPPRPGMMPAPHMGGPPMMPMMGPPPPGMMPVGPAPGMRPPMGGHMPMMPGPPMMRPPARPMMVPTRPGMTRPDR

SEQ ID NO: 1813 - DNA, 3998 bp, Homo sapiens
agcggagtcatcacaagcctgttcggcgggactgtgatggccagagagatgacgatcttaggatcggctgttttgactctcctgttggccggctatttggcacaacagtatttaccattgcctactcctaaagtgattggtattgatcttggcaccacctattgttctgttggggtgttttttcctggcacaggaaaagtaaaggtgattccagatgaaaatgggcatatcagcatacccagcatggtgtcttttactgacaatgatgtatatgtgggatatgaaagcgtagagctggcagattcaaatcctcaaaacacaatatatgatgccaaaagattcataggcaagatttttaccgcagaagagttggaggctgaaattggcagatacccatttaaggttttaaacaaaaatggaatggttgagttttctgtgacaagtaatgagaccatcacagtgtccccagaatatgttggctctcgactattgttgaagttaaaggaaatggcagaggcatatcttggaatgccagttgccaatgctgtcatttctgtaccagcagaatttgatctaaaacagagaaattcaacaattgaagctgctaaccttgcaggactgaagattttgagggtaataaatgaacccacagcagcagctatggcctatggtctccacaaggctgacgtcttccacgtcttggtgatagacttgggcggaggaactctagatgtgtctttactgaataaacaaggagggatgtttctaacccgagcaatgtctggaaacaataaacttggaggacaggacttcaatcagagattgcttcagtacttatataaacagatctatcaaacatatggcttcgtgccctctaggaaagaggaaatccacagattgagacaagctgtggaaatggtcaaattaaatctgactcttcatcaatctgctcagttgtcagtattactaacggtggaggagcaggacaggaaggaacctcacagtagtgacactgaactgccaaaagacaaactttcctcagcagatgaccatcgcgtgaacagtgggtttggacgtggcctttctgataagaaaagtggagaaagtcaggttttatttgaaacagaaatatcacggaaactctttgatacccttaatgaagacctctttcagaaaatactggtacccattcagcaagtattgaaagaaggccacctggaaaagactgagattgatgaggtggttttagttgggggctccactcgtattcctcggatccgtcaagtcattcaagagttctttggaaaagatcccaacacatctgtagaccctgacctagcagtagtaacgggagtggctatccaagcagggattgatggaggcttttggcctctccaagtcagtgctttagaaattcccaataagcatttacaaaaaaccaacttcaactgaattctgcagaaataatggttatttgtgaacttgtctgatgatctcttcccatttatcagattaccttttccacaaaagaaagtctctaaaatatcacagatttacctagagggcaacatttagatacaggaaaattttacatagtgttttgtcttaggattagacgtgaccagattgatcctgtttgattttggagagatcctattctaacaaatactctaaaatgataaaattgaggtacaactctcttaaaagagtatggataactatattttctggattctggaggttgataaccatatgcacttaacattatattctataaacattaagtagtgccagttatgagattcccagttcttactaaattgtattagcaggagctggtaattacttgtattatcacatgtaactaataatttgaactatacttgaaggaccgtgttgatgtcaggtatttacagtggttggaagatagcagtattattagcataagctgcatacgtaatattcagtaactgccatattatataacaaatttacattcacaaattcagtatcctgttaagtgtcatattcttgtaatctgcattctccaggagttttatgtgtttaatagatgaatttattttatttctaaaggtattcaaatgtttcagcaccatatagtagaaatacccaattatattctagttcctttatgtcctgtacatcattctctgcttggatttccattattctgtttggttagagaataaaatcggtaattgcatttgaagaatgtgttaatgtcataataaagccatgattgctatcttatttttgttatccaagacctttgcaaacattggcaaatagcatcaattacctactgtatttgtttctttgtttatattttcagtaagccctggggaatatagcatggaattgagctactaaatggttttggttccgttttacggagatttttcctcatatttagttttgaatgaggaaaatgtgctcaattataaaagctgtgttattgttttctattattatttttaaataatcacacttggactcttttcaaacattaggttagtttgtaatgaaagcaaaaaatttgtgaatactggaagtaacgtggaaatctaatgtggaagccattgtggcaaggtttctacaaatcggcatttggagcagagttgtttgtttttgttgtttgtttcctttaagaaaaaccacagggaccaagaaagaaaatataacagtttgatttctgtcatacccattgtatttgaagatatatggatacagattatatatatatatacatattttccttaatagaggaatgcttcgtattattcaaaaattatatcctgatcacctttttttgttttttattgtaaagtatctctgcttcatccattgctgaattcgataggatgttgaaatgctggtcaccaaaaaaggaaactgagcaaattcatttcaacaacatcaaaacttcagcttctcatagtaaaaagctgaatgttactaatatttttcatatctaaaaaagaattcttagcaatgaaattgctgttaaaacacaaatttcaatcaaatacttttgtgtatagaaaatatgtatagtaggtagatagaaaagtataaaatgtttgttgaagtatcttattttagaatgaatggagaaatgccaaagatgaatccttcactgcattatgaaaatatttcacatgttctcttggactttatataaatctgtaatagattttagaattgaaaaattctttgtgaaggtcttctaaaagtgttccaatttatctcaaaatctccatatataggatcagcttaaaacataaagaaaaccttgaatttctcaaatgtttgagatgttcaagacagtctcttaatccgttaatgcttttggaaacaattgacaaaatagggcaggcagctcatctcatgtcctgaagttggaatttaaataattcctatttgcaaattagaatgacagtgttggaatttggaggcagtagttgagcatattctctagtatatagctacacctttaataaaatgaaggaatgtcttcaatcatattttagtgggctatttataaatagtcttgaagtcaatttagtttatttatttaaaagataatgcatcctgaaagggatcatttatgaataacaatctgaagtcttttcataaaaaaaattaataaactttagttgtacatttagccagcgttatttgaagtatgtaacttttaaaatattaagtgtcttgtatgattagaatatgtgaatgagtaacttattttgtatcaggaatgttttggtactgtgttttcactcaaaccactgacttaacagatactgctgtgtataacatgtactaaatattacagttattgtgcataacagattgttcctcttatatttgtgtgtatacaggcaattcatgttttaatgtaaataaataccattttgcagtttgttttttaaaaaaaaaaaaaaaaaaaaaaaaaaaaaataaaaaaaaaaaaaaaa

SEQ ID NO: 1814 - protein, 471 aa, Homo sapiens
MAREMTILGSAVLTLLLAGYLAQQYLPLPTPKVIGIDLGTTYCSVGVFFPGTGKVKVIPDENGHISIPSMVSFTDNDVYVGYESVELADSNPQNTIYDAKRFIGKIFTAEELEAEIGRYPFKVLNKNGMVEFSVTSNETITVSPEYVGSRLLLKLKEMAEAYLGMPVANAVISVPAEFDLKQRNSTIEAANLAGLKILRVINEPTAAAMAYGLHKADVFHVLVIDLGGGTLDVSLLNKQGGMFLTRAMSGNNKLGGQDFNQRLLQYLYKQIYQTYGFVPSRKEEIHRLRQAVEMVKLNLTLHQSAQLSVLLTVEEQDRKEPHSSDTELPKDKLSSADDHRVNSGFGRGLSDKKSGESQVLFETEISRKLFDTLNEDLFQKILVPIQQVLKEGHLEKTEIDEVVLVGGSTRIPRIRQVIQEFFGKDPNTSVDPDLAVVTGVAIQAGIDGGFWPLQVSALEIPNKHLQKTNFN

SEQ ID NO: 1815 - DNA, 614 bp, Homo sapiens
tagtcttttaacatttgagtttgaaattaattaaactgatcacaacatgcaaagaaaacattgggcagcagagggagttacagccctgagactgcttcagccctgctggtgagaagattgaattgaagctttttcagagcagagcaaagacctccctgcagctttcttggcaccagaatagctgggaagaaggataaaagcccagaggagtataatctctaagaaaacctgctggctgccttttccatttccctgtgtggcctttctgacctggctgccctgtggaagcagagctgtgcctgctgtggcttattctgaatggatcaagacatggaaggttctatttttgacagagcaaatgatgatagtgagaattaaggtacagtgaactcttacaattgagctctgtatttagaaatctctgcttgctttcctgctctactggagcctgtggtgtttgctttttaagttgtacttttccaccatctctagattgtttcttccaaccagaatttacgagaggcgttgctctctgcctcgttaaggttactaaaacatcctgctgggaagctgctcttgttggcagcccttgggttatgtcagcttttctggat

SEQ ID NO: 1816 - DNA, 2056 bp, Homo sapiens
ggggtcttcttggaaggcggtgctctgagaagccggactacgcggcagcggctcttcaaagcggagccgggagtttttgctacagttttcgccaccatgagtcgcagctataatgatgagctgcagttcttggagaagatcaataaaaactgctggaggatcaagaagggcttcgtgcccaacatgcaggttgaaggtgttttctatgtgaatgatgctctggagaaattgatgtttgaggaattaaggaatgcctgtcgaggtggtggtgttggtggcttcctgccagccatgaaacagattggcaatgtggcagccctgcctggaattgttcatcgatctattgggcttcctgatgtccattcaggatatgggtttgctattgggaacatggcagcctttgatatgaatgaccctgaagcagtagtatccccaggtggtgtcgggtttgacatcaactgtggtgtccgcttgctaagaaccaatttagatgaaagtgatgtccagcctgtgaaggagcaacttgcccaagctatgtttgaccacattcctgttggggtggggtcaaaaggtgtcatcccaatgaatgccaaagacttggaggaggccttggagatgggggtggactggtccttaagagaagggtatgcctgggctgaagacaaggagcactgcgaggagtacggaaggatgctgcaggctgaccccaataaagtttctgcaagggcgaagaaaagaggccttcctcagttggggaccctgggagcaggcaaccattatgcagaaatccaggttgtggatgagattttcaatgagtatgctgctaaaaaaatgggcatcgaccataagggacaggtgtgtgtgatgatccacagtggaagcagaggcttgggccaccaagtagccacagatgcgctggtagctatggagaaggccatgaagagagacaagattatagtcaatgatcggcagttggcttgtgctcgaatcgcttccccagagggtcaagactatctgaagggaatggcagctgctgggaactatgcctgggtcaaccgctcttccatgaccttcttaacccgtcaggctttcgccaaggtcttcaacacaacccctgatgacttggacctacatgtgatttatgatgtttctcacaacattgccaaagtggagcagcatgtggtggacggaaaggaacggacactgttagtacacaggaagggatccacccgcgctttccctcctcaccatcccctcattgctgttgattaccaactcactggacagccagtgctcattggtggcaccatgggaacctgtagttatgttcttactggcactgaacagggcatgactgagacctttggaacaacctgtcatggagcgggccgtgcattgtcccgagcaaaatctcgacgtaatttagatttccaggatgtcttagacaaattggcagatatgggaattgcgatccgtgttgcctcacccaaactggttatggaagaggctcctgagtcctataagaatgtgacagatgtggtaaatacctgccatgatgctggaatcagcaagaaagccattaaactgagaccaattgctgtgatcaaaggatagaaccttggacagcagggctgcctgacaccaccaaccctctctgaagtggaagtggactgacatgctcttctgacatcagactcaaggcgggacaagttgcaaagtgtgcagctgtaactgctcacgccaaaatggctgatggggaggctgctgctttcaggggcccgtgcttgtaaaataaccttccaggaagaggcacattgcccacctttggaaagggaggaatatgccttctccttggttgttccacagagttttaggaaaatctgttagggatgggtagatgtcaaactgccttacgcagtcatactgatctttagccatcagattgatcttcttcacaccaagctctgtttacattccgagaggtgtcatgaagaaagttctgttcaataaggttttggaatgttataaaaaaaaaaaaaaaaaaaaaaaaaaaaaa

SEQ ID NO: 1817 - protein, 505 aa, Homo sapiens
MSRSYNDELQFLEKINKNCWRIKKGFVPNMQVEGVFYVNDALEKLMFEELRNACRGGGVGGFLPAMKQIGNVAALPGIVHRSIGLPDVHSGYGFAIGNMAAFDMNDPEAVVSPGGVGFDINCGVRLLRTNLDESDVQPVKEQLAQAMFDHIPVGVGSKGVIPMNAKDLEEALEMGVDWSLREGYAWAEDKEHCEEYGRMLQADPNKVSARAKKRGLPQLGTLGAGNHYAEIQVVDEIFNEYAAKKMGIDHKGQVCVMIHSGSRGLGHQVATDALVAMEKAMKRDKIIVNDRQLACARIASPEGQDYLKGMAAAGNYAWVNRSSMTFLTRQAFAKVFNTTPDDLDLHVIYDVSHNIAKVEQHVVDGKERTLLVHRKGSTRAFPPHHPLIAVDYQLTGQPVLIGGTMGTCSYVLTGTEQGMTETFGTTCHGAGRALSRAKSRRNLDFQDVLDKLADMGIAIRVASPKLVMEEAPESYKNVTDVVNTCHDAGISKKAIKLRPIAVIKG

SEQ ID NO: 1818 - DNA, 1791 bp, Homo sapiens
cgcccgccggaggggcctggagtgcggcggcggcgggacccggagcaggagcggcggcagcagcgactgggggcggcggcggcgcgttggaggcggccatggcaaagcagtacgactcggtggagtgccctttttgtgatgaagtttccaaatacgagaagctcgccaagatcggccaaggcaccttcggggaggtgttcaaggccaggcaccgcaagaccggccagaaggtggctctgaagaaggtgctgatggaaaacgagaaggaggggttccccattacagccttgcgggagatcaagatccttcagcttctaaaacacgagaatgtggtcaacttgattgagatttgtcgaaccaaagcttccccctataaccgctgcaagggtagtatatacctggtgttcgacttctgcgagcatgaccttgctgggctgttgagcaatgttttggtcaagttcacgctgtctgagatcaagagggtgatgcagatgctgcttaacggcctctactacatccacagaaacaagatcctgcatagggacatgaaggctgctaatgtgcttatcactcgtgatggggtcctgaagctggcagactttgggctggcccgggccttcagcctggccaagaacagccagcccaaccgctacaccaaccgtgtggtgacactctggtaccggcccccggagctgttgctcggggagcgggactacggcccccccattgacctgtggggtgctgggtgcatcatggcagagatgtggacccgcagccccatcatgcagggcaacacggagcagcaccaactcgccctcatcagtcagctctgcggctccatcacccctgaggtgtggccaaacgtggacaactatgagctgtacgaaaagctggagctggtcaagggccagaagcggaaggtgaaggacaggctgaaggcctatgtgcgtgacccatacgcactggacctcatcgacaagctgctggtgctggaccctgcccagcgcatcgacagcgatgacgccctcaaccacgacttcttctggtccgaccccatgccctccgacctcaagggcatgctctccacccacctgacgtccatgttcgagtacttggcaccaccgcgccggaagggcagccagatcacccagcagtccaccaaccagagtcgcaatcccgccaccaccaaccagacggagtttgagcgcgtcttctgagggccggcgcttgccactagggctcttgtgttttttttcttctgctatgtgacttgcatcgtggagacagggcatttgagtttatatctctcatgcatattttatttaatccccaccctgggctctgggagcagcccgctgagtggactggagtggagcattggctgagagaccaggagggcactggagctgtcttgtccttgctggttttctggatggttcccagagggtttccatggggtaggaggatgggctcgcccaccagtgactttttctaagagctcccggcgtggtggaagaggggacaggtccctcacccacccacaatcctattctcgggctgagaaccctgcgtgaggacagggctcgcctcaggaatgggctgtttttggcctaaccctcagaaacactggggctggcacaaactcttggtttcttcaacaggagaattttactgtgtttcttttggttccattgtttggagacattcctgggcacagtttggtccgttagaattaaaagttgaatttttttttttttttaaaaaaaaaaaaaaaaaaaaaaaaaaaaaaaa

SEQ ID NO: 1819 - protein, 372 aa, Homo sapiens
MAKQYDSVECPFCDEVSKYEKLAKIGQGTFGEVFKARHRKTGQKVALKKVLMENEKEGFPITALREIKILQLLKHENVVNLIEICRTKASPYNRCKGSIYLVFDFCEHDLAGLLSNVLVKFTLSEIKRVMQMLLNGLYYIHRNKILHRDMKAANVLITRDGVLKLADFGLARAFSLAKNSQPNRYTNRVVTLWYRPPELLLGERDYGPPIDLWGAGCIMAEMWTRSPIMQGNTEQHQLALISQLCGSITPEVWPNVDNYELYEKLELVKGQKRKVKDRLKAYVRDPYALDLIDKLLVLDPAQRIDSDDALNHDFFWSDPMPSDLKGMLSTHLTSMFEYLAPPRRKGSQITQQSTNQSRNPATTNQTEFERVF

SEQ ID NO: 1820 - DNA, 2185 bp, Homo sapiens
agcggcgcagggcaccatgggaaacggacggaagctccattgagccaaataagttggccacgtggggcggaacggaaacctcgcagggtcagaccgtagcgacgcgggaagtccggacgcagtagctccctgaagcggaggcgaaggggagtttaagccccagcggcggcaatggcggagaggcccgaggacctaaacctgcccaatgccgtgatcaccaggatcatcaaggaggcgctcccggacggtgtcaacatctccaaggaggcccggagcgccatctcccgcgccgccagcgtcttcgtgctgtacgccacatcctgtgctaacaactttgcaatgaaaggaaagcggaagacgctgaatgccagtgatgtgctctcagccatggaagagatggagttccagcggttcgttatcccattgaaagaagctctggaagcatataggcgggagcagaaaggcaagaaggaggcctcagagcaaaagaagaaggacaaagacaaaaaaacagactcggaagagcaagacaagagcagggatgaggacaatgatgaagacgaagaaaggctggaagaagaagaacagaatgaagaggaagaagtagacaactgaaaagggcgggagactgtggcaccttggaaggtaccacttgaaatgagacgtgctacgtgtttctgtgaagcttttccatgctgggcagagtagtctcaggcaaaagtgcctgaaaagatcagaataaaaactgactagaaataccgtcaaaaccagcacttaccaaactcagagcatctgagtagcagaatcctgttttgcttcatcaatctgaaggttatggccttttgacaagagggattctgaacgactaaattagtcagtttgctcgcttttgtttacttaaatgtatggttagatggtttttgatctgcagtcttccctagtcccccaaataagtaataataacttccatgctgcctgctgtgttccagatcacagaggcagccaaggctcaggaaaaactggggctttgcttatggtcagcctatgtttgattgcacagtctttgacaatagtagcttactaagactgctcagaatgagtaagctttaggaaactactaaaatgctgtgggagaataacaaaatccgttctctctcttcacttgacagaagcattaactgaattttgtttttcatagacccacttggcccaaaacctttctatattgcctgtagatgatcggcctgctggtgtggtagtaatctgatcacagatattcttaaatcagcagtgtggaatggtattagtcaaacatggtgccagtgtcttttacaaaaacagatggcatagtgtcagatgtaccttactctctgctactgtacagctttaggatttgtcatcacctcccggaaggtgtaaaaccccaggcttcctcttcttgtagtccatctcccagacttgtgactatggcttttcattcttcaattcatgacgagtgccaaacttgattttctctaggcacagctttctccctctgtgcctcctgcttcctttctctctcctgcctctcctctgctccccatcccactttctcatctgcctccttttctcacttctgtcagtctgtaagctttgataacctgcttaatactccaaagtgtgagttcctctgatctcttgattccttagttctaatctcacgttttgtttttaagagatggagtctctcactctgtggcccaggctggagtgcagtggcatgatcatagctcattgcatccttgaaatcctgggctcaggtgatcctcccgcctgagcctcctgagtatctgggactacagatgcgtgccaccaagcctggctaattttgtctcatgtcttctaaaaattattttgtgaagccccttcacaaaaaaccttaagggaaatctgatggtgctcaggaatctaactctccctaaaccatcctctttaactgcttctaaaatatctctgttggcctttcttagcctttttctgtttccattcagtgctccaagcgctttttgtttctaagttgagtgcttggggtttgacaggtagtgacgtgtagtttgacactgttaacttgttaaatacagtgaaaagtttgtgagtgaagaatgctgagaagattgtaatgctttgtacaaataaaagtcttgtt

SEQ ID NO: 1821 - protein, 147 aa, Homo sapiens
MAERPEDLNLPNAVITRIIKEALPDGVNISKEARSAISRAASVFVLYATSCANNFAMKGKRKTLNASDVLSAMEEMEFQRFVIPLKEALEAYRREQKGKKEASEQKKKDKDKKTDSEEQDKSRDEDNDEDEERLEEEEQNEEEEVDN

SEQ ID NO: 1822 - DNA, 5614 bp, Homo sapiens
gcaggccgagcccagtggcgcaggcactgagctgtacttatttgctgtgctatttgacctcttggtttcagagagctccctggaccatctaatggctatgggagatgataaaagcttcgatgatgaagaatcagtggatggaaataggccatcatcagctgcatcagccttcaaggttcctgcacctaaaacatccggaaatcctgccaacagtgcaaggaagcctggttcagcaggtggccctaaggttggaggtgcttctaaggaaggaggtgctggagcagttgatgaagatgattttataaaagcttttacagatgtcccttctattcagatttattctagtcgagaactcgaagaaacattaaataaaatcagggaaattttgtcagatgataaacatgactgggatcagcgtgccaatgcactgaagaaaattcgatcactgcttgttgctggagctgcacagtatgattgcttttttcaacatttacgattgttggatggagcacttaaactttcagctaaggatcttagatcccaggtggttagagaagcttgtattactgtagcccacctttcaacagttttgggaaacaagtttgatcatggcgctgaagccattgtacctacactttttaatctcgtccccaatagtgcaaaagtcatggcaacttctggatgtgcagcaatcagatttatcattcggcatactcatgtacccagacttatacctttaataacaagcaattgcacatcaaaatcagttcccgtgaggagacgttcatttgaatttttagatttattgttgcaagagtggcagactcattcattggaaagacatgcagccgtcttggttgaaactattaaaaagggaattcatgatgctgacgctgaggccagagtggaggcaagaaagacatacatgggtcttagaaaccactttcctggtgaagctgaaacattatataattcccttgagccatcttatcagaagagtcttcaaacttacttaaagagttctggcagtgtagcatctcttccacaatcagacaggtcctcatccagctcacaggaaagtctcaatcgccctttttcttccaaatggtctacagcaaatccatcaactgtggctggaagagtatcagcaggcagcagcaaagccagttcccttccaggaagcctgcagcgttcacgaagtgacattgatgtgaatgctgctgcaggtgccaaggcacatcatgctgctggacagtctgtgcgaagggggcgcttaggtgcaggtgccctgaatgcaggttcctatgcgtcactagaggatacttctgacaagctggatggaacagcatctgaagatggccgggtgagagcaaaactttcagcaccacttgctggcatgggaaatgccaaggcagattctagaggaagaagtcgaacaaaaatggtgtctcaatcacagcctggtagccggtctgggtctccaggaagagttctgaccacaacagccctgtccactgtgagctctggtgttcaaagagtcctggtcaattcagcctcagcacaaaaaagaagcaagataccacggagccagggctgtagcagagaggctagtccatctaggctttcagtggcccgaagcagtcgtattcctcgaccaagtgtgagtcaaggatgcagccgggaagctagtcgggagagcagcagagacacaagtcctgttcgctcttttcagcccctcgcctccagacaccattccagatcaactggtgccctctacgcccccgaagtgtatggggcctcaggtccaggttatgggatcagccaatcaagtcgactgtcgtcttctgttagtgccatgcgagtcctgaacacaggttctgatgtggaggaggcggtggcagatgccttgaaaaaaccagctcgaagaagatatgaatcatatggaatgcattcagatgatgacgccaacagcgatgcatctagtgcttgttcagaacgctcctatagttctcgaaatggtagtattcctacatatatgaggcagacggaagatgtggcagaagtcctcaatagatgtgctagttccaattggtcagaaaggaaagaaggcctcctaggtctgcagaacttattaaaaaatcagagaacactaagtcgagttgaactgaaaagattatgtgaaattttcacaagaatgtttgctgaccctcatggcaagagagtattcagcatgtttttggagactctagtggatttcatacaagtccacaaagatgatcttcaagattggttgtttgtactgctgacacaactactaaaaaaaatgggtgctgatttgcttggatctgttcaggcaaaagttcagaaagcccttgatgttacaagagagtcttttccaaatgatcttcagttcaatattctaatgagatttacagttgatcagacccagacaccaagcttaaaggtgaaggttgctatccttaaatacatagaaactctggccaaacagatggatccaggagattttataaattccagtgaaactcgcctagcagtgtctcgggtcatcacttggacaacagaacccaaaagttctgatgttcggaaggcagcacagtcagtgctgatttcattatttgaactcaataccccagagtttacaatgttattaggagctttaccaaaaacttttcaggatggtgctaccaagcttcttcataatcaccttcgaaacactggcaatggaacccagagttccatggggagtcctttgacaagaccaacaccacgatcaccagctaactggtccagtcctcttacttctcctaccaatacatcacagaatactttatctccaagtgcatttgattatgacacagaaaatatgaactctgaagatatttatagctctcttagaggtgtcactgaagcaatccagaatttcagcttccgtagccaagaagatatgaatgagccattgaaaagggattctaaaaaagatgatggcgattcaatgtgtggtggtcctgggatgtctgacccaagagcaggaggtgatgctactgactcaagtcaaacagctcttgataataaagcttcattgctccattcaatgcctactcactcctctccacgctctcgagactataatccatataactattcagatagcatcagtcccttcaacaagtctgccctcaaggaagccatgtttgatgatgatgctgaccagtttcctgacgatctttccctagatcattctgacctagttgcagagttgttgaaggagctgtctaaccataatgagcgtgtagaagaaagaaaaattgccctctatgaacttatgaaactgacacaggaagaatcttttagtgtttgggatgaacacttcaaaacaatattgcttttattgcttgaaacgcttggagataaagagcctacaatcagggctttggcattaaaggttttaagagaaatcctaaggcatcaaccagcaagatttaaaaactatgcagaattgactgtcatgaaaacattggaagcacataaagatcctcataaggaggtggtgagatctgctgaggaagcggcatcagtgttggccacttcaattagtccagagcagtgcatcaaagtgctttgtcctatcattcaaactgcagactacccaattaatctggctgcaatcaaaatgcaaacaaaagtgatagagagagtgtccaaggaaaccctaaacctgcttttgccagagattatgccaggtctaatacagggttatgataattcagagagcagtgttcggaaagcttgtgtcttctgcctggtggctgttcatgcggtaattggtgatgaactaaaaccacatctcagtcaacttactggcagtaaaatgaagctactgaatctttacatcaaacgtgcacaaacaggttctggaggagctgatcccactactgatgtttctggacaaagttagtgaagctcatcacagcgaaccaggtctctcaaaagaaaggacagatagaccaccctcatcaatgaaaggaagttctcaaacacatcctttggaacttactattgtttcccagttttagttttttgtttcgtttcgttttgtattttctgtaacagaggactatcctcagtctgcatgtaacttttatgatagttattccaaattcaagaagaagcagtattaacatcaactgatcgacacaaagtaatttttaatttaattcatcatttcacatgtttgtactttgtcttcccattaacctttgccagtgttatgattgtataaatttttttaaatgctggttaaacaggaatgcttaaagctttaaaagtttaacagtctaaaacatttttgcttttattcaactgcagaataatatttttattgctactttgagttttgtttcgtatcatgtcctatgctagaaatatttaaatgatgtgaaacaaagcaggactaatttgaactacagctggactccgtttgtgtgatggtgatacatgtcattagttgcaacttctttggggtgatctatagtttgaaaactaaaacctcaaagacagatgttacagaatcagccagttctgtaaaactgatattgtctattggttattgatcttgccatctttatttaaaaccatgtcccttctatgatcccttaagaaagctgcaccaaatcatctgcctgttttttcttgatacttactgaaatagaaggttttattgcagggtttattttggtttgtttatatctttgttgtgaatgatgcttttttgtatttattaatatcaaattcacttatgaataaacttgataatggaaacggacaaaaaaaatcaagtgcgtgtgtgtccttgaccgtcttctgtttctcacgtaataaacaaattatcgagacatgggagtgaccagcaccttttctttaaatggtggaacctggtttccttttaccatgaaattgtcttacttgaaaatattgatcctgatgagagagaagatggtgccaaggctgtctttgtataatgggctcaaattctctacctcttcagggctaatacttttaactgagctgctgcctatagtgtcttttggaaaactacttaaagggtgattttctgttactttttagcaaatttttttaatcacctcttgctacacccattcttttcatgtgcagccgactcaaaaattaccagttttggtgaaaggctaaattagataatttggaaccaggatactaatgatttctcatctttacttttttttaatcctaatataaagtgaatttgattgaaaaggcaaatagctattagggaagcagtttgccattgttgcagagttatctgtactttgtttaactgaaaaaaatgtagaaatatatgtaaagaatttaagacaagagtactgaatggatgatttgtcataggctttcccctttctttctgttctagcagcaggaaaagtttctctatatcctctccctctacctgtaacaattttgttttctactgttaattacattgtgtatttatagttctatgcttactgttgtgcatatactggcaataaaactgtacataacattacttgaaaaagtt

SEQ ID NO: 1823 - protein, 1324 aa, Homo sapiens
QAEPSGAGTELYLFAVLFDLLVSESSLDHLMAMGDDKSFDDEESVDGNRPSSAASAFKVPAPKTSGNPANSARKPGSAGGPKVGGASKEGGAGAVDEDDFIKAFTDVPSIQIYSSRELEETLNKIREILSDDKHDWDQRANALKKIRSLLVAGAAQYDCFFQHLRLLDGALKLSAKDLRSQVVREACITVAHLSTVLGNKFDHGAEAIVPTLFNLVPNSAKVMATSGCAAIRFIIRHTHVPRLIPLITSNCTSKSVPVRRRSFEFLDLLLQEWQTHSLERHAAVLVETIKKGIHDADAEARVEARKTYMGLRNHFPGEAETLYNSLEPSYQKSLQTYLKSSGSVASLPQSDRSSSSSQESLNRPFSSKWSTANPSTVAGRVSAGSSKASSLPGSLQRSRSDIDVNAAAGAKAHHAAGQSVRRGRLGAGALNAGSYASLEDTSDKLDGTASEDGRVRAKLSAPLAGMGNAKADSRGRSRTKMVSQSQPGSRSGSPGRVLTTTALSTVSSGVQRVLVNSASAQKRSKIPRSQGCSREASPSRLSVARSSRIPRPSVSQGCSREASRESSRDTSPVRSFQPLASRHHSRSTGALYAPEVYGASGPGYGISQSSRLSSSVSAMRVLNTGSDVEEAVADALKKPARRRYESYGMHSDDDANSDASSACSERSYSSRNGSIPTYMRQTEDVAEVLNRCASSNWSERKEGLLGLQNLLKNQRTLSRVELKRLCEIFTRMFADPHGKRVFSMFLETLVDFIQVHKDDLQDWLFVLLTQLLKKMGADLLGSVQAKVQKALDVTRESFPNDLQFNILMRFTVDQTQTPSLKVKVAILKYIETLAKQMDPGDFINSSETRLAVSRVITWTTEPKSSDVRKAAQSVLISLFELNTPEFTMLLGALPKTFQDGATKLLHNHLRNTGNGTQSSMGSPLTRPTPRSPANWSSPLTSPTNTSQNTLSPSAFDYDTENMNSEDIYSSLRGVTEAIQNFSFRSQEDMNEPLKRDSKKDDGDSMCGGPGMSDPRAGGDATDSSQTALDNKASLLHSMPTHSSPRSRDYNPYNYSDSISPFNKSALKEAMFDDDADQFPDDLSLDHSDLVAELLKELSNHNERVEERKIALYELMKLTQEESFSVWDEHFKTILLLLLETLGDKEPTIRALALKVLREILRHQPARFKNYAELTVMKTLEAHKDPHKEVVRSAEEAASVLATSISPEQCIKVLCPIIQTADYPINLAAIKMQTKVIERVSKETLNLLLPEIMPGLIQGYDNSESSVRKACVFCLVAVHAVIGDELKPHLSQLTGSKMKLLNLYIKRAQTGSGGADPTTDVSGQS

SEQ ID NO: 1824 - DNA, 4325 bp, Homo sapiens
gccctttctgtgcggcgcccgggcgcaacgcaaacatggcggcgggtggcacccgtcggtgaggcggtgccgggcgggggttgtcgggtgtcatgggcggtggcgacggcaccgcccccgcgtctccctgagcgggacggcagggggggcttctgcgctgagccgggcgatggacgacagcggcgagctgggtggtctggagaccatggagaccctcacggagctgggcgacgagctgaccctgggagacatcgacgagatgctgcaatttgtcagtaatcaagtgggagagttccctgacttgttttcagaacagctgtgtagctcctttcctggcagtggtggtagtggtagcagcagcggcagcagtggcagcagcagcagcagcagcaatggcaggggcagcagcagcggagctgtggacccttcagtgcaacggtcattcacccaggtcacattaccttccttctctccctcggcggcctccccacaggctccaactctgcaagtcaaggtttctcccacctcagttcccaccacacccagggcaactcctattcttcagccccgcccccagccccagcctcaacctcaaactcagctgcaacaacagacggtaatgatcacgccaacattcagcaccactccgcagacgaggatcatccagcagcctttgatataccagaatgcagctactagctttcaagtccttcagcctcaagtccaaagcctggtgacatcctcccaggtacagccggtcaccattcagcagcaggtgcagacagtacaggcccagcgggtgctgacacaaacggccaatggcacgctgcagacccttgccccggctacggtgcagacagttgctgcgccacaggtgcagcaggtcccggtcctggtccagcctcagatcatcaagacagattcccttgttttgaccacactgaagacagatggcagccctgttatggctgcggtccagaacccggccctcaccgccctcaccacccctatccagacggctgcccttcaagtaccaaccctggtgggcagcagtgggaccattctgaccacaatgcctgtaatgatggggcaagagaaagtgcccattaagcaggtacctgggggagtcaagcagcttgagccccccaaagaaggagaaaggcggacaacccataatatcattgagaaacgatatcgctcctccatcaatgacaaaatcatcgaattgaaagacctggtcatggggacagacgccaagatgcacaagtctggcgttctgaggaaggccattgattacatcaaatacttgcagcaggtcaatcataaactgcgccaggagaacatggtgctgaagctggcaaatcaaaagaacaagcttctaaagggcatcgacctaggcagtctggtggacaatgaggtggacctgaagatcgaggactttaatcagaatgtccttctgatgtcccccccagcctctgactcagggtcccaggctggcttctctccctactccattgactctgagccaggaagccctctattggatgatgcaaaggtcaaagatgagccagactctcctcctgtggcgctgggcatggtagaccgctcacggattcttctgtgtgtcctcaccttcctgtgcctctcctttaaccccctgacttccctgctgcagtggggaggggcccacgactctgaccagcacccacactcaggctctggccgcagtgtcctgtcattcgagtcaggttctgggggctggtttgactggatgatgcctactcttctcttatggctggtaaatggtgtgattgtcctgagcgtctttgtgaagctgctggttcatggggagccagtgatccggccacactcgcgctcctcggtcaccttctggaggcaccggaaacaggcagatctggatctcgccagaggagattttgcagctgctgccggcaacctacaaacctgcctggcagttttgggccgggcactgcccacctcccgcctggacctggcctgcagcctctcctggaacgtgatccgctacagcctgcagaagctacgcctggtgcgctggctgctcaagaaagtcttccagtgccggcgggccacgccagccactgaggcaggctttgaagacgaagctaagaccagcgcccgggatgcggctctggcctatcaccggctgcaccagctgcacatcacagggaagcttcctgcaggatccgcctgttccgatgtacacatggcgttgtgtgccgtgaacctggctgaatgtgcagaggagaagatcccaccgagcacactggttgagatccatctgactgctgccatggggctcaagacccggtgtggaggcaagctgggcttcctggccagctacttcctcagccgagcccagagcctgtgtggccccgagcacagtgctgttcctgactccctgcgctggctctgccaccccctgggccagaagtttttcatggagcggagctggtctgtgaagtcagctgccaaggagagtctatactgtgcccagaggaacccagctgaccccattgcgcaggtccaccaggccttctgcaagaacctgctggagcgagctatagagtccttggtgaaacctcaggccaagaagaaggctggagaccaggaagaagagagctgtgaattctccagtgctctggagtacttgaaattacttcattcttttgtggactctgtgggggttatgagccccccactctccaggagctccgtgctcaagtccgccctgggtccagacatcatctgtcggtggtggacgtctgcaatcactgtggccatcagctggctccagggagacgatgcagctgtgcgctctcattttaccaaagtggaacgcatccccaaggccctggaagtgacagagagccccctggtgaaggccatcttccatgcctgcagagccatgcatgcctcactccctgggaaagcagatgggcagcagagttccttctgccattgcgagagggccagtggccacctatggagcagcctcaacgtcagtggggccacctctgaccctgccctcaaccacgtggtccagctgctcacctgtgacctgctactgtcgctacggacagcgctctggcaaaaacaggccagtgccagccaggctgtgggggagacctaccacgcgtcaggcgctgaactggcgggcttccaacgggacctgggcagcctgcgcaggctggcacacagcttccgcccagcataccgcaaggtgttcctgcatgaagccaccgtgcgcctgatggcaggagccagccccacccgcacccaccagctgctggaacacagcctgcggcggcgcaccacgcagagcaccaagcacggagaggtggatgcctggcccggccagcgagagcgggccaccgccatcctgctggcctgccgccacctgcccctctccttcctctcctccccgggccagcgggcagtgctgctggccgaagctgcccgcaccctggagaaggtgggcgaccggcgctcctgcaacgactgccagcagatgattgttaagctgggtggtggcactgccattgccgcctcctgaccaccaggctcagcccacccctccacctctctctcgatttctctctctccccctcagcatcttcccgctgagagtggtggggaagagccttgtcttcttagctgtcacctgccgaggcttctgggccactcaggccagtgcacccctgggcagagccccttaaagctgctgtcactagatgcccatggtccagggcctggtgggcgtgagaggataggtggcagggcagaaactgggcagccctgacttgatagcagcagggggagctcccaagctgccaagcccctgcctccagccttcctgagtttctctctcctgaaccctactctctcctttttgcttcctcagtttttatcaggctttctctgggggacagcagtctctgagcaccagggagcagttgccctcaggcctgtgcccagcatgccctcccctttttatacgaatgttttctaccagtgtgcttgggtttgccatgatgcgaggctgagttgctgtagcgtcttgattctctccctgggtctgcgttccctcccctgggcctgactgagcctgctcattgtttttccctttattacacaggacagccaggggaggaggggggcccagccctgggaggctggtgggaggcagggggcaggcctgcggatgcatgaaataatgttggcattattttttaattttttaaaaaataaatggtatcttatttaaaaaaaaaaaaaaaaaaaaa

SEQ ID NO: 1825 - protein, 1141 aa, Homo sapiens
MDDSGELGGLETMETLTELGDELTLGDIDEMLQFVSNQVGEFPDLFSEQLCSSFPGSGGSGSSSGSSGSSSSSSNGRGSSSGAVDPSVQRSFTQVTLPSFSPSAASPQAPTLQVKVSPTSVPTTPRATPILQPRPQPQPQPQTQLQQQTVMITPTFSTTPQTRIIQQPLIYQNAATSFQVLQPQVQSLVTSSQVQPVTIQQQVQTVQAQRVLTQTANGTLQTLAPATVQTVAAPQVQQVPVLVQPQIIKTDSLVLTTLKTDGSPVMAAVQNPALTALTTPIQTAALQVPTLVGSSGTILTTMPVMMGQEKVPIKQVPGGVKQLEPPKEGERRTTHNIIEKRYRSSINDKIIELKDLVMGTDAKMHKSGVLRKAIDYIKYLQQVNHKLRQENMVLKLANQKNKLLKGIDLGSLVDNEVDLKIEDFNQNVLLMSPPASDSGSQAGFSPYSIDSEPGSPLLDDAKVKDEPDSPPVALGMVDRSRILLCVLTFLCLSFNPLTSLLQWGGAHDSDQHPHSGSGRSVLSFESGSGGWFDWMMPTLLLWLVNGVIVLSVFVKLLVHGEPVIRPHSRSSVTFWRHRKQADLDLARGDFAAAAGNLQTCLAVLGRALPTSRLDLACSLSWNVIRYSLQKLRLVRWLLKKVFQCRRATPATEAGFEDEAKTSARDAALAYHRLHQLHITGKLPAGSACSDVHMALCAVNLAECAEEKIPPSTLVEIHLTAAMGLKTRCGGKLGFLASYFLSRAQSLCGPEHSAVPDSLRWLCHPLGQKFFMERSWSVKSAAKESLYCAQRNPADPIAQVHQAFCKNLLERAIESLVKPQAKKKAGDQEEESCEFSSALEYLKLLHSFVDSVGVMSPPLSRSSVLKSALGPDIICRWWTSAITVAISWLQGDDAAVRSHFTKVERIPKALEVTESPLVKAIFHACRAMHASLPGKADGQQSSFCHCERASGHLWSSLNVSGATSDPALNHVVQLLTCDLLLSLRTALWQKQASASQAVGETYHASGAELAGFQRDLGSLRRLAHSFRPAYRKVFLHEATVRLMAGASPTRTHQLLEHSLRRRTTQSTKHGEVDAWPGQRERATAILLACRHLPLSFLSSPGQRAVLLAEAARTLEKVGDRRSCNDCQQMIVKLGGGTAIAAS

SEQ ID NO: 1826 - DNA, 1392 bp, Homo sapiens
tttttatttaaataaggagaattctttcatatggaaagagctagtacaatcacatatttgaaaggagaaacaataggtactgaaccggagggaaagggcgagggtgagtgtgccagcaccggcctggtgaatccacgattcgatttcccatccaaggtaagtttcccaaaataccgtataaacaagctgcacattacacctctagccgtcgtctgccctttcaaatatgctggtctacatggaaagacaaagaggaaaggccaaaacataaacaaaaggaaacaaaaacaaaacacaaccctctcaggaaccaaacaaaacccccaaatccttttttactacacaaggcatgaggtcaaaagcttgagtacagtgtcccctatagatcacgggagaaaggcgtccacacagagccttagcaggaatttccactctgaggcttcagaacatgctgaagatggggctctgagggtgccactaccatcctggaggccaccaagtggggtggaaacagtgaagagcaggtctcacatgcccgaagaccaccagccaactacacattggtggccctggtggagcatggctgggcgacagcgtccatccccaacactgagccacttcctgtcctggatgacttcctgcttaggtccgtcacatttcagaagagagctggctttctggaagcctacgtttcccattcatcacagaacacgacagagtgcacacatcctggtacccttggtcttcaaaggccatttccagcagaccctctaacccaggcttgttctgcaggaagtgaaaagggacaaatgaagatttgaggggcagcctgcagctacttggcacaggggaaccaaatggcaagggagaaggctccaccagagctgccatgctgccgtagcaggccagaccacagcatggctgtgcacctgtgtgtgctcagcttccagaagctgtcactgaccatcccgaaggcagatccagaagataggagggtgacagcacggctggagagcactgatgtcaacgtttaacaaggttccccagtgtccctagaagtggctggaaggaccacagctttggaactgaactgattttcttgaatgtgaaataaagtcatcttttgttttcccccttaaggaacctagagccagagtgtctatgaattccaagtttgaaaacaatatgaatgtttaaaaaaaaaacaaaaacgctgtggggagaagccaacagttaagaaaaccaaaccaaatgcagctggcattgaagtccccagtgggtagatgggcatctgagatgtatacccacactctggacttcatcccactctagtggatggtggacaataccgcaaggccactggtggctgagcaacgaggtcgacgcggccgc

SEQ ID NO: 1827 - protein, 247 aa, Homo sapiens [sequence omitted]

SEQ ID NO: 1828 - DNA, 6237 bp, Homo sapiens
ctaagatggcgacgcctttggcggtaaattcggctgctagtctatggggtccttacaaagacatttggcataaagtgggaaatgctctttggagaagacaacctgaagctgttcaccttcttgataagattttgaagaaacacaaacctgacttcatctcattgttcaaaaatccgccaaaaaatgttcaacagcatgagaaggttcagaaagccagtacagagggagtcgccattcagggtcaacagggaactcgacttcttcctgaacagctcattaaagaagcctttattctcagtgacctttttgatattggagaattggcagctgttgagcttcttcttgctggagagcatcaacagccacattttcctggccttaccagaggattagtagctgttcttctgtactgggatggaaagcgatgcattgcgaattccttgaaagccttgatacagtctagacggggaaagacatggaccctagaactcagtccagagctggcttccatgacaacacgctttacagatgagctgatggagcaaggattgacttataaagttcttacgctggtgtcacagattgatgtgaataatgagtttgagaaactacagcgagagagaggtttgggcagtgaaaaacatcgcaaagaggtttctgatctcattaaggagtgcaggcagtctcttgcagaaagcctttttgcctgggcttgccagtcacctttaggcaaagaagacactctcctcctcattggacatttggaaagagtgacagttgaggctaatggctcactggatgcagtgaatctggctcttcttatggcgcttctatactgttttgatatcagttttatagagcaaagcacagaggaacgagatgatatgattcatcaacttccactgttgacagaaaaacagtacattgcaacaattcactctcgtcttcaggactcacagctttggaaactgcctgggctccaagccactgttagacttgcctgggcgctggcattgaggggaatatcccagctacctgatgtgacagctctggcagaattcacagaggcagatgaagcaatggcagaactcgcaattgctgacaacgttttcctgttcctcatggaatctgtagtggtatcagaatacttttatcaggaagaattttatattcgcagagtccataatctcatcacagatttccttgcacttatgccaatgaaggtgaaacagctgaggaatcgggcagatgaagatgctcgaatgattcacatgagtatgcagatgggtaatgaaccccccatttcacttagaagggacctggaacacttaatgcttttgattggcgagctatataaaaagaacccttttcatctggagcttgctctagaatattggtgtcccacagagcctcttcagactccgactatcatgggctcttatctaggggtggctcatcagcggccccctcaacgccaggttgtcttgtcaaagtttgttaggcaaatgggtgacctgttgcctccaactatttatattccttatttgaagatgctccagggattggccaatgggcctcagtgtgcccactactgtttcagcctgctcaaagtcaatggtagtagtcatgttgaaaatattcagggagcaggtggcagtcctgtttcctgggaacatttctttcactccttgatgctttaccacgaacaccttcggaaggatcttccaagtgcagatagtgtccagtaccgtcaccttccttcccgtggcatcacccagaaggagcaagatggattgattgcttttttgcagctcacgtctaccatcattacttggagtgaaaatgctcgcttggccctctgtgaacaccctcagtggacccctgttgtggtgattctgggactcctccaatgcagtattccccctgtcctaaaagctgagctactgaagacactcgcagcttttggaaaatctcctgaaattgctgcttccctctggcagtcattggaatacactcagatactgcagaccgtgaggattccaagccaaaggcaagctattggtattgaggttgaactaaatgaaatagaatcccggtgtgaagaatacccattgactcgggccttttgccagcttattagtactctggtggagagctcatttccttctaatttgggtgctggactgcggccccctggctttgacccttatttgcagttccttagagactctgtgtttctacgattccgtacaagagcttaccggagagcagctgaaaagtgggaagttgctgaggtggttttggaggtgttttataaattgctcagagattatgagcctcagcttgaagattttgtagaccagtttgtggaactacaaggagaagaaatcatagcctataagccacctggatttagtctgatgtatcatctgctgaatgagtcaccaatgttggagcttgctctcagtttactggaagaaggagttaagcagcttgacacctatgccccctttcctgggaaaaaacacctggagaaagcagtacagcattgccttgcacttctcaatcttactctgcaaaaggaaaatctttttatggaccttctaagagagagtcaactggctctaatagtctgtcctttagaacagcttttgcagggaattaatcccagaactaagaaggcagataatgtggtaaacattgccagatacctatatcatggcaatactaatccagaattggcttttgaaagtgccaagatcctctgttgtatctcttgcaactctaatattcagataaagttggttggagatttcacacatgaccagagtataagtcagaaactaatggctggatttgtggagtgtttggattgtgaagatgcagaagaatttgtacgtctggaagagggatcagaacttgaaaagaaattagttgcaattcgtcatgaaacaagaatccacatcttgaatcttctcattacctctctggaatgcaatccacccaatcttgctctctacctgttgggctttgaattgaaaaaacctgtcagtactacaaacctacaagatccaggagtgttaggttgccctcggacatgccttcacgccattctaaacatcttggagaaaggaacggaagggagaacaggcccagtggcggtgcgagaatctcctcagctggctgagctatgttaccaggtcatatatcagttatgtgcatgctctgatacatctggtcctactatgaggtacttgagaaccagccaggatttcttattttcccagttgcagtatctaccattttctaacaaagaatatgaaatatctatgctgaaccagatgtcatggcttatgaaaactgcctcaatagagctaagggtaacctctctgaatcgtcagcggtcacatacccagaggctcctacacctcttactggatgacatgccagtgaaaccatactcagatggtgaaggaggaatagaagatgaaaacaggtctgtttctgggttccttcactttgacactgctacaaaagtacgtcgaaaaattctaaatattcttgactcgattgacttcagtcaggagatccctgagcctttgcagttggatttttttgatcgggcccagattgaacaagttattgctaactgtgaacacaagaatttacggggacagacagtctgcaatgtcaagcttcttcatagggttcttgtagctgaagtaaatgcccttcagggtatggcagccataggacagagacctctactaatggaggaaatcagcactgtacttcagtatgtggtaggaagaaataaattgctgcagtgtcttcatgcaaaacgtcatgctctggagtcgtggaggcaactagtagaaattatactgacagcttgtccccaggacctcattcaggcagaggatcgacaactgattattcgtgatattttacaagatgtgcatgataagatactggatgatgaagctgcgcaagagttaatgcctgtggtcgccggggcagtgttcacactgactgctcacctaagccaggccgtcctcactgaacagaagcaaacatcagtcttgggaccagcagaggcccattacgcttttatgcttgatagttgcttcacctcacctcctcctgaagagaacccattagtgggttttgcttctattggagattcttcactttacatcatattgaagaaactgttagacttcattttgaagacaggtggtggattccaacgagtgaggactcacttgtatggctctctgctttattacttacagattgcccagagacctgatgaaccagacaccttagaagcagccaagaaaaccatgtgggaaaggctgacagcccctgaagatgtatttagcaaattacagcgagaaaacatagccattattgaaagttatggcgccgccctcatggaagtggtctgtcgagatgcttgtgatggtcatgagattggaaggatgctggccctggctctacttgatagaattgtctccgtggataaacagcagcagtggcttttgtatctttctaacagtggctacttgaaggtcctcgtagacagcttggtagaagatgaccgtactttgcagagcttactcaccccacagcctccccttttaaaagcactttatacttatgaatctaaaatggcatttctcacaagagtggcaaagatacagcagggtgcattagagctgctaagatcaggggtgattgtgagactagctcaatgccaagtctatgacatgcgcccagaaacggacccgcagagcatgtttggcatgagagaccctccaatgttcatccctaccccagtggatcgctaccgccagattctcctcccagctctccagctgtgccaggtcatcctcacatctagtatggcccagcacttgcaggcagcagggcaggtattgcagtttcttatttcacattctgataccatacaagcaattctgcgctgtcaggatgttagtgctgggtctttgcaggaattggctctgctgacaggaattataagtaaagcagcacttcctggaatattaagtgaacttgacgttgatgtaaatgaagggtctctaatggagctacagggacatattggaagattccagcgccagtgcttaggactactaagtcgctttggtggctctgacagactgcgtcagtttaaatttcaagacgataatgtggagggagataaagtaagcaagaaagatgagattgaactggctatgcagcagatttgtgccaatgtaatggaatattgccagtcactcatgttacagagttcccctaccttccagcatgctgtgtgtctcttcactcctagcctttcagaaacagttaatagagatggaccgcggcaagatacccaagctccagtggttccatactggcgcctgcctggtttaggcattatcatctacctgctgaaacagagtgctaatgatttcttcagctattatgacagtcatcgacagagtgtcagcaagctacaaaatgtagagcagcttcccccagatgagataaaagagttgtgtcagtctgtgatgcctgctggtgttgataaaatctccactgctcagaaatatgttctagcaagacggcgcttggtgaaggtgatcaacaatcgagctaaactgctttccctttgttcttttatcatagagacctgcctatttattctttggcgccatctggagtactacttgttacattgcatgcccacggattctcaagattccttatttgcctcgagaaccttgtttaaaagcagaagactgcaagattccttcgcctcagaaaccaatctagattttagaagtgggctggctatagtgagccaacatgatttagaccagcttcaggctgatgcaatcaacgcttttggagaatcactacaaaagaaacttctggacattgaaggattatattcaaaagttcgatctcgatatagtttcatacaggctcttgtcagacgtatccgtggcctcttgaggatatcaaggaactgagagcccgtgcttatgctcttctatgagagagatgaattggggagaattgtctccattttatagattagtttctttctaaattatgaccaaaaatattttgctatttctttctttgtatatggacatcttttctgtaaacttcttcccctagttccatcctcactagtaaaaaataaatactttttaaaaaaac

SEQ ID NO: 1829 - protein, 2013 aa, Homo sapiens
KMATPLAVNSAASLWGPYKDIWHKVGNALWRRQPEAVHLLDKILKKHKPDFISLFKNPPKNVQQHEKVQKASTEGVAIQGQQGTRLLPEQLIKEAFILSDLFDIGELAAVELLLAGEHQQPHFPGLTRGLVAVLLYWDGKRCIANSLKALIQSRRGKTWTLELSPELASMTTRFTDELMEQGLTYKVLTLVSQIDVNNEFEKLQRERGLGSEKHRKEVSDLIKECRQSLAESLFAWACQSPLGKEDTLLLIGHLERVTVEANGSLDAVNLALLMALLYCFDISFIEQSTEERDDMIHQLPLLTEKQYIATIHSRLQDSQLWKLPGLQATVRLAWALALRGISQLPDVTALAEFTEADEAMAELAIADNVFLFLMESVVVSEYFYQEEFYIRRVHNLITDFLALMPMKVKQLRNRADEDARMIHMSMQMGNEPPISLRRDLEHLMLLIGELYKKNPFHLELALEYWCPTEPLQTPTIMGSYLGVAHQRPPQRQVVLSKFVRQMGDLLPPTIYIPYLKMLQGLANGPQCAHYCFSLLKVNGSSHVENIQGAGGSPVSWEHFFHSLMLYHEHLRKDLPSADSVQYRHLPSRGITQKEQDGLIAFLQLTSTIITWSENARLALCEHPQWTPVVVILGLLQCSIPPVLKAELLKTLAAFGKSPEIAASLWQSLEYTQILQTVRIPSQRQAIGIEVELNEIESRCEEYPLTRAFCQLISTLVESSFPSNLGAGLRPPGFDPYLQFLRDSVFLRFRTRAYRRAAEKWEVAEVVLEVFYKLLRDYEPQLEDFVDQFVELQGEEIIAYKPPGFSLMYHLLNESPMLELALSLLEEGVKQLDTYAPFPGKKHLEKAVQHCLALLNLTLQKENLFMDLLRESQLALIVCPLEQLLQGINPRTKKADNVVNIARYLYHGNTNPELAFESAKILCCISCNSNIQIKLVGDFTHDQSISQKLMAGFVECLDCEDAEEFVRLEEGSELEKKLVAIRHETRIHILNLLITSLECNPPNLALYLLGFELKKPVSTTNLQDPGVLGCPRTCLHAILNILEKGTEGRTGPVAVRESPQLAELCYQVIYQLCACSDTSGPTMRYLRTSQDFLFSQLQYLPFSNKEYEISMLNQMSWLMKTASIELRVTSLNRQRSHTQRLLHLLLDDMPVKPYSDGEGGIEDENRSVSGFLHFDTATKVRRKILNILDSIDFSQEIPEPLQLDFFDRAQIEQVIANCEHKNLRGQTVCNVKLLHRVLVAEVNALQGMAAIGQRPLLMEEISTVLQYVVGRNKLLQCLHAKRHALESWRQLVEIILTACPQDLIQAEDRQLIIRDILQDVHDKILDDEAAQELMPVVAGAVFTLTAHLSQAVLTEQKQTSVLGPAEAHYAFMLDSCFTSPPPEENPLVGFASIGDSSLYIILKKLLDFILKTGGGFQRVRTHLYGSLLYYLQIAQRPDEPDTLEAAKKTMWERLTAPEDVFSKLQRENIAIIESYGAALMEVVCRDACDGHEIGRMLALALLDRIVSVDKQQQWLLYLSNSGYLKVLVDSLVEDDRTLQSLLTPQPPLLKALYTYESKMAFLTRVAKIQQGALELLRSGVIVRLAQCQVYDMRPETDPQSMFGMRDPPMFIPTPVDRYRQILLPALQLCQVILTSSMAQHLQAAGQVLQFLISHSDTIQAILRCQDVSAGSLQELALLTGIISKAALPGILSELDVDVNEGSLMELQGHIGRFQRQCLGLLSRFGGSDRLRQFKFQDDNVEGDKVSKKDEIELAMQQICANVMEYCQSLMLQSSPTFQHAVCLFTPSLSETVNRDGPRQDTQAPVVPYWRLPGLGIIIYLLKQSANDFFSYYDSHRQSVSKLQNVEQLPPDEIKELCQSVMPAGVDKISTAQKYVLARRRLVKVINNRAKLLSLCSFIIETCLFILWRHLEYYLLHCMPTDSQDSLFASRTLFKSRRLQDSFASETNLDFRSGLAIVSQHDLDQLQADAINAFGESLQKKLLDIEGLYSKVRSRYSFIQALVRRIRGLLRISRN

SEQ ID NO: 1830 - DNA, 4872 bp, Homo sapiens
gctgctgctggagagctgtgagaaggagaagcaggcattgctgcagaacctaaaggaagtggaagacaaggccagcgcctatgaggaccagctgcagggtcaggcacagcaggtggagaccctgcagaaggagaagctgagcgccactttcgagggcagtgagcaggtgcaccagctggaggagcagctggaggcacgagaggccagcgtgcgcaggctcgcagagcacgtgcagagcctctgtgacgagcgggacctcctcagacagcggttccaggagctgacagagcgcgtggccacgtccgacgaggatgtggctgagctccgggaaaagctgaggagaagagaggctgacaaccagagcctggagcactcctaccagagggtctccagccagctgcagagcatgcacactctgctgagagagaaggaggaagagctggagcgcattaaggaagcacatgagaaggttctggagaagaaggagcaggacctcaatgaggctttggttaaaatggttgccttggggagcagcttagaggaaacagaaattaagctccaggcaaaagaagagattttaaggaaatttgcaagtgaatctccaaaggacatggaagagccacggagtacccctgaagagacagaaagggatggcactttgctcccaggccaaccagtccaagccactagggcacctctaggcctcccacacacaaggctcgaggatgaggacgaggacctgggggctcctccgggggaagagtacggtgatggcagccccagtagggaagacagcatggtgcccccaaagtcagtggaagtgcttgacagggagggccatcagcagggcacagccaaactcgaccaaggggcacctggtgttaaaaggcaaagaatccggttctccacaatccagtgccaaagatacattcaccccgaagggtctgagaagacctggaccagcagcacatcttccgacaccagccaggaccggtcaccctcggaagaaagcatgtcctcagagcctgcacccagtgtactgcctgcaactggcgactctgacacgtacctctccatcatccactccctggagaccaagctctacgtcacagaggaaaagctcaaagacgtgaccgtgaggctggagagccagcagggtcagagccgtgaggcactgctcgcactgcaccaccagtgggcgggcaccgaggcccagctgcgtgagcagctccgcgccagcctgctccaggttggcgcactggcctcccagctggagcaggagaggcaggagagggccaggagggttgaagggcatgttggagagcttggggacttccaggtcaagaatagtcaggccctgatgtgcctggaaaattgccgagaacaactgagatctctgcctagggccagccaggaggatgagcaggacgcacgcgcagcctccctggccagtgtggagagtgcactcgtcagcgccatccaagccctgcagcactggccggccccagcccatggcggggcccgtgcacagctggagacaggtggcaccgaggagaatgggaagcctgcctccctgcagcagtgctcccagtctgagttgacagagcaggagcaggtgaggcttctttctgaccagattgctctggaggcctcgctgatcagccagatagcagattccctgaagaacacaacatcagatgtctcccgaatgctccatgagatttcttggtcaggacagccaccgatggaatctgctggggcccccgtagacacctgggccaggaaggtcctagtggatggtgagttctggagccaggttgagtctctgaggaagcacttggggacactgggaggagaggcagtcggtgcctcaggagacgggcagcaaagcatcccacagggcctggcccccatcctggccaatgccacatgggtcagggcagagctcagctttgccacacagtcagtgagggagtcgttccaccgcaggctacagagcatccaggagaccctgcggggcacccagacggccctgcggcagcacaaatgcctgctgagggaaatcctgggagcctaccaaaccccagactttgaaagagtgatgcagcaggtcttggaagccctcaggcttccagcgggccatgaagatggtgttcagctgtcctgggacctgagccccttaggagaagtcctgggccgagactcagacagctctcaggagcccttcgatgtgtctgaccagagccctggggcctttgttgctattcaggaggagcttgcccagcagctgaaggagaaggccagcctcttagaggagatagcggctgccttaccatctctgccacctgtggaatcgctgagagattgccagaagcttctccaggtgtcccagagtctctcgtataacacttgtttgggaggcctcggtcagtattcttcattgttggttcaggatgccattattcaggcccaggtttgctatgcgtcctgcagaatccggctagaatatgagaaggagctccagctctgcaaggagtcctggcaaacccgggagccctcctgctcagagcaggcacaggcagcccgggccctgagggaggagtatgaggagcttctccgcaagcagaagagcgagtacctggatgtgatcgccattgttgaaagggagaatgcagagctcaaggccaaggccgcccagctagaccatcagcagcagtgtctggaggatgcagagagcaagcacagcatgagcatgttcaccctgcggggcaggtatgaaaaggagattcggtgtgtggtggagcagctgaccaggaccgagagcacactgcaggctgagcgcagccgggtcctgagccagctggatgcctcggtcagagacaggcaggacatggagaggcatcatggtgagcagatacagaccctggaggacaggttccagctcaaggtccgggagctgcagacgatccacgaggaggagctgaggaccctgcaggagcactactcgcagagcctgaggtgccttcaggacaccctctgcctccaccaggggccacaccccaaggccctgccagcccctgcccccaactggcaggccacccagggagaggctgactccatgacggggctgagggagcgcatccaggagctggaggcccagatggatgtcatgcgggaggagctgggacacaaggacctggagggcgacgcggccacactgcgtgagaagtaccagagggacttggagagccttaaggccacgtgcgagcgagggtttgcagcaatggaagaaacgcaccagaagaagattgaagatctccagaggcagcaccagcgggagctagagaaacttcgagaagagaaagaccgcctcctagccgaggagacagcggccaccatctcagccatcgaagccatgaagaacgcccaccgggaggaaatggagcgggagctggagaagagccagcggtcccagatcagcagcgtcaactcggatgttgaggccctgcggcgccagtacctggaggagctgcagtcggtgcagcgggaactggaggtcctctcggagcagtactcgcagaagtgcctggagaatgcccatctggcccaggcgctggaggccgagcggcaggccctgcggcagtgccagcgtgagaaccaggagctcaatgcccacaaccaggagctgaacaaccgcctggctgcagagatcacacggttgcggacgctgctgactggggacggcggtggggaggccactgggtcaccccttgcacagggcaaggatgcctatgaactagaggtcttattgcgggtaaaggaatcggaaatacagtacctgaaacaggagattagctccctcaaggatgagctgcagacggcactgcgggacaagaagtacgcaagtgacaagtacaaagacatctacacagagctcagcatcgcgaaggctaaggctgactgtgacatcagcaggttgaaggagcagctcaaggctgcaacggaagcactgggggagaagtcccctgacagtgccacggtgtccggatatgatataatgaaatctaaaagcaaccctgacttcttgaagaaagacagatcctgtgtcacccggcaactcagaaacatcaggtccaagagtctgaaggaaggcctgacggtgcaagaacggttgaagctctttgaatccagggacttgaagaaagactaggtgtgtcccatccaagttgagcacgcgccttccccagcttgcagcagcacaccccaagcgctgcttttcacctgtacctttgttttattattattattattattgctgttgttgtcatcgttaactgtgggcatggaatgcgtgaggctggcttctgggttgtccacaccactctctgctgtgttgacttcctgttgtcttcatcaaagcttttttccgtggtattctaaaattaggccagcagtgggggctgggagggcatctgtgttagtcctttcctggctgtgacccgccacactcactgtcagtattaaggcccagcagcctgttgataagctaccctgtctcaccatgtgctggtgtggaaacggggcccagccagcacgcctcaaggtagatggaatccccactggtcagagaaaaagctatgcggacactccagcttggcctgggtcacagcactgactcctcacccgctagtctggctgttaagaggagaaagtgcactgccttccagcccaggaggaggacagcattttgtatttgttccactgatgcagcttagaaccacacccctgagagtcgtggcaaacctttcacaacctggaaaatgttgaaagcaaccattcctatttttgtttgttttttattaaatcttgcac

SEQ ID NO: 1831 - protein, 1402 aa, Homo sapiens
LLLESCEKEKQALLQNLKEVEDKASAYEDQLQGQAQQVETLQKEKLSATFEGSEQVHQLEEQLEAREASVRRLAEHVQSLCDERDLLRQRFQELTERVATSDEDVAELREKLRRREADNQSLEHSYQRVSSQLQSMHTLLREKEEELERIKEAHEKVLEKKEQDLNEALVKMVALGSSLEETEIKLQAKEEILRKFASESPKDMEEPRSTPEETERDGTLLPGQPVQATRAPLGLPHTRLEDEDEDLGAPPGEEYGDGSPSREDSMVPPKSVEVLDREGHQQGTAKLDQGAPGVKRQRIRFSTIQCQRYIHPEGSEKTWTSSTSSDTSQDRSPSEESMSSEPAPSVLPATGDSDTYLSIIHSLETKLYVTEEKLKDVTVRLESQQGQSREALLALHHQWAGTEAQLREQLRASLLQVGALASQLEQERQERARRVEGHVGELGDFQVKNSQALMCLENCREQLRSLPRASQEDEQDARAASLASVESALVSAIQALQHWPAPAHGGARAQLETGGTEENGKPASLQQCSQSELTEQEQVRLLSDQIALEASLISQIADSLKNTTSDVSRMLHEISWSGQPPMESAGAPVDTWARKVLVDGEFWSQVESLRKHLGTLGGEAVGASGDGQQSIPQGLAPILANATWVRAELSFATQSVRESFHRRLQSIQETLRGTQTALRQHKCLLREILGAYQTPDFERVMQQVLEALRLPAGHEDGVQLSWDLSPLGEVLGRDSDSSQEPFDVSDQSPGAFVAIQEELAQQLKEKASLLEEIAAALPSLPPVESLRDCQKLLQVSQSLSYNTCLGGLGQYSSLLVQDAIIQAQVCYASCRIRLEYEKELQLCKESWQTREPSCSEQAQAARALREEYEELLRKQKSEYLDVIAIVERENAELKAKAAQLDHQQQCLEDAESKHSMSMFTLRGRYEKEIRCVVEQLTRTESTLQAERSRVLSQLDASVRDRQDMERHHGEQIQTLEDRFQLKVRELQTIHEEELRTLQEHYSQSLRCLQDTLCLHQGPHPKALPAPAPNWQATQGEADSMTGLRERIQELEAQMDVMREELGHKDLEGDAATLREKYQRDLESLKATCERGFAAMEETHQKKIEDLQRQHQRELEKLREEKDRLLAEETAATISAIEAMKNAHREEMERELEKSQRSQISSVNSDVEALRRQYLEELQSVQRELEVLSEQYSQKCLENAHLAQALEAERQALRQCQRENQELNAHNQELNNRLAAEITRLRTLLTGDGGGEATGSPLAQGKDAYELEVLLRVKESEIQYLKQEISSLKDELQTALRDKKYASDKYKDIYTELSIAKAKADCDISRLKEQLKAATEALGEKSPDSATVSGYDIMKSKSNPDFLKKDRSCVTRQLRNIRSKSLKEGLTVQERLKLFESRDLKKD

SEQ ID NO: 1832 - DNA, 946 bp, Homo sapiens
ggcacgaggccggaggcgcggtgctcggcccgggagcgcgagcgggaggagcagagacccgcagccgggagcccgagcgcgggcgatgcaggctccgcgagcggcacctgcggctcctctaagctacgaccgtcgtctccgcggcagcagcgcgggccccagcagcctcggcagccacagccgctgcagccggggcagcctccgctgctgtcgcctcctctgatgcgcttgccctctcccggccccgggactccgggagaatgtgggtcctaggcatcgcggcaactttttgcggattgttcttgcttccaggctttgcgctgcaaatccagtgctaccagtgtgaagaattccagctgaacaacgactgctcctcccccgagttcattgtgaattgcacggtgaacgttcaagacatgtgtcagaaagaagtgatggagcaaagtgccgggatcatgtaccgcaagtcctgtgcatcatcagcggcctgtctcatcgcctctgccgggtaccagtccttctgctccccagggaaactgaactcagtttgcatcagctgctgcaacacccctctttgtaacgggccaaggcccaagaaaaggggaagttctgcctcggccctcaggccagggctccgcaccaccatcctgttcctcaaattagccctcttctcggcacactgctgaagctgaaggagatgccaccccctcctgcattgttcttccagccctcgcccccaaccccccacctccctgagtgagtttcttctgggtgtccttttattctgggtagggagcgggagtccgtgttctcttttgttcctgtgcaaataatgaaagagctcggtaaagcattctgaataaattcagcctgactgaattttcagtatgtacttgaaggaaggaggtggagtgaaagttcacccccaaaaaaaaaaaaaaaaaaa

SEQ ID NO: 1833 - protein, 141 aa, Homo sapiens
MWVLGIAATFCGLFLLPGFALQIQCYQCEEFQLNNDCSSPEFIVNCTVNVQDMCQKEVMEQSAGIMYRKSCASSAACLIASAGYQSFCSPGKLNSVCISCCNTPLCNGPRPKKRGSSASALRPGLRTTILFLKLALFSAHC

SEQ ID NO: 1834 - DNA, 336 bp, Homo sapiens
gggcttgtgcggcatcctgctccgtctgcaggttgtgcttccggtgcggaggtcatggacaaaatggtgccaccggtgcaggtctctccgctcatcaagctcggccgctactccgccctgttcctcggtgtggcctacggagccacgcgctacaattacctaaaacctcgggcagaagaggagaggaggatagcagcagaagagaagaagaagcaggatgaactgaaacggattgccagagaattggcagaagatgacagcatattaaagtgagtgaccctgcgacccactctttggaccagcagcggatgaataaagcttcctgtgttgtgtgat

SEQ ID NO: 1835 - protein, 69 aa, Homo sapiens
MVPPVQVSPLIKLGRYSALFLGVAYGATRYNYLKPRAEEERRIAAEEKKKQDELKRIARELAEDDSILK

SEQ ID NO: 1836 - DNA, 1873 bp, Homo sapiens
gacgatacgccgggcgcaggcgcagaagccgcgcccgtccgcggcgccgccagccagggcggaaacggctgcggcttcgctagggacgcatgcgcgggtcccttagttttcgcgagataacggtcgaaaacgcgctcttgtcgatttcctgtagtgaatcaggcaccggagtgcaggttcgggggtggaatccttgggccgctgggcaagcggcgagacctggccagggccagcgagccgaggacagagggcgcacggagggccgggccgcagccccggccgcttgcagaccccgccatggacccgttcctggtgctgctgcactcggtgtcgtccagcctgtcgagcagcgagctgaccgagctcaagttcctatgcctcgggcgcgtgggcaagcgcaagctggagcgcgtgcagagcggcctagacctcttctccatgctgctggagcagaacgacctggagcccgggcacaccgagctcctgcgcgagctgctcgcctccctgcggcgccacgacctgctgcggcgcgtcgacgacttcgaggcgggggcggcggccggggccgcgcctggggaagaagacctgtgtgcagcatttaacgtcatatgtgataatgtggggaaagattggagaaggctggctcgtcagctcaaagtctcagacaccaagatcgacagcatcgaggacagatacccccgcaacctgacagagcgtgtgcgggagtcactgagaatctggaagaacacagagaaggagaacgcaacagtggcccacctggtgggggctctcaggtcctgccagatgaacctggtggctgacctggtacaagaggttcagcaggcccgtgacctccagaacaggagtggggccatgtccccgatgtcatggaactcagacgcatctacctccgaagcgtcctgatgggccgctgctttgcgctggtggaccacaggcatctacacagcctggactttggttctctccaggaaggtagcccagcactgtgaagacccagcaggaagccaggctgagtgagccacagaccacctgcttctgaactcaagctgcgtttattaatgcctctcccgcaccaggccgggcttgggccctgcacagatatttccatttcttcctcactatgacactgagcaagatcttgtctccactaaatgagctcctgcgggagtagttggaaagttggaaccgtgtccagcacagaaggaatctgtgcagatgagcagtcacactgttactccacagcggaggagaccagctcagaggcccaggaatcggagcgaagcagagaggtggagaactgggatttgaacccccgccatccttcaccagagcccatgctcaaccactgtggcgttctgctgcccctgcagttggcagaaaggatgttttgtcccatttccttggaggccaccgggacagacctggacactagggtcaggcggggtgcgtggtggggagaggcatggctggggtgggggtggggagacctggttggccgtggtccagctcttggcccctgtgtgagttgagtctcctctctgagactgctaagtaggggcagtgatggttgccaggacgaattgagataatatctgtgaggtgctgatgagtgattgacacacagcactctctaaatcttccttgtgaggattatgggtcctgcaattctacagtttcttactgttttgtatcaaaatcactatctttctgataacagaattgccaaggcagcgggatctcgtatctttaaaaagcagtcctcttattcctaaggtaatcctattaaaacacagctttacaacttccatatcacaaaaaaaaaaaaaaaaaaaaaaaaaaaaaaaaaaaaaaa

SEQ ID NO: 1837 - protein, 208 aa, Homo sapiens
MDPFLVLLHSVSSSLSSSELTELKFLCLGRVGKRKLERVQSGLDLFSMLLEQNDLEPGHTELLRELLASLRRHDLLRRVDDFEAGAAAGAAPGEEDLCAAFNVICDNVGKDWRRLARQLKVSDTKIDSIEDRYPRNLTERVRESLRIWKNTEKENATVAHLVGALRSCQMNLVADLVQEVQQARDLQNRSGAMSPMSWNSDASTSEAS

SEQ ID NO: 1838 - DNA, 1314 bp, Homo sapiens
ggcacgagggtcagttcgaggcgccgccgccgccgccgcagccgccggagccgcaatgcctaaaggaggaagaaagggaggccacaaaggccgggcgaggcagtatacaagccctgaggagatcgacgcgcagctgcaggctgagaagcagaaggccagggaagaagaggagcaaaaagaaggtggagatggggctgcaggtgaccccaaaaaggagaagaaatctctagactcagatgagagtgaggatgaagaagatgactaccagcaaaagcgcaaaggcgttgaagggctcatcgacatcgagaaccccaaccgggtggcacagacaaccaaaaaggtcacacaactggatctggacgggccaaaggagctttcgaggagagaacgagaagagattgagaagcagaaggcaaaagagcgttacatgaaaatgcacttggccgggaagacagagcaagccaaggctgacctggcccggctggccatcatccggaaacagcgggaggaggctgcccggaagaaggaagaggaaaggaaagcaaaagacgatgccacattgtcaggaaaacgaatgcagtcactctccctgaataagtaactgcgacccgtgggaggagatgccggggacctgggccgcgctgccaggacctctgctgtgtctcgcccaccctgtgccctggcgccgctgcaacagcccctcatggccaggagccccccatggcctggggcctcctcttcatcttggcacagaaattgtttgggggatggggggggggactgggggaggggtagctgctatctttgagacagaaagatgcaggacagcatttcatatgtaaccatttgaatgtttttgctgtttttagaattcagagcccttgctggggggtgcctgggagatggggtaagaagagctttcatttgtctggtagatagatagcatgtaagggggtggttgtcccaggaggcagctgctgacaggtttgctacacacagccccggactgtgttgcctgggtgctcattcagagaggggctatcatctgggagcctgtgcccctgggtcctcgagggtcatggcttgtccctggtcagtcctgtctgactgacctcagggcctcacctctctgcccttccctgcccggttcctactcacctggctagggccagtgcccattttcagccctacccattgatcatttcaagaaacctctgtttactgtgtggcacccaggcaaaacatgctccacaaattcaacttgtatatttggcagattaaacttgacattatcgtaaaaaaaaaaaaaaaaaa

SEQ ID NO: 1839 - protein, 181 aa, Homo sapiens
MPKGGRKGGHKGRARQYTSPEEIDAQLQAEKQKAREEEEQKEGGDGAAGDPKKEKKSLDSDESEDEEDDYQQKRKGVEGLIDIENPNRVAQTTKKVTQLDLDGPKELSRREREEIEKQKAKERYMKMHLAGKTEQAKADLARLAIIRKQREEAARKKEEERKAKDDATLSGKRMQSLSLNK

SEQ ID NO: 1840 - DNA, 3347 bp, Homo sapiens
atcccttggaggcattcatggctgaagtggaggatcaggcagctagagacatgaagaggcttgaagaaaaggacaaggaaagaaaaaacgtaaagggtattcgagatgacattgaagaggaagatgaccaagaagcttattttcgatacatggcagaaaacccaactgctggtgtggttcaggaggaagaggaagacaatctagaatatgatagtgacggaaatccaattgcacctaccaaaaaaatcattgatcctcttccccccattgatcattcagagattgactatccaccatttgaaaaaaacttttacaatgagcatgaagagataaccaacctcactccacagcagttaatagatctccggcataagctcaatcttcgggtctctggtgctgcacctcctagaccaggaagtagctttgctcattttgggtttgacgaacaacttatgcaccagattcggaaatctgaatacacacagcccactccaatacagtgccagggtgtgcctgtggcattaagtggtagagacatgattggtattgccaaaacaggtagtgggaaaactgcagccttcatttggcccatgttgattcatataatggaccagaaggagttggaaccaggtgatggaccaattgcagtgattgtgtgtcctaccagggagctttgccagcagatccatgcagaatgtaagcggtttggaaaagcatataatcttcgatcagtggccgtatatggaggagggagtatgtgggagcaggccaaggcccttcaggagggggcagagattgttgtgtgtaccccaggtcgactgatagatcatgtgaaaaagaaagctaccaatcttcaaagagtctcttaccttgtgtttgatgaagcagatcgaatgtttgacatgggatttgagtaccaagttcgatccatagcaagtcatgttcgtcctgacaggcagactctcttatttagtgcaacttttcggaagaagattgaaaagttggccagagacatcctgatcgaccctattcgagtggtgcagggagatattggagaggcaaatgaagatgtgacacagattgtggagattctccattctggacctagtaaatggaactggcttacccggcgtctggtagaatttacctcttcagggagtgtcctcctctttgttactaaaaaagccaatgctgaagagctagcgaataaccttaaacaggagggtcataatcttgggctgctccatggggatatggatcagagtgagagaaacaaggtcatttcagactttaagaaaaaggacatcccagtcctggtggccacagatgttgcagcccgtggtctggacattccttcaattaagactgtcattaactatgatgtggcacgagacattgatacccacacgcataggattggccgcacaggaagagcgggtgagaaaggtgtggcctataccctactcactcccaaggacagcaattttgctggtgacctggtccggaacttggaaggagccaatcaacacgtttctaaggaactcctagatctggcaatgcagaatgcctggtttcggaaatctcgattcaaaggagggaaaggaaaaaagctgaacattggtggaggaggcctaggctacagggagcggcctggcctgggctctgagaacatggatcgaggaaataacaatgtaatgagcaattatgaggcctacaagccttccacaggagctatgggagatcgactaacggcaatgaaagcagctttccagtcacagtacaagagtcactttgttgcagccagtttaagtaatcagaaggctggaagttctgctgctggggcaagtgggtggactagtgcagggagcttgaattctgttccaactaactcagcacaacagggccataacagtcctgacagccccgtcaccagtgccgccaagggcatcccaggctttggcaatactggcaacatcagtggtgcccctgtgacctacccgtctgccggagcccaaggagtcaacaacacagcttcagggaataacagccgagaagggactgggggcagcaacgggaaaagagagagatatactgagaaccggggcagcagcccgtcacagtcacggagagactggcaatcggcatagcgatagtccacgtcacggagatggtggtcgccatggagatggataccgccatccagaaagcagcagccgtcatactgatggccatcggcacggggagaacagacatggaggaagcgcaggccggcatggggagaaccggggtgcaaatgatggtcggaatggggaaagcaggaaagaagcttttaatcgtgagagcaagatggagcccaagatggaacccaaagtggacagcagcaagatggacaaggtggacagcaagacagataagacagctgacggctttgctgtcccagagccgcctaaacgcaagaaaagtcgatgggacagttagaggggatgtgctaaagcgtgaaatcagttgtccttaatttttagaaagattttggtaactaggtgtctcagggctgggttggggtccaaagtgtaaggaccccctgcccttagtggagagctggagcttggagacattaccccttcatcagaaggaattttcggatgttttcttgggaagctgttttggtccttggaagcagtgagagctgggaagcttcttttggctctaggtgagttgtcatgtgggtaagttgaggttatcttgggataaagggtcttctagggcacaaaactcactctaggtttatattgtatgtagcttatattttttactaaggtgtcaccttataagcatctataaattgacttctttttcttagttgtatggccaggcagtccccattttaggagttggcttctgcaaattcaatccattgagctaactgttggggagcaatttggtagttgtagacatttgcagggaagggagatgtctgattctaaatgggagttgatgctcaggtccccagccaggtttgcatccagccctgagacatgtaggaaacacctttcagacccaggctctgaagattcccagaagccacaaggattgaagggaaaaggtgatcctggtaactgttccaggattgctccaggtttgagatggtattgctaaatttaaaattaaacaagaaacccaacaacagcttttaaagtgtcttctatctcattgtattttttttaacttgccccaatgatagaaaagtcttttgctgaaatgattttgatgatttttgtttatcgtttataaaaaggaaaagaaatatacaaactttgacttttgtgaaaaaaaaaaaaaaaaaaaaa

SEQ ID NO: 1841 - protein, 709 aa, Homo sapiens
MAEVEDQAARDMKRLEEKDKERKNVKGIRDDIEEEDDQEAYFRYMAENPTAGVVQEEEEDNLEYDSDGNPIAPTKKIIDPLPPIDHSEIDYPPFEKNFYNEHEEITNLTPQQLIDLRHKLNLRVSGAAPPRPGSSFAHFGFDEQLMHQIRKSEYTQPTPIQCQGVPVALSGRDMIGIAKTGSGKTAAFIWPMLIHIMDQKELEPGDGPIAVIVCPTRELCQQIHAECKRFGKAYNLRSVAVYGGGSMWEQAKALQEGAEIVVCTPGRLIDHVKKKATNLQRVSYLVFDEADRMFDMGFEYQVRSIASHVRPDRQTLLFSATFRKKIEKLARDILIDPIRVVQGDIGEANEDVTQIVEILHSGPSKWNWLTRRLVEFTSSGSVLLFVTKKANAEELANNLKQEGHNLGLLHGDMDQSERNKVISDFKKKDIPVLVATDVAARGLDIPSIKTVINYDVARDIDTHTHRIGRTGRAGEKGVAYTLLTPKDSNFAGDLVRNLEGANQHVSKELLDLAMQNAWFRKSRFKGGKGKKLNIGGGGLGYRERPGLGSENMDRGNNNVMSNYEAYKPSTGAMGDRLTAMKAAFQSQYKSHFVAASLSNQKAGSSAAGASGWTSAGSLNSVPTNSAQQGHNSPDSPVTSAAKGIPGFGNTGNISGAPVTYPSAGAQGVNNTASGNNSREGTGGSNGKRERYTENRGSSPSQSRRDWQSA

SEQ ID NO: 1842 - DNA, 5577 bp, Homo sapiens
ccaattagctggttatactttcttcatattttggtttttagctgaactcttgcagaggaaggatttggaatatttcattttcaacattatccctccctgattagaggtctaacttaatccttacattcggagtactcttgggggctcctagaattgcagagtcctgacattggagatcatctactcttatactgacattcccagtaaaacaaattcagatgttaactggcctgcatggggtcacacagtgagttagtggtagagcccgaatgtgaatgcaggtctggctaaacagtcagtgatggagatactatctcctatcaacctatgaggacttcagattggttttaggacaggagcaagcaatggagtcttaaagcagtgaattttgtaattcattttcacgttggttatcacagtgatttagtatttggactatagattatatggtctttgtaggcatgagaaacttattttgaccctagtacttgtagattgatatccacccaaacctctcttttttctcctcttttgtttatttaactgttttttgtctcttcaggcatacagttgtcctatgtgggccccacattcttacctgtaccctctgcaccaggcctacctggcagcctgcaggatgtacccaaaggtccctgtccctgtttatcctcataatccctggttccaagaggctcctgctgctcagaatgaaagtgattgtacctgtactgatgcccactttcctatgcagactgaggccagtgttaatggtcaaatgccacagccagagattggaccgccgacattttcttcacctctggttatccctccatctcaggtgtctgaaagtcatggacaattgtcttaccaggctgatcttgaatctgagacccctgggcagcttctgcatgctgattatgaagagtcactaagtggcaagaatatgttcccccagccatcttttggacccaatccattcttaggcccagttcctattgcacctcctttctttcctcatgtttggtatgggtacccttttcagggattcatagaaaatccagtaatgaggcagaatattgtcctgccctctgatgaaaaaggagaattggatctgtctctggaaaatctggatctgtctaaagattgtggttcagtttcaacagtagatgagtttccagaagccaggggtgaacatgtacattctctccctgaagcaagtgtgagcagtaagccggacgaaggccggacagagcaatcttcccagacacgaaaggcagatacggcattggcttccatccctcctgtagcagagggaaaggctcatcctcccactcagattctaaacagagagagagaaactgtgcctgttgaacttgaacctaaaaggaccattcaaagcctgaaagaaaaaacagaaaaagtaaaagatcctaagactgctgctgatgtggtcagccctggggccaactctgttgatagcagagtgcaaagaccaaaagaagagagttcagaagatgaaaatgaagtgtctaatattttgagaagtggtagatccaagcagttctataatcaaacttatggaagcaggaagtacaaaagtgattggggctattctggtaggggtggatatcaacatgtgagaagtgaggagtcctggaaaggacagccaagcagaagtcgggatgaaggttatcagtaccatcgaaatgtcagagggcgaccatttaggggagataggaggagatcagggatgggagatggccataggggacagcacacttgatggttgttgccgaagtattttctaacagaaactcttaggtggaatgtttctgaaggctttaaaaaaaatacaataaagtaaaaaccgcagttggaactctttcctctccccagccccccttaccttcactcccatactggacaagacattttggacatgagttcaagggggcaggttaattcctggcattgccagttttcttcattcagaatctgtttgttgatcaagtgactgtccccgtaaaaagtagaagataagtttgttaaagtattttttataaacagcttaatataaaacattatagatttagtgtttggcttttttccttataagtttataagtttgatttcagatgttggaaatgtgtgctttatagtgtttactaaagtgacaagaaaatataccatttgacacactatagattccaaacataacgttgcaccaaatagaaatgtatattttattatgcaatgccttagtcataaactgggctcaaacaattctcagcctaaaacactgttgtcttttaaaatgcttccaacccaaaggcctttcatctcaatatctgtcaaacttgaataatgtcttctctttaatattcacataaggcagcctattaactgtgtcttagcaatgttgtatatagttcttttaatattcataaggtatatttttgaattttggtatttgttgagattgcatagaagaatagtaggaaatccaatgaaatggctgtttccaccaagaattcttagcactggtgtaaatatcatggtgcctactcgaaagaaatgtagatgctatgcattttgaaaataatctgcatcagttagaactgcagaagtttttttaatgccactttaacactaatgcactgacagattctaaatattttgtgagaagaaatgttaaaaatttttagcttgacaggtttctagagttgttttcttcctcccccccccccccccccccccccccccgcaccattggttgtgtatcactttcactttacacttgcatgttctacttgtcagggctggaactattgtatagaagataatatgattgtgacttctagttcttttctagaggatgctgctagaaaatggttttgctttgtattttatagcttgttacccttaggtaggtaacatcttacattctgttttcttccagtctttgcagtattcactagaggttccctttgcatgttgcactctgttctcatttggagattgaactctgaattaacacagtattcattcatctgtgttattttgtaaaaataactgtagcttatattctttatttgtgcataccaatgtgaaaatccactcttttattatgttgagattatcttctgatcaggaagtttgagtgctatgcaaataacatagtagtaatttctctttgcatgccatgtgtaatatacctagccaaaaccagatgcggtgactttctttttttgtaaagcaaattacttaagaaaatacaattcacttgaatttgacaaactgaaacagatgggttttctgggttctctgataacctatgggaatgtttggatgccagttgggctagtgaatcgccactgtactgtaataatggttatttacctctgtgctgttttaattacctaacgtctgtgtaactgctgatttgagtagtgattagcatttagataatgtaacaggattttagagagcactttgaaagataacattttattatgatggtgctaggtaaaaaaattgtaaagactgggatggttgtgtggaaaacttttcttgagagaacctattgaaaggaatttgttgtcaccttcttaactagaatagttgttgaaggtaccgcttaagccatttttttcttaacatcggtggctcagttaaggaatgagaagatagagggtcctccactttcagctcatgcttttttatgtaggactagcttacctgattttaatgaaaatcacattttgatacaaacaccagatttgaaagttcaatgtgtttgatctcaggagtccaaaataagttgttgcttctagtgtcctgcattttattgactggggtttgatctcagcttctgaaaatgtttaaaaattggaaggaaatactactcatatcttcattgtcactttgtcttacctcaattgagtaacagaatatagctcctgaaggaaacactgatttgctttctgtttcccatatctcacctctaggatatgatggaagaagtgcttgaaagagaattttagcagatggtacttttcttagtgacctctggaataaaagaactgacttttgatagttttaaaattaatctttgcatgaaggttggtttcgctttttttcctttaagtttgtttttaaatgtattagtccaggggattttgccttatgctgaggtcaaactaaggataagcaagcttttgtccttcattttaactgttatgtcatactgttatgttgacatatttctttataagagaatagaggcaaaagtatagaactgaggatcatttgtatttttgagttggaaattatgaaacttcaccatattatgatcatacatattttgaagaacagactgaccaaagctcacctgttttttgtgttaggtgctttggctgaacttgattccagcccccttttccctttggtgttgtgtatgtctcttcatttcctctcaaatcttcaactcttgccccatgtctccttggcagcaggatgctggcatctgtgtagtcctcatactgtttactgataacccacaaattcattttcatggcagacctaagctcagaccctgccttgtcctggcaagcataggttttcccagaccacaatgctgatatatcttatttaatgcagactgtattcttgcagcgtgttgtttcctttgtgactcaaggttgaattaaaatgcctgtgaactgcaaacttgcttatgattgacttggtgcaataaagttcctttctaaccatttctggtttagaaaacattcagccatcctagaaactagcaatatttatttttgcctctttcgttttaccttcatttttagatgaggtaaatgttttgtcttttacttaagggtactaagcaaggtccactctagtgtagctgaagagaatgcatatttggctacactatttctgtttactgtattttgcttcctactttatgtctaaatgctattgtttgtttaaaatcctaataatgtctcatttccaatatgttattttcagataactaaggttttgctactaatgtcagccatttactctcccactaattgggattattttttaaaagaggtctttctccccgaaatacaagttttagaaaatcttagaagaggggtgggtgcatgtcttaatgctgggaagcggcaactttggggttgaacttacttgaatggattaaaaattgcattgtgttacagagctagaaaattttatgtatgaaaaacgataatagccttacactgagtacaaataatactttaagagcatgtgaagatgtgatcatttgtgatgttacttgtaaaaaaaagtatatatacatatcttttgaagtgttaaaaggaaactagtactttatattctttatcatatcactttttgtaagtgttgaatatattcctgtttatttttctatgttctgttttgtagccttaagaagtgtttcaaacatatctgaatgtataaaataagagtaaatgccctacatggtgtgatgctgcattatatataaaactgtgtgcatatattaaattttgtctcttg

SEQ ID NO: 1843 - protein, 401 aa, Homo sapiens
MWAPHSYLYPLHQAYLAACRMYPKVPVPVYPHNPWFQEAPAAQNESDCTCTDAHFPMQTEASVNGQMPQPEIGPPTFSSPLVIPPSQVSESHGQLSYQADLESETPGQLLHADYEESLSGKNMFPQPSFGPNPFLGPVPIAPPFFPHVWYGYPFQGFIENPVMRQNIVLPSDEKGELDLSLENLDLSKDCGSVSTVDEFPEARGEHVHSLPEASVSSKPDEGRTEQSSQTRKADTALASIPPVAEGKAHPPTQILNRERETVPVELEPKRTIQSLKEKTEKVKDPKTAADVVSPGANSVDSRVQRPKEESSEDENEVSNILRSGRSKQFYNQTYGSRKYKSDWGYSGRGGYQHVRSEESWKGQPSRSRDEGYQYHRNVRGRPFRGDRRRSGMGDGHRGQHT

SEQ ID NO: 1844 - DNA, 2045 bp, Homo sapiens
ggcacgaggcacttccgggtagtgctccacgggcacgagccgcgattgggctaccgtagatggggtacttccggtgtgcaggtgctgggtccttcggcaggaggaggaagatggagcccagcaccgcggcccgggcttgggccctcttttggttgctgctgcccttgcttggcgcggtttgcgccagcggaccccgcaccttagtgctgctggacaacctcaacgtgcgggagactcattcgcttttcttccggagcctgaaggaccggggctttgagctcacattcaagaccgctgatgaccccagcctgtctctcataaagtatggggaattcctctatgacaatctcatcattttctccccttcggtagaagattttggaggcaacatcaacgtggagaccatcagtgcctttattgacggtggaggcagtgtgctggtagctgccagctccgacattggtgaccctcttcgagagctgggcagtgagtgcgggattgagtttgacgaggagaaaacggctgtcattgaccatcacaactatgacatctcagaccttggccagcatacgctcatcgtggctgacactgagaacctgctgaaggccccaaccatcgttgggaaatcatctctaaatcccatcctctttcgaggtgttgggatggtggccgatcctgataaccctttggtgctggacatcctgacgggctcttccacctcttactccttcttcccggacaagcctatcacccagtatccacatgcggtggggaagaacaccctcctcattgctgggctccaggccaggaacaatgcccgcgtcatcttcagcggctccctcgacttcttcagcgactccttcttcaactcagcagtgcagaaggcggcgcccggctcccagaggtattcccagacaggcaactatgaactagctgtggccctctcccgctgggtgttcaaggaggagggtgtcctccgtgtggggcctgtgtcccatcatcgggtgggtgagacagccccacccaatgcctacactgtcactgacctagtggagtatagcatcgtgatccagcagctctcaaatggcaaatgggtcccctttgatggcgatgacattcagctggagtttgtccgcattgatccttttgtgaggaccttcctgaagaagaaaggtggcaaatacagtgttcagttcaagttgcccgacgtgtatggtgtattccagtttaaagtggattacaaccggctaggctacacacacctgtactcttccactcaggtatccgtgcggccactccagcacacgcagtatgagcgcttcatcccctcggcctacccctactacgccagcgccttctccatgatgctggggctcttcatcttcagcatcgtcttcttgcacatgaaggagaaggagaagtccgactgaggggctagagccctctccgcacagcgtggagacggggcagggaggggggttattaggattggtggttttgttttgctttgtttaaagccgtgggaaaatggcacaactttacctctgtgggagatgcaacactgagagccaaggggtgggagttgggataatttttatataaaagaagtttttccactttgaattgctaaaagtggcatttttcctatgtgcagtcactcctctcatttctaaaatagggacgtggccaggcacggtggctcatgcctgtaatcccagcactttgggaggccgaggcaggcggctcacgaggtcaggagatcgagactatcctggctaacacggtaaaaccctgtctctactaaaagtacaaaaaattagctgggcgtggtggtgggcacctgtagtcccagctactcgggaggctgaggcaggagaaaggcatgaatccaggaggcagagcttgcagtgagctgagatcacgccattgcactccagcctgggcaacagtgttaagactctgtctcaaatataaataaataaataaataaataaaaataaagcgagatgttgccctcaaaaaaaaaaaaaaaaaaaaaaaaaaaa

SEQ ID NO: 1845 - protein, 456 aa, Homo sapiens
MGYFRCAGAGSFGRRRKMEPSTAARAWALFWLLLPLLGAVCASGPRTLVLLDNLNVRETHSLFFRSLKDRGFELTFKTADDPSLSLIKYGEFLYDNLIIFSPSVEDFGGNINVETISAFIDGGGSVLVAASSDIGDPLRELGSECGIEFDEEKTAVIDHHNYDISDLGQHTLIVADTENLLKAPTIVGKSSLNPILFRGVGMVADPDNPLVLDILTGSSTSYSFFPDKPITQYPHAVGKNTLLIAGLQARNNARVIFSGSLDFFSDSFFNSAVQKAAPGSQRYSQTGNYELAVALSRWVFKEEGVLRVGPVSHHRVGETAPPNAYTVTDLVEYSIVIQQLSNGKWVPFDGDDIQLEFVRIDPFVRTFLKKKGGKYSVQFKLPDVYGVFQFKVDYNRLGYTHLYSSTQVSVRPLQHTQYERFIPSAYPYYASAFSMMLGLFIFSIVFLHMKEKEKSD

SEQ ID NO: 1846 - DNA, 3097 bp, Homo sapiens
gccagacaaagcccgagatggcgaagcggagcgacggctaatggcgagccccacgcgccgcgctccgcccgccccgctccggtgaggtggctttgaccccgggttgcccggccagcacgaccgaggaggtggctggacagctggaggatgaacggagaagccgactgccccacagacctggaaatggccgcccccaaaggccaagaccgttggtcccaggaagacatgctgactttgctggaatgcatgaagaacaaccttccatccaatgacagctccaagttcaaaaccaccgaatcacacatggactgggaaaaagtagcatttaaagacttttctggagacatgtgcaagctcaaatgggtggagatttctaatgaggtgaggaagttccgtacattgacagaattgatcctcgatgctcaggaacatgttaaaaatccttacaaaggcaaaaaactcaagaaacacccagacttcccaaagaagcccctgaccccttatttccgcttcttcatggagaagcgggccaagtatgcgaaactccaccctgagatgagcaacctggacctaaccaagattctgtccaagaaatacaaggagcttccggagaagaagaagatgaaatatattcaggacttccagagagagaaacaggagttcgagcgaaacctggcccgattcagggaggatcaccccgacctaatccagaatgccaagaaatcggacatcccagagaagcccaaaaccccccagcagctgtggtacacccacgagaagaaggtgtatctcaaagtgcggccagatgccactacgaaggaggtgaaggactccctggggaagcagtggtctcagctctcggacaaaaagaggctgaaatggattcataaggccctggagcagcggaaggagtacgaggagatcatgagagactatatccagaagcacccagagctgaacatcagtgaggagggtatcaccaagtccaccctcaccaaggccgaacgccagctcaaggacaagtttgacgggcgacccaccaagccacctccgaacagctactcgctgtactgcgcagagctcatggccaacatgaaggacgtgcccagcacagagcgcatggtgctgtgcagccagcagtggaagctgctgtcccagaaggagaaggacgcctatcacaagaagtgtgatcagaaaaagaaagattacgaggtggagctgctccgtttcctcgagagcctgcctgaggaggagcagcagcgggtcttgggggaagagaagatgctgaacatcaacaagaagcaggccaccagccccgcctccaagaagccagcccaggaagggggcaagggcggctccgagaagcccaagcggcccgtgtcggccatgttcatcttctcggaggagaaacggcggcagctgcaggaggagcggcctgagctctccgagagcgagctgacccgcctgctggcccgaatgtggaacgacctgtctgagaagaagaaggccaagtacaaggcccgagaggcggcgctcaaggctcagtcggagaggaagcccggcggggagcgcgaggaacggggcaagctgcccgagtcccccaaaagagctgaggagatctggcaacagagcgttatcggcgactacctggcccgcttcaagaatgaccgggtgaaggccttgaaagccatggaaatgacctggaataacatggaaaagaaggagaaactgatgtggattaagaaggcagccgaagaccaaaagcgatatgagagagagctgagtgagatgcgggcacctccagctgctacaaattcttccaagaagatgaaattccagggagaacccaagaagcctcccatgaacggttaccagaagttctcccaggagctgctgtccaatggggagctgaaccacctgccgctgaaggagcgcatggtggagatcggcagtcgctggcagcgcatctcccagagccagaaggagcactacaaaaagctggccgaggagcagcaaaagcagtacaaggtgcacctggacctctgggttaagagcctgtctccccaggaccgtgcagcatataaagagtacatctccaataaacgtaagagcatgaccaagctgcgaggcccaaaccccaaatccagccggactactctgcagtccaagtcggagtccgaggaggatgatgaagaggatgaggatgacgaggacgaggatgaagaagaggaagatgatgagaatggggactcctctgaagatggcggcgactcctctgagtccagcagcgaggacgagagcgaggatggggatgagaatgaagaggatgacgaggacgaagacgacgacgaggatgacgatgaggatgaagataatgagtccgagggcagcagctccagctcctcctcctcaggggactcctcagactctgactccaactgaggctcagccccaccccagggcagccagggagagcccaggagctcccctccccaactgaccacctttgtttctcccccatgttctgtcccttgcccccctggcctcccccactttctttctttctttaaaaaaaaaaaaaaaaatacggtgggggtagggggctggaggagcccaggccaggactctgcagcctcagagacatcagcccttgggggtcctcctccagggacagcaactatcagactaagccagcaccggaccagcctggcccaccccacccacttctgcacttgcggttccggcatggacaatggaccggagagtgggggtggggggtcccaaagagtttgatgaggccctccacacctgcggcccaatccaaggtggggtggaagcttggggaagacccattccttcccagaggggcctgccacctggacccctgcattggaactggaggcagggaacatggggaggaggagggtcggtgccttcaagaaaacaggcactgccctggtggccctctcccctgccccctgcaggaaggagctgcctggacccgttcatgggggagggggcagaagtgttttttatatatgtgtatatatttttttttaagctctgagctgtcaacgagacgtttcctaccgaaaaa

SEQ ID NO: 1847 - protein, 764 aa, Homo sapiens
MNGEADCPTDLEMAAPKGQDRWSQEDMLTLLECMKNNLPSNDSSKFKTTESHMDWEKVAFKDFSGDMCKLKWVEISNEVRKFRTLTELILDAQEHVKNPYKGKKLKKHPDFPKKPLTPYFRFFMEKRAKYAKLHPEMSNLDLTKILSKKYKELPEKKKMKYIQDFQREKQEFERNLARFREDHPDLIQNAKKSDIPEKPKTPQQLWYTHEKKVYLKVRPDATTKEVKDSLGKQWSQLSDKKRLKWIHKALEQRKEYEEIMRDYIQKHPELNISEEGITKSTLTKAERQLKDKFDGRPTKPPPNSYSLYCAELMANMKDVPSTERMVLCSQQWKLLSQKEKDAYHKKCDQKKKDYEVELLRFLESLPEEEQQRVLGEEKMLNINKKQATSPASKKPAQEGGKGGSEKPKRPVSAMFIFSEEKRRQLQEERPELSESELTRLLARMWNDLSEKKKAKYKAREAALKAQSERKPGGEREERGKLPESPKRAEEIWQQSVIGDYLARFKNDRVKALKAMEMTWNNMEKKEKLMWIKKAAEDQKRYERELSEMRAPPAATNSSKKMKFQGEPKKPPMNGYQKFSQELLSNGELNHLPLKERMVEIGSRWQRISQSQKEHYKKLAEEQQKQYKVHLDLWVKSLSPQDRAAYKEYISNKRKSMTKLRGPNPKSSRTTLQSKSESEEDDEEDEDDEDEDEEEEDDENGDSSEDGGDSSESSSEDESEDGDENEEDDEDEDDDEDDDEDEDNESEGSSSSSSSSGDSSDSDSN

SEQ ID NO: 1848 - DNA, 1390 bp, Homo sapiens
ccgatggcgtccgcctcaggggccatggcgaagcacgagcagatcctggtcctcgatccgcccacagacctcaaattcaaaggccccttcacagatgtagtcactacaaatcttaaattgcgaaatccatcggatagaaaagtgtgtttcaaagtgaagactacagcacctcgccggtactgtgtgaggcccaacagtggaattattgacccagggtcaactgtgactgtttcagtaatgctacagccctttgactatgatccgaatgaaaagagtaaacacaagtttatggtacagacaatttttgctccaccaaacacttcagatatggaagctgtgtggaaagaggcaaaacctgatgaattaatggattccaaattgagatgcgtatttgaaatgcccaatgaaaatgataaattgaatgatatggaacctagcaaagctgttccactgaatgcatctaagcaagatggacctatgccaaaaccacacagtgtttcacttaatgataccgaaacaaggaaactaatggaagagtgtaaaagacttcagggagaaatgatgaagctatcagaagaaaatcggcacctgagagatgaaggcttaaggctcagaaaggtagcacattcggataaacctggatcaacctcaactgcatccttcagagataatgtcaccagtcctcttccttcacttcttgttgtaattgcagccattttcattggattctttctagggaaattcatcttgtagagtgaagcatgcagagtgctgtttctttttttttttctcttgaccagaaaaagatttgtttacctaccatttcattggtagtatggcccacggtgaccatttttttgtgtgtacagcgtcatataggctttgcctttaatgatctcttacggttagaaaacacaataaaaacaaactgttcggctactggacaggttgtatattaccagatcatcactagcagatgtcagttgcacattgagtcctttatgaaattcataaataaagaattgttctttgtttgtggttttaataagagttcaagaattgttcagagtcttgtaaatgttattttaataatccctttaaattttatctgttgctgttacctcttgaaatatgatttatttagattgctaatcccactcattcaggaaatgccaagaggtattccttggggaaatggtgcctcttacagtgtaaatttttcctcctttacctttgtaatatcatggcagaatttttcttatcccttgtgaggcagttgttgaatgagtttttcatccttacaatcctgtcccatggtatttaacataaaaaaaaataaaactgttaacagattcttgctcgataaaaaaaaaaaaaaaaaaaaaaaaaa

SEQ ID NO: 1849 - protein, 242 aa, Homo sapiens
MAKHEQILVLDPPTDLKFKGPFTDVVTTNLKLRNPSDRKVCFKVKTTAPRRYCVRPNSGIIDPGSTVTVSVMLQPFDYDPNEKSKHKFMVQTIFAPPNTSDMEAVWKEAKPDELMDSKLRCVFEMPNENDKLNDMEPSKAVPLNASKQDGPMPKPHSVSLNDTETRKLMEECKRLQGEMMKLSEENRHLRDEGLRLRKVAHSDKPGSTSTASFRDNVTSPLPSLLVVIAAIFIGFFLGKFIL

SEQ ID NO: 1850 - DNA, 3686 bp, Homo sapiens
gcggccgccccggctcccggctgcaggaatcgcgccaggacgctggccccgctcgcggctagcttgcacgccagggcacagcgaggatgggagggtcgcagtccctgcagccagccccagccagcgacctgaacctggaggcttccgaggcaatgagttccgattctgaagaggcatttgagaccccggagtcaacgacccctgtcaaagctccgccagctccacccccaccaccccccgaagtcatcccagaacccgaggtcagcacacagccacccccggaagaaccaggatgtggttctgagacagtccctgtccctgatggcccacggagcgactcggtggaaggaagtcccttccgtcccccgtcacactccttctctgccgtcttcgatgaagacaagccgatagccagcagtgggacttacaacttggactttgacaacattgagcttgtggatacctttcagaccttggagcctcgtgcctcagacgctaagaatcaggagggcaaagtgaacacacggaggaagtccacggattccgtccccatctctaagtctacactgtcccggtcgctcagcctgcaagccagtgactttgatggtgcttcttcctcaggcaatcccgaggccgtggcccttgccccagatgcatatagcacgggttccagcagtgcttctagtacccttaagcgaactaaaaaaccgaggccgccttccttaaaaaagaaacagaccaccaagaaacccacagagacccccccagtgaaggagacgcaacaggagccagatgaagagagccttgtccccagtggggagaatctagcatctgagacgaaaacggaatctgccaagacggaaggtcctagcccagccttattggaggagacgccccttgagcccgctgtggggcccaaagctgcctgccctctggactcagagagtgcagaaggggttgtccccccggcttctggaggtggcagagtgcagaactcaccccctgtcgggaggaaaacgctgcctcttaccacggccccggaggcaggggaggtaaccccatcggatagcggggggcaagaggactctccagccaaagggctctccgtaaggctggagtttgactattctgaggacaagagtagttgggacaaccagcaggaaaacccccctcctaccaaaaagataggcaaaaagccagttgccaaaatgcccctgaggaggccaaagatgaaaaagacacccgagaaacttgacaacactcctgcctcacctcccagatcccctgctgaacccaatgacatccccattgctaaaggtacttacacctttgatattgacaagtgggatgaccccaattttaaccctttttcttccacctcaaaaatgcaggagtctcccaaactgccccaacaatcatacaactttgacccagacacctgtgatgagtccgttgacccctttaagacatcctctaagacccccagctcaccttctaaatccccagcctcctttgagatcccagccagtgctatggaagccaatggagtggacggggatgggctaaacaagcccgccaagaagaagaagacgcccctaaagactgacacatttagggtgaaaaagtcgccaaaacggtctcctctctctgatccaccttcccaggaccccaccccagctgctacaccagaaacaccaccagtgatctctgcggtggtccacgccacagatgaggaaaagctggcggtcaccaaccagaagtggacgtgcatgacagtggacctagaggctgacaaacaggactacccgcagccctcggacctgtccacctttgtaaacgagaccaaattcagttcacccactgaggagttggattacagaaactcctatgaaattgaatatatggagaaaattggctcctccttacctcaggacgacgatgccccgaagaagcaggccttgtaccttatgtttgacacttctcaggagagccctgtcaagtcatctcccgtccgcatgtcagagtccccgacgccgtgttcagggtcaagttttgaagagactgaagcccttgtgaacactgctgcgaaaaaccagcatcctgtcccacgaggactggcccctaaccaagagtcacacttgcaggtgccagagaaatcctcccagaaggagctggaggccatgggcttgggcaccccttcagaagcgattgaaattacagctcccgagggctcctttgcctctgctgacgccctcctcagcaggctagctcaccccgtctctctctgtggtgcacttgactatctggagcccgacttagcagaaaagaaccccccactattcgctcagaaactccaggaggagttagagtttgccatcatgcggatagaagccctgaagctggccaggcagattgctttggcttcccgcagccaccaggatgccaagagagaggctgctcacccaacagacgtctccatctccaaaacagccttgtactcccgcatcgggaccgctgaggtggagaaacctgcaggccttctgttccagcagcccgacctggactctgccctccagatcgccagagcagagatcataaccaaggagagagaggtctcagaatggaaagataaatatgaagaaagcaggcgggaagtgatggaaatgaggaaaatagtggccgagtatgagaagaccatcgctcagatgatagaggacgaacagagagagaagtcagtctcccaccagacggtgcagcagctggttctggagaaggagcaagccctggccgacctgaactccgtggagaagtctctggccgacctcttcagaagatatgagaagatgaaggaggtcctagaaggcttccgcaagaatgaagaggtgttgaagagatgtgcgcaggagtacctgtcccgggtgaagaaggaggagcagaggtaccaggccctgaaggtgcacgcggaggagaaactggacagggccaatgctgagattgctcaggttcgaggcaaggcccagcaggagcaagccgcccaccaggccagcctgcggaaggagcagctgcgagtggacgccctggaaaggacgctggagcagaagaataaagaaatagaagaactcaccaagatttgtgacgaactgattgccaaaatggggaaaagctaactctgaaccgaatgttttggacttaactgttgcggcaatatgaccgtcggcacactgctgttcctccagttccatggacaggttctgttttcactttttcgtatgcactactgtatttcctttctaaataaaattgatttgattgtatgcagtactaaggagactatcagaatttcttgctattggtttgcattttcctagtataattcatagcaagttgacctcagagttcctgtatcagggagattgtctgattctctaataaaagacacattgctgaccttggccttgccctttgtacacaagttcccagggtgagcagcttttggatttaatatgaacatgtacagcgtgcatagggactcttgccttaaggagtgtaaacttgatctgcatttgctgatttgtttttaaaaaaacaagaaatgcatgtttcaaataaaattctctattgtaaataaaattttttctttggatcttgaaaaaaaaaaaaaaaaaaaaaaaaaaaaaaaaaaaaaa

SEQ ID NO: 1851 - protein, 1026 aa, Homo sapiens
MGGSQSLQPAPASDLNLEASEAMSSDSEEAFETPESTTPVKAPPAPPPPPPEVIPEPEVSTQPPPEEPGCGSETVPVPDGPRSDSVEGSPFRPPSHSFSAVFDEDKPIASSGTYNLDFDNIELVDTFQTLEPRASDAKNQEGKVNTRRKSTDSVPISKSTLSRSLSLQASDFDGASSSGNPEAVALAPDAYSTGSSSASSTLKRTKKPRPPSLKKKQTTKKPTETPPVKETQQEPDEESLVPSGENLASETKTESAKTEGPSPALLEETPLEPAVGPKAACPLDSESAEGVVPPASGGGRVQNSPPVGRKTLPLTTAPEAGEVTPSDSGGQEDSPAKGLSVRLEFDYSEDKSSWDNQQENPPPTKKIGKKPVAKMPLRRPKMKKTPEKLDNTPASPPRSPAEPNDIPIAKGTYTFDIDKWDDPNFNPFSSTSKMQESPKLPQQSYNFDPDTCDESVDPFKTSSKTPSSPSKSPASFEIPASAMEANGVDGDGLNKPAKKKKTPLKTDTFRVKKSPKRSPLSDPPSQDPTPAATPETPPVISAVVHATDEEKLAVTNQKWTCMTVDLEADKQDYPQPSDLSTFVNETKFSSPTEELDYRNSYEIEYMEKIGSSLPQDDDAPKKQALYLMFDTSQESPVKSSPVRMSESPTPCSGSSFEETEALVNTAAKNQHPVPRGLAPNQESHLQVPEKSSQKELEAMGLGTPSEAIEITAPEGSFASADALLSRLAHPVSLCGALDYLEPDLAEKNPPLFAQKLQEELEFAIMRIEALKLARQIALASRSHQDAKREAAHPTDVSISKTALYSRIGTAEVEKPAGLLFQQPDLDSALQIARAEIITKEREVSEWKDKYEESRREVMEMRKIVAEYEKTIAQMIEDEQREKSVSHQTVQQLVLEKEQALADLNSVEKSLADLFRRYEKMKEVLEGFRKNEEVLKRCAQEYLSRVKKEEQRYQALKVHAEEKLDRANAEIAQVRGKAQQEQAAHQASLRKEQLRVDALERTLEQKNKEIEELTKICDELIAKMGKS

SEQ ID NO: 1852 - DNA, 2547 bp, Homo sapiens
accgctacacatgcgccttgcaaggaagggcgagatttcgggggcggggcggggggcgggcctaggccggggtctcacagcgactgcgcggacgggttcctgagtggaacatggcgacttgcgccgaaatcctgcggagcgagttccccgaaattgacggacaggtcttcgactacgtgaccggcgtcttgcacagcggcagcgcggacttcgagtctgtggatgacctggtggaagctgtaggggaactattgcaagaggtgtccggggacagcaaggatgacgcgggcatcagggccgtgtgccagcgcatgtacaacactctgcgtctggctgagccacaaagccagggaaatagccaggtgctactggacgcccctatccagttgtcaaagataacggagaactacgactgtggaaccaaacttccaggactgctaaagagggaacagtcctcgacagtgaatgcaaagaagttagagaaggccgaggctcgacttaaggcaaagcaggagaagcgctcagagaaggacacgctcaagaccagcaaccctctagtcttagaagaggcatcagccagccaggcaggcagcagaaaggagagtcggttggaatcatctggcaagaacaaatcctatgatgtgcgaattgagaactttgatgtgtcttttggcgatagagtactgctggctggagcggatgtgaacctggcatggggccgccgttacgggctggtggggcggaatgggttggggaagacaacgttactgaagatgctggccacccggagtctgcgggttccagcccacatttccctgctgcacgttgagcaagaggttgctggagatgacactcctgccctgcagagtgtgctggagagtgacagtgtgcgagaggatttgctacggagggagcgggagctcactgcccagattgctgctggcagggcggagggctctgaagctgcagagctggcagaaatctatgccaaactggaggagattgaggctgacaaggcacctgccagggcatcagtcattctcgctgggcttggctttacccctaaaatgcagcagcagcccacccgggagttctcaggtggctggaggatgaggctggccctggcccgggccctctttgctaggccagatcttctgctgttagatgaacctacaaacatgctggatgtcagggccatcctgtggctggagaattacctgcagacgtggccctccaccatcctagtcgtctcccacgaccgcaacttcttgaatgccatcgccacagacatcatccacctgcacagccagcggctagatggttaccggggagactttgagaccttcatcaagagtaagcaggagcggctgctcaaccagcagcgtgaatatgaggcgcagcagcagtatcgccagcacatccaggttttcattgaccggtttcgctacaatgccaacagggcctctcaagtgcagagtaaactcaagatgctggagaagctgcctgagctgaggcctgtggacaaggaatcagaggtcgtaatgaagttccctgatgggtttgagaagttctcgccgccaattctgcagctagatgaggtggatttctactacgatccgaagcacgtcatcttcagtcgcctctctgtgtctgctgatctcgagtctcgcatctgtgtggttggagagaatggggctgggaagtctaccatgctgaagctgcttttgggggacctggcacctgttcggggcatcagacacgctcacaggaatctgaagattggctatttcagccagcaccatgtggagcagctggacctaaacgtcagtgctgtggaactgctggcacgcaagtttcctgggcggcctgaggaggagtaccgtcaccagctgggtcggtatggcatctccggagaactggccatgcgtcctcttgccagcctgtctgggggccagaagagccgagtggcctttgctcagatgactatgccctgccccaacttctacattctggatgaacccacaaaccacctggacatggagaccattgaggctctgggccgtgccctcaacaatttcaggggtggtgtgattctggtgtcccacgatgagcgctttatcaggctggtgtgccgggagttgtgggtgtgcgaaggaggcggcgtcacccgtgtggaaggaggatttgaccagtaccgcgccctcctccaggaacagttccgccgcgaaggcttcctctagggccaccaggctgaggactcgcccaggacatggactggtctctcagacccctgggccaccatgtaggccaccactccaggccgtggacttcccccaacttggggacagccttattcccaaatgtctctatccttttgactggagcatcttctgcacaaccttgggagcccatccaagggttggtgaggactggtctcccgggggtgggggtctggggggtaccctctggggttatagattcccccactgccccagctctgactggaccccaagtggctgctatgtaaattaaatctctccccgcgtc

SEQ ID NO: 1853 - protein, 709 aa, Homo sapiens
MATCAEILRSEFPEIDGQVFDYVTGVLHSGSADFESVDDLVEAVGELLQEVSGDSKDDAGIRAVCQRMYNTLRLAEPQSQGNSQVLLDAPIQLSKITENYDCGTKLPGLLKREQSSTVNAKKLEKAEARLKAKQEKRSEKDTLKTSNPLVLEEASASQAGSRKESRLESSGKNKSYDVRIENFDVSFGDRVLLAGADVNLAWGRRYGLVGRNGLGKTTLLKMLATRSLRVPAHISLLHVEQEVAGDDTPALQSVLESDSVREDLLRRERELTAQIAAGRAEGSEAAELAEIYAKLEEIEADKAPARASVILAGLGFTPKMQQQPTREFSGGWRMRLALARALFARPDLLLLDEPTNMLDVRAILWLENYLQTWPSTILVVSHDRNFLNAIATDIIHLHSQRLDGYRGDFETFIKSKQERLLNQQREYEAQQQYRQHIQVFIDRFRYNANRASQVQSKLKMLEKLPELRPVDKESEVVMKFPDGFEKFSPPILQLDEVDFYYDPKHVIFSRLSVSADLESRICVVGENGAGKSTMLKLLLGDLAPVRGIRHAHRNLKIGYFSQHHVEQLDLNVSAVELLARKFPGRPEEEYRHQLGRYGISGELAMRPLASLSGGQKSRVAFAQMTMPCPNFYILDEPTNHLDMETIEALGRALNNFRGGVILVSHDERFIRLVCRELWVCEGGGVTRVEGGFDQYRALLQEQFRREGFL

SEQ ID NO: 1854 - DNA, 1666 bp, Homo sapiens
gatccctccgctctggggaggcagcgctggcggcggggctggggccactgaggaaatccatccgcgccgccgccgccgccgccgccgccgccgccgcctccgccgcggaggaagacagcgccgcccgcgcaccgccagcgacccccgccgcagagtcccaccgccacaggcctcgggccagcggccaggagctgcctcccccagcccccgtcccgcggcccccagccgcccccaaccctgccccacgggcccggcgccatgagtgagctggagcaactgagacaggaggccgagcagctccggaaccagatccgggatgcccgaaaagcatgtggggactcaacactgacccagatcacagctgggctggacccagtggggagaatccagatgaggacccggaggaccctccgtgggcacctggcaaagatctatgccatgcactgggggaccgactcaaggctgctggtcagcgcctcccaggatgggaagctcatcatctgggacagctacaccaccaacaaggtccacgccatcccgctgcgctcctcctgggtaatgacctgtgcctacgcgccctcagggaactttgtggcctgtggggggttggacaacatctgctccatctacagcctcaagacccgcgagggcaacgtcagggtcagccgggagctgcctggccacactgggtacctgtcgtgttgccgcttcctggatgacaaccaaatcatcaccagctctggggataccacctgtgccctgtgggacattgagacaggccagcagacagtgggttttgctggacacagtggggatgtgatgtccctgtccctggcccccgatggccgcacgtttgtgtcaggcgcctgtgatgcctctatcaagctgtgggacgtgcgggattccatgtgccgacagaccttcatcggccatgaatccgacatcaatgcagtggctttcttccccaacggctacgccttcaccaccggctctgacgacgccacgtgccgcctcttcgacctgcgggccgatcaggagctcctcatgtactcccatgacaacatcatctgtggcatcacctctgttgccttctcgcgcagcggacggctgctgctcgctggctacgacgacttcaactgcaacatctgggatgccatgaagggcgaccgtgcaggagtcctcgctggccacgacaaccgcgtgagctgcctcggggtcaccgacgatggcatggctgtggccacgggctcctgggactccttcctcaagatctggaactaatggccccacccccactgggcccaggccaggaggggccctgcccatgcccacactacaggccagggctgcggggctggcgcaatcccagcccccttccccgggccacggggccttgggtccctgccctcccacccaggtttggttcctcccggggcccccactgtggagataagaaggggatggaatgggggaagaggaggagcaggaggccctcatccttctgctgccctggggttggggcctcacccctctggagggccggaggcaggaggtggaaaccccaggggctggcttttttaaaactggttttattttaatttttattatattttcagtttttccataaaggagccaattccaactctgtaaaaaaaaaaaaaaaaaa

SEQ ID NO: 1855 - protein, 340 aa, Homo sapiens
MSELEQLRQEAEQLRNQIRDARKACGDSTLTQITAGLDPVGRIQMRTRRTLRGHLAKIYAMHWGTDSRLLVSASQDGKLIIWDSYTTNKVHAIPLRSSWVMTCAYAPSGNFVACGGLDNICSIYSLKTREGNVRVSRELPGHTGYLSCCRFLDDNQIITSSGDTTCALWDIETGQQTVGFAGHSGDVMSLSLAPDGRTFVSGACDASIKLWDVRDSMCRQTFIGHESDINAVAFFPNGYAFTTGSDDATCRLFDLRADQELLMYSHDNIICGITSVAFSRSGRLLLAGYDDFNCNIWDAMKGDRAGVLAGHDNRVSCLGVTDDGMAVATGSWDSFLKIWN

SEQ ID NO: 1856 - protein, 340 aa, Homo sapiens
  misc_feature (107)..(107): Xaa can be any naturally occurring amino acid
MSELEQLRQEAEQLRNQIRDARKACGDSTLTQITAGLDPVGRIQMRTRRTLRGHLAKIYAMHWGTDSRLLVSASQDGKLIIWDSYTTNKVHAIPLRSSWVMTCAYAXSGNFVACGGLDNICSIYSLKTREGNVRVSRELPGHTGYLSCCRFLDDNQIITSSGDTTCALWDIETGQQTVGFAGHSGDVMSLSLAPNGRTFVSGACDASIKLWDVRDSMCRQTFIGHESDINAVAFFPNGYAFTTGSDDATCRLFDLRADQELLMYSHDNIICGITSVAFSRSGRLLLAGYDDFNCNIWDAMKGDRAGVLAGHDNRVSCLGVTDDGMAVATGSWDSFLKIWN

SEQ ID NO: 1857 - DNA, 5261 bp, Homo sapiens
ggcgcccgaccccagccaccgccctgcggccagcgcgtcccccgactcgccgcccggagaccccgaggctccaacgagttcagaaatgtccagaaatgacaaagaaccgttttttgtgaagtttttaaagtcttcagacaattccaaatgtttttttaaagctctcgagtccataaaagaattccaatcagaagaatatcttcagattattacagaagaagaggcattgaagataaaggagaatgatagatcactttatatctgtgacccttttagtggcgttgtctttgatcacctcaaaaagcttggctgcagaattgttggtcctcaagtagtcatattttgtatgcaccaccagcgatgtgtcccaagagccgaacatccagtttataatatggttatgtctgatgtaaccatatcttgtacaagtctggaaaaagaaaaaagggaagaagttcataaatatgtacaaatgatgggcggacgagtatacagagaccttaatgtatcagtaactcaccttattgcaggagaagttggtagcaaaaaatatttagttgctgcaaacctgaagaaacctattttgcttccctcttggataaaaacactttgggagaagtcacaagagaaaaaaataactagatatactgatataaacatggaagatttcaagtgtcctatttttcttggttgcataatctgtgtgactggcttatgtggcttagacaggaaagaagttcagcaactcacagttaagcatggaggtcaatacatgggacaattgaaaatgaatgaatgtacacacctcattgtgcaagaaccaaaaggtcagaagtatgagtgtgccaagagatggaatgtacactgtgtgaccacacagtggttttttgacagtattgagaaaggtttttgtcaggatgaatccatatacaagacagaacctagaccagaagcaaagactatgcccaattcttcaactcctaccagccagatcaacacaattgatagtcgtactctttcagatgtcagcaatatttccaacataaatgcaagttgcgtaagtgaatcaatatgtaattcacttaacagcaaactggagcctacacttgaaaatctagaaaatctggatgtcagtgcatttcaagcacctgaagatttattagatggttgtcggatatatctttgcggttttagtggcagaaagctagataaactgagaagacttattaacagtggaggtggagttcgttttaaccagctaaatgaagatgtaactcatgttattgtgggagattatgatgatgaattgaagcagttttggaataaatcagcccacaggcctcatgtagtgggagcaaagtggttgctagagtgtttcagtaaaggttatatgctttctgaagaaccatatatccatgctaattaccagccagtggaaattccagtttcacatcagcctgaaagtaaagcagctcttttaaaaaagaagaacagcagcttctctaagaaagactttgctcctagtgaaaagcatgagcaagctgatgaagatctgctctctcaatatgaaaatggtagctccacagtagttgaggctaagacgtctgaagccaggccctttaatgattctactcatgctgagcccttgaatgattctactcacatttctttgcaagaagaaaaccagtcttctgtcagtcattgtgtccctgatgtttctacaattactgaagaaggcttatttagccaaaagagtttccttgttttgggttttagtaatgaaaatgaatctaacatcgcaaacatcataaaagaaaatgctgggaaaatcatgtcccttctgagcagaactgttgcggattatgctgtggttcctctgctggggtgtgaagtggaagccactgtgggagaagttgttacaaatacatggctggttacttgcatagactatcagactttgtttgatccaaagtcgaatcctctcttcacaccagttccagtaatgacaggaatgactcctttagaggattgtgttatttcatttagccagtgtgctggagcagaaaaagagtctttaacattcctagcaaacctccttggagcaagtgttcaagaatactttgttcgcaaatccaatgcaaagaaaggcatgtttgccagtactcatcttatactgaaagaacgtggtggctctaaatatgaagctgcaaagaagtggaatttacctgccgttactatagcttggctgttggagactgctagaacgggaaagagagcagacgaaagccattttctgattgaaaattcaactaaagaagaacgaagtttggaaacagaaataacaaatggaatcaatctaaattcagatactgcagagcatcctggcacacgcctgcaaactcacagaaaaaccgtcgttacacctttagatatgaaccgctttcagagtaaagctttccgtgctgtggtctcacaacatgccagacaggtcgcagcctccccagcagtaggacaaccacttcagaaggagccctcgttacacctggatacaccatcaaaattcctgtccaaggacaaactcttcaagccttcctttgatgtgaaggatgcacttgcagccttggaaactccaggacgtcccagccaacagaaaaggaaaccgagtacgccactctcagaagttattgtcaaaaacttgcaacttgctttggcaaatagctctcgaaatgctgtcgctctttctgccagccctcaactgaaagaggcccagtcagagaaggaagaagccccaaagccacttcacaaagtagtggtatgtgttagtaaaaaactcagtaagaagcagagtgaactaaatgggatcgcagcctctctaggagcagattacaggtggagttttgatgaaacagtgactcatttcatctatcaagggcggccaaatgacactaatcgggagtataaatctgtaaaagaaagaggagtacacattgtttccgagcactggcttttagattgtgcccaagagtgtaaacatcttcctgaatctctttatccacatacttataatcccaaaatgagcttggatatcagcgcagtgcaagatggccggctctgtaatagtcgactactctcagctgtgtcttcaacaaaggatgatgagccagatcctttgattttagaagaaaatgatgtagacaatatggccaccaataataaagagtcagcaccatcaaatggaagtggaaagaatgactctaaaggagttctgacacagaccttagagatgagagagaactttcagaagcagttacaggagataatgtctgcaacatcaatagtgaaaccccaagggcagaggacttccctttcaagaagtggttgtaacagcgcatcttcaacccctgacagcactcgctctgctcgcagtggacgaagtagagtcctagaggcactgaggcagtctcgtcagacagtacctgatgtcaacacagagccttcccaaaatgaacagatcatttgggatgaccctacagcaagggaggagagagcaaggcttgccagcaatttgcagtggcctagttgtcccacacaatactctgagcttcaggttgacattcaaaacttggaggattctccttttcaaaagcctttacatgattcagaaattgctaaacaggctgtctgtgatcctggaaacatacgtgtgactgaagctcccaaacacccaatctctgaagaactggaaactcccataaaagacagccacctgatccctacgcctcaagcccccagtattgcctttccactcgccaacccccctgtggctccgcaccctagagaaaagattataacgatagaggagactcatgaagaattaaaaaaacagtacatatttcagttatcatctctgaatcctcaagaacgtattgactattgtcatctgattgagaaactaggtggattggtgatagaaaagcagtgctttgatcccacctgtacacacattgttgtgggacatccacttcgaaacgagaagtatttagcctcagtggcagctgggaagtgggtgcttcatcgctcctaccttgaagcctgcaggactgctggacacttcgtgcaggaagaagactatgaatggggaagtagttccatacttgatgttttgactggaatcaatgtacagcaacgaagactagcacttgcagcaatgagatggagaaaaaaaatccagcaaagacaagaatctggcattgttgagggagcatttagtgggtggaaggttattttacatgtggatcagtctcgagaagcaggcttcaaacgccttcttcagtcaggaggagcaaaggtgctacctggtcattctgtacctttatttaaagaggccacacatcttttttctgacttgaataaactgaaaccagatgactcaggagttaatatagcagaagctgctgcccagaacgtgtactgcttgagaacagaatacattgctgattatctcatgcaggaatcacctcctcatgtagaaaattactgtctaccagaagctatttcatttattcagaataataaggaacttgggactggattatcacaaaagaggaaagctcctacagaaaaaaataaaatcaaacgacctagagtacactaatcgcatctaccctttagttaccaaacattaaatgtttttaaaaattgaaagcctgaatgtgactgtgatagatttgggtagtaatttaaagatgagtacctgaagaattctgcttcagagtataatgatgacccttcttgagttttgaacacctgaaattgtaatcactgaaatattaactgtttcttaataaaaagttacctgaaataacaacaaaatacaactcctcagctagcttgctgttaaaccacattgaagtctgttaaaagatatttatttttcttgtaaatatctgaagctgtagcttagtggaaattttagcaaggtaatggattttgctttaaaatgtctgccttacaaattcataacaacaagatttgtcagtcagcatttattcatgttttccctgatttttatcttctcaccattttacctcttttaacaggagcctgagcacaaggtttaatgaggaagctggggctataaatatgtgtgtatatatgtatatgtatgtttgtacaaatctccatgatgtttgccaagtttgaatgcgcaaaacttggaaaatgtgacaataaagaataaaagtagtaactcaaattagtat

SEQ ID NO: 1858 - protein, 1435 aa, Homo sapiens
MHHQRCVPRAEHPVYNMVMSDVTISCTSLEKEKREEVHKYVQMMGGRVYRDLNVSVTHLIAGEVGSKKYLVAANLKKPILLPSWIKTLWEKSQEKKITRYTDINMEDFKCPIFLGCIICVTGLCGLDRKEVQQLTVKHGGQYMGQLKMNECTHLIVQEPKGQKYECAKRWNVHCVTTQWFFDSIEKGFCQDESIYKTEPRPEAKTMPNSSTPTSQINTIDSRTLSDVSNISNINASCVSESICNSLNSKLEPTLENLENLDVSAFQAPEDLLDGCRIYLCGFSGRKLDKLRRLINSGGGVRFNQLNEDVTHVIVGDYDDELKQFWNKSAHRPHVVGAKWLLECFSKGYMLSEEPYIHANYQPVEIPVSHQPESKAALLKKKNSSFSKKDFAPSEKHEQADEDLLSQYENGSSTVVEAKTSEARPFNDSTHAEPLNDSTHISLQEENQSSVSHCVPDVSTITEEGLFSQKSFLVLGFSNENESNIANIIKENAGKIMSLLSRTVADYAVVPLLGCEVEATVGEVVTNTWLVTCIDYQTLFDPKSNPLFTPVPVMTGMTPLEDCVISFSQCAGAEKESLTFLANLLGASVQEYFVRKSNAKKGMFASTHLILKERGGSKYEAAKKWNLPAVTIAWLLETARTGKRADESHFLIENSTKEERSLETEITNGINLNSDTAEHPGTRLQTHRKTVVTPLDMNRFQSKAFRAVVSQHARQVAASPAVGQPLQKEPSLHLDTPSKFLSKDKLFKPSFDVKDALAALETPGRPSQQKRKPSTPLSEVIVKNLQLALANSSRNAVALSASPQLKEAQSEKEEAPKPLHKVVVCVSKKLSKKQSELNGIAASLGADYRWSFDETVTHFIYQGRPNDTNREYKSVKERGVHIVSEHWLLDCAQECKHLPESLYPHTYNPKMSLDISAVQDGRLCNSRLLSAVSSTKDDEPDPLILEENDVDNMATNNKESAPSNGSGKNDSKGVLTQTLEMRENFQKQLQEIMSATSIVKPQGQRTSLSRSGCNSASSTPDSTRSARSGRSRVLEALRQSRQTVPDVNTEPSQNEQIIWDDPTAREERARLASNLQWPSCPTQYSELQVDIQNLEDSPFQKPLHDSEIAKQAVCDPGNIRVTEAPKHPISEELETPIKDSHLIPTPQAPSIAFPLANPPVAPHPREKIITIEETHEELKKQYIFQLSSLNPQERIDYCHLIEKLGGLVIEKQCFDPTCTHIVVGHPLRNEKYLASVAAGKWVLHRSYLEACRTAGHFVQEEDYEWGSSSILDVLTGINVQQRRLALAAMRWRKKIQQRQESGIVEGAFSGWKVILHVDQSREAGFKRLLQSGGAKVLPGHSVPLFKEATHLFSDLNKLKPDDSGVNIAEAAAQNVYCLRTEYIADYLMQESPPHVENYCLPEAISFIQNNKELGTGLSQKRKAPTEKNKIKRPRVH

SEQ ID NO: 1859 - DNA, 4199 bp, Homo sapiens
ccaagatggcggcgatcggcggcgttgaggcgggatccgggcgagccgagtgaagacctggtcctgtagacgggaaggagcctggacacagtgacacattctcaaaggccctgcaggaccaccatggcttatgatgactccgtgaagaaagaagattgttttgatggtgatcatacctttgaggacataggacttgcagctggccgaagccaacgagagaaaaaacgttcttacaaagattttttaagggaagaggaagaaattgctgctcaggtcaggaattcttccaagaagaagttgaaggatagtgaactttacttcttggggacggacacacacaagaagaagaggaagcactcctctgatgattactactatggaggacagtggttcttgttctgagtgccgataaaccagtgtgaaggaggagagaggtggagggctggtattttggaggattcagcatagaagaacagtctgcatttgtgatacaccagatatttcgtctttggaatcgtcacagaagaaaaagaaaaagtccagcccacagtctactgatacagctatggacctgttgaaagctatcacttccccactggcagcaggctccaagccctccaaaaagactggggagaaatcctctggctcttcaagccattcggagagtaaaaaggagcaccacaggaagaaagtcagtggaagcagtggggaactacccctagaggatggtggctcccacaaatcgaaaaaaatgaaacctctctatgtgaacacagagacactgacccttcgggagcctgatggtttaaaaatgaaacttattctgtcaccaaaggagaagggaagcagctctgttgatgaggagtcttttcaatatccctcccaacaagcgactgtgaaaaaatcctcaaagaaatcagctcgggatgagcagggtgctttactcctaggacatgagttacagagctttctgaaaacagcccggaaaaagcacaagtcatcctcagacgcacattcatctcctggccctgaaggctgtgggtctgacgcctcccagttcgcagagtcccacagtgctaaccttgatctttcagggcttgaacctattctggtagaatcagactcatcctctggtggggaactagaggctggggagttagtgatagatgattcttaccgagaaatcaagaagaaaaagaagtcaaagaagagcaaaaagaagaaagacaaggagaagcataaagagaagcgacactccaagtccaagagaagtttaggactttctgccgtgccagtgggagaggtcacagtgacatctggccctcctcccagcatcccatacgctggagcagcagcacctcccctgccacttcctggcctccacacagatgggcatagtgaaaaaaaaaagaaaaaagaagagaaggacaaagagagagagagaggagaaaagccaaaaaagaagaacatgtcggcctaccaggtgttctgtaaagagtatcgcgtgaccattgtggctgaccatccaggtatagattttggggaacttagtaaaaaactggctgaggtgtggaagcaattaccagaaaaagacaaactgatttggaagcaaaaagctcagtatctgcagcacaaacagaacaaagcagaagccacaactgtgaaaaggaaagcatccagctcagaaggttccatgaaagtcaaagcctcttctgtaggagtactgtcaccccagaagaagtccccacccaccaccatgctgttaccagcctcaccagccaaagcccctgagacagagcccattgatgttgctgctcatcttcagctgttgggagagtccctaagcctcattggacaccgtctgcaggaaactgagggtatggtggctgtgtctggcagtttgtcagtgcttctggattccattatctgtgcccttggccccttggcatgtctcaccacacaactacctgaattgaatggctgtcccaaacaggtcttgtcaaacacattagacaacattgcttacatcatgccgggactgtgacagcaaagaatcctgggacagaaaccttatcctacaccattgctggtttgtgtatatatgactgttgcagattccttcagtggcctctggctgtaggttttaaatttttatatctatacatacatatatacatatatatataatgtacaatatatacatagactgtaactactttgcttttaataattttatgaaatggcaaaggtttagccaagaggaaattttggcatgaatacaggcttgggattcttttttctcctgtggtggataaatctgccttaaaaatcaatgtaacttgggggctgggggcttgttctgggtgccaagcgcatctctttatggacagctaaaatgtgattattttccaagctcagttggacctccagacccatcactgaccatttgccttacctgtcttagtctgaaatgtaataggaaagataacgggaagatgccagttgactgaaaattcaaagcctttcaatttgaagtgacctaggtgggaggtgataaaatttgttccctttatagttatggaagtggcttaggtgaattgagtagagggttcattccaattcctactgtataggtgtctgtgtctcaaaatttattgtaatcattggtaccattggtggcctcaacagaggccaaggagttctgtgagccctggcagcaaaaaacaccttggggggtgaagctgtcaatgccaccagttggacctccatacattctgagctaacccagaatctttagtcggcagaattaagtgctggtgtctttcactggcagcatgaagttagccaccaagtcctcacaagccgtgctgcttagttgctcggtggttatggataaactttgcccagcatgatttttgggttcatcttatcagttcccctggtgggcagatacacagtgttctgcattccacatgtaagtgaattgcaaaaacaaaacaaaactcactctcttgtaggtttatttatgtgtgtgtgaatgtgtattttaattatgtgtatttaactctttaaaatctcttagattttaatttatcctgtaaatttctgtatatataatttaataacagaagcctccaccagcaacagcatgtggaagatacagatttgtcatttctcccttccgccctcccttctttccttccttccttccctgtttccttccctctttccttccttcctcctggtctgttccaaaaactctgaatcatctacattttaaggtattttacctcaaaaatgaatcattgtgttaggattctaattctttataaagaacttcatgggcttcaataatgtctagaaagtaaaataaagaggaatgttaccatccccagctgcccttatttccagagaaccagacgtttgtttcccagttggaaagaagacagttgagcacttcaggatggtttttaaatttggtatgagattctctgccaacaccaagctctgagttaactgtgctttcttctcctggccctgacagagcactacagcatcaaagtaaatctttggggacagtgtagcccatctgcatcctatttaatttcttcccttctccccaccagtgttgtcacagggctatgttgcttaaaggtagtctggctgctgaatccctttctcagctcagagcagttttaagatttaattgggaatacagagaaacaggattgtttgagaaccaaaatcaagaggaacagaaatcttaacttgatttcatgtgttagaacattgtaccatgcctcttctgtatctgtggaagtttcctgtttgacacagggtatctaggaggggcggggaagacatggatagtataggaagacattaatcctagcattgtcatttatatacattaatgaaatcctgatgaggacctgctttttgtttgttttcctttgaaacccagccctattgtatttgtatttaaaatttgtacacatttgtataataatctgtaccttgtggtatttggtactattagaggaaaaactttggattcagaccttcttgcagtttttatatcattgttttattttgttttttaaataaattctagtggtttgatccaaatcccattacagttgtataaagaaataaaattttgtacttatattattaaaaatcacatttttaatatttgt

SEQ ID NO: 1860 - protein, 599 aa, Homo sapiens
MAYDDSVKKEDCFDGDHTFEDIGLAAGRSQREKKRSYKDFLREEEEIAAQVRNSSKKKLKDSELYFLGTDTHKKKRKHSSDDYYYGDISSLESSQKKKKKSSPQSTDTAMDLLKAITSPLAAGSKPSKKTGEKSSGSSSHSESKKEHHRKKVSGSSGELPLEDGGSHKSKKMKPLYVNTETLTLREPDGLKMKLILSPKEKGSSSVDEESFQYPSQQATVKKSSKKSARDEQGALLLGHELQSFLKTARKKHKSSSDAHSSPGPEGCGSDASQFAESHSANLDLSGLEPILVESDSSSGGELEAGELVIDDSYREIKKKKKSKKSKKKKDKEKHKEKRHSKSKRSLGLSAVPVGEVTVTSGPPPSIPYAGAAAPPLPLPGLHTDGHSEKKKKKEEKDKERERGEKPKKKNMSAYQVFCKEYRVTIVADHPDFGELSKKLAEVWKQLPEKDKLIWKQKAQYLQHKQNKAEATTVKRKASSSEGSMKVKASSVGVLSPQKKSPPTTMLLPASPAKAPETEPIDVAAHLQLLGESLSLIGHRLQETEGMVAVSGSLSVLLDSIICALGPLACLTTQLPELNGCPKQVLSNTLDNIAYIMPGL

SEQ ID NO: 1861 - DNA, 2470 bp, Homo sapiens
ttggcgggcggaagcggccacaacccggcgatcgaaaagattcttaggaacgccgtaccagccgcgtctctcaggacagcaggcccctgtccttctgtcgggcgccgctcagccgtgccctccgcccctcaggttctttttctaattccaaataaacttgcaagaggactatgaaagattatgatgaacttctcaaatattatgaattacatgaaactattgggacaggtggctttgcaaaggtcaaacttgcctgccatatccttactggagagatggtagctataaaaatcatggataaaaacacactagggagtgatttgccccggatcaaaacggagattgaggccttgaagaacctgagacatcagcatatatgtcaactctaccatgtgctagagacagccaacaaaatattcatggttcttgagtactgccctggaggagagctgtttgactatataatttcccaggatcgcctgtcagaagaggagacccgggttgtcttccgtcagatagtatctgctgttgcttatgtgcacagccagggctatgctcacagggacctcaagccagaaaatttgctgtttgatgaatatcataaattaaagctgattgactttggtctctgtgcaaaacccaagggtaacaaggattaccatctacagacatgctgtgggagtctggcttatgcagcacctgagttaatacaaggcaaatcatatcttggatcagaggcagatgtttggagcatgggcatactgttatatgttcttatgtgtggatttctaccatttgatgatgataatgtaatggctttatacaagaagattatgagaggaaaatatgatgttcccaagtggctctctcccagtagcattctgcttcttcaacaaatgctgcaggtggacccaaagaaacggatttctatgaaaaatctattgaaccatccctggatcatgcaagattacaactatcctgttgagtggcaaagcaagaatccttttattcacctcgatgatgattgcgtaacagaactttctgtacatcacagaaacaacaggcaaacaatggaggatttaatttcactgtggcagtatgatcacctcacggctacctatcttctgcttctagccaagaaggctcggggaaaaccagttcgtttaaggctttcttctttctcctgtggacaagccagtgctaccccattcacagacatcaagtcaaataattggagtctggaagatgtgaccgcaagtgataaaaattatgtggcgggattaatagactatgattggtgtgaagatgatttatcaacaggtgctgctactccccgaacatcacagtttaccaagtactggacagaatcaaatggggtggaatctaaatcattaactccagccttatgcagaacacctgcaaataaattaaagaacaaagaaaatgtatatactcctaagtctgctgtaaagaatgaagagtactttatgtttcctgagccaaagactccagttaataagaaccagcataagagagaaatactcactacgccaaatcgttacactacaccctcaaaagctagaaaccagtgcctgaaagaaactccaattaaaataccagtaaattcaacaggaacagacaagttaatgacaggtgtcattagccctgagaggcggtgccgctcagtggaattggatctcaaccaagcacatatggaggagactccaaaaagaaagggagccaaagtgtttgggagccttgaaagggggttggataaggttatcactgtgctcaccaggagcaaaaggaagggttctgccagagacgggcccagaagactaaagcttcactataatgtgactacaactagattagtgaatccagatcaactgttgaatgaaataatgtctattcttccaaagaagcatgttgactttgtacaaaagggttatacactgaagtgtcaaacacagtcagattttgggaaagtgacaatgcaatttgaattagaagtgtgccagcttcaaaaacccgatgtggtgggtatcaggaggcagcggcttaagggcgatgcctgggtttacaaaagattagtggaagacatcctatctagctgcaaggtataattgatggattcttccatcctgccggatgagtgtgggtgtgatacagcctacataaagactgttatgatcgctttgattttaaagttcattggaactaccaacttgtttctaaagagctatcttaagaccaatatctctttgtttttaaacaaaagatattattttgtgtatgaatctaaatcaagcccatctgtcattatgttactgtcttttttaatcatgtggttttgtatattaataattgttgactttcttagattcacttccatatgtgaatgtaagctcttaactatgtctctttgtaatgtgtaatttctttctgaaataaaaccatttgtgaatat

SEQ ID NO: 1862 - protein, 651 aa, Homo sapiens
MKDYDELLKYYELHETIGTGGFAKVKLACHILTGEMVAIKIMDKNTLGSDLPRIKTEIEALKNLRHQHICQLYHVLETANKIFMVLEYCPGGELFDYIISQDRLSEEETRVVFRQIVSAVAYVHSQGYAHRDLKPENLLFDEYHKLKLIDFGLCAKPKGNKDYHLQTCCGSLAYAAPELIQGKSYLGSEADVWSMGILLYVLMCGFLPFDDDNVMALYKKIMRGKYDVPKWLSPSSILLLQQMLQVDPKKRISMKNLLNHPWIMQDYNYPVEWQSKNPFIHLDDDCVTELSVHHRNNRQTMEDLISLWQYDHLTATYLLLLAKKARGKPVRLRLSSFSCGQASATPFTDIKSNNWSLEDVTASDKNYVAGLIDYDWCEDDLSTGAATPRTSQFTKYWTESNGVESKSLTPALCRTPANKLKNKENVYTPKSAVKNEEYFMFPEPKTPVNKNQHKREILTTPNRYTTPSKARNQCLKETPIKIPVNSTGTDKLMTGVISPERRCRSVELDLNQAHMEETPKRKGAKVFGSLERGLDKVITVLTRSKRKGSARDGPRRLKLHYNVTTTRLVNPDQLLNEIMSILPKKHVDFVQKGYTLKCQTQSDFGKVTMQFELEVCQLQKPDVVGIRRQRLKGDAWVYKRLVEDILSSCKV

SEQ ID NO: 1863 - DNA, 5551 bp, Homo sapiens
gacctttatttgttacttttgagctacagtgacaagaaagatcacctaactgtggaagaactggctcagtttttgaaggtggagcaaaagatgaataatgtgacaacggactattgtcttgacatcataaagaagtttgaagtttcagaagaaaataaggtgaaaaatgttcttggcatagaaggcttcacgaacttcatgcgtagtcctgcctgtgacatatttaacccattgcaccatgaagtgtaccaagacatggatcagcccctctgcaactactacattgcttcctctcacaatacatacctgactggagaccagctcctttctcagtccaaagtggatatgtatgcacgggtgctgcaagagggctgtcgctgtgtggaagttgactgttgggatggcccagatggagagccagtagtacatcatggttacactctcacttcaaaaattctcttcagagatgttgtggagaccatcaacaagcatgcctttgtgaagaatgagtttcctgttatattgtctatcgagaatcactgcagtatccagcagcaaaggaagattgctcagtacctgaaaggaatattcggagacaaactggacctgtcatctgttgatacaggggagtgcaagcagcttccaagccctcaaagtttgaaaggcaaaattctagtgaagggtaagaagttgccttatcaccttggggatgatgcagaggaaggggaagtttccgatgaggacagtgcagatgaaattgaagacgagtgcaaattcaagctccattatagtaatgggaccactgagcatcaggtggaatctttcataaggaaaaaactggagtcactgttaaaagaatctcaaattcgagataaagaagatcctgatagtttcacagtgcgggcactactgaaggccacgcatgaaggcttaaatgcacacctgaagcagagtccagatgtaaaggaaagtggaaagaaatcacatggacgatccctcatgaccaactttggaaaacataagaaaactacaaaatcacggtctaaatcttacagtactgatgatgaggaagacacacagcagagtactggcaaggagggtggccagctgtacagattgggtcgccgaaggaaaaccatgaagctctgccgagaactctctgatttggttgtgtacacaaactccgtggccgctcaggacattgtggatgacggaaccacaggaaatgtgttatcattcagtgaaacaagagcacatcaggttgttcagcaaaaatcagagcagttcatgatttataatcaaaagcaactcacgaggatttacccctctgcctaccgcattgattccagtaacttcaaccctctcccctactggaacgcaggctgccagctagtggcactgaattatcaatctgaaggacgaatgatgcagttaaaccgagccaaattcaaggcaaatggcaattgtggctatgtcctcaaaccccagcaaatgtgcaaaggtactttcaaccctttctctggtgaccctcttcctgccaaccccaaaaagcagctcatcctgaaagttatcagtggacagcaactccccaaacctccagactccatgtttggagatcgaggcgagatcattgacccttttgttgaagttgaaattattggattgccagtagattgttgtaaagatcaaacccgtgtggtagatgacaatggatttaaccctgtgtgggaagaaacactgacatttacagtacacatgccagaaatagctttggttcggttccttgtgtgggatcacgatcccattggacgagactttgttggacaaagaactgtgaccttcagcagcttagtgcctggctaccggcatgtctatttggaaggactgacagaagcatccatatttgtacacataaccatcaatgaaatctatggaaagtggagccctttaatactcaaccccagttatactatattgcactttctaggagctacaaagaacagacaactccagggtctgaagggactgttcaataagaatcctaggcacagttcttcagaaaacaattcccattatgtacggaagcgatccattggagatagaattctgcgacgcacagctagcgccccagccaaaggcaggaaaaagagcaaaatgggcttccaagaaatggtggagataaaggattctgtgtccgaggccacaagagatcaagatggcgtgctgaggaggaccacacgcagtttgcaagcacgccctgtctctatgcctgttgacagaaaccttctgggagctttgtcgctgcctgtatctgaaacagcaaaagacattgaaggaaaagaaaactctctagtacaaatctgaataggaaacaacttaagcagaagataaagatggcagaagaaaagggaaagcaagtataaaagatccacattttctaaatttcaacaaaaagttatcatcctcctccagtgctctgctccacaaagataccagccaaggggacaccattgtatctactgcccacatgtcagtcacaggagaacagctgggcatgtcaagtcctaggggtgggagaaccacatcaaatgccacaagcaattgccaggaaaacccctgtcccagcaagtctctctccccaaagcagcatttggctcccgatcctgtagttaaccccacacaagatctgcatggtgtgaaaatcaaggaaaagggtaatcctgaggactttgtggaagggaaaagcatcttgtcaggaagcgtcctttctcatagcaacctagaaattaagaacctggaaggtaataggggtaagggccgagctgcaacatccttttctttgtcagacgtctccatgctctgttctgacatacctgacctacattcaactgcaattctgcaggagagtgtaatttcccatcttattgacaatgtcactttaacaaatgagaatgagccgggcagttccatctcagccctgattggccagtttgatgagaccaacaatcaggctctcacagttgtttctcatcttcataataccagtgtgatgtcaggccattgtcccttgcctagcctgggcctaaaaatgcccatcaagcatggtttttgcaagggaaaatccaagtcttccttcctgtgctcatctccggagctgatagcactctcgagttctgagaccaccaaacatgcaacgaacacagtttatgaaactacctgcactcccatctctaaaaccaaaccagatgatgacctttctagtaaggccaagacagcggccttagaaagcaacctgcctggatcccctaatacttctcgtggctggttaccaaaaagtcctaccaagggagaagactgggaaacactgaagagctgcagccctgcctcttcccctgatttgaccctggaggatgtaatagctgatcccactctctgtttcaattctggggagagcagccttgtggaaattgatggagaatcagaaaatctttctctaacaacctgtgaatataggagagagggcacaagtcaacttgcttctcctttaaaactcaagtacaatcagggtgtggtagaacactttcaaagaggtttgagaaacggctactgtaaagagaccctccgcccttctgtccctgaaatattcaacaatattcaagatgtcaaaactcaaagtatttcttatctagcctatcagggtgctggctttgtgcataatcatttctcagattcagatgcaaaaatgttccagacctgtgtgccccagcaatctagtgctcaagatatgcatgtccctgtacccaagcagttggcacatcttcctttgcctgctctgaaactgcctagtccttgcaaatccaaaagtctgggggacttaacatcagaggacattgcctgcaattttgagagcaagtaccagtgtattagtaagagttttgttacaactggcattagagacaagaagggcgtgactgtgaagacaaagtcgttagagcctatagatgccctgaccgagcagcttcggaagcttgtgtcctttgaccaggaagacaactgccaagtgctatattcaaagcaggatgccaatcagctcccccgggcactggtcaggaagttgtcatccagaagtcagagcagagtgcgcaatattgctagtcgtgccaaggagaaacaggaagccaacaagcagaaagttccaaaccccagcaatggggcaggagtggttcttagaaacaaaccctcagcacccacccctgcagtgaatcgccactccaccggctcctacatcgcaggctacctgaagaacacgaaagggggtggccttgaaggccggggcatcccagagggggcatgcacggctcttcactatggccacgttgaccagttttgttcagataattctgttttgcagactgagccaagcagtgatgataaaccagaaatttattttcttttgagactgtgaattatttaaaactgcattcttaaggttttcaaggtattctgtagaatgtcagagttttcagtaaataagttccttggctttggaatgattttcaaatgtatttttaaacttgtatttgggtctccctttgacttcatgtgttctccctgttaatgcgtttgtatatagatttggtgacatttcccatgtacctattatgatctttctcccttgagttgttgtaaactgtatcagtatgaaatatgtgcatgccctagatgtgaaactcctcagcagctcgggttataatgtgtgtgtgtttcaccaagatgtcctttactgtgtcctcagattgcagtcacaaatgtagtcatttttactctctaactgttgagttgattaagagactttgcaaacgacaaagggatgaattccttactttaatctgttatcatttttcctatgtttccctctttgttcagaagcccagatgcatttttataactcagttttaaaaactttaaaatagttaccttgccttttaggatgttcttatcccacccataatgagagttgaaaggggatggatagctgctccccatgcccttcccactttttggaataggccgtgagggtgtgaggaagaaggctgtcttttgtacataaggacaaaattgtttgttttacataaattttgttacatatttttgctaatggctttgtatgtaacaagaagcgagttgccaaactacctgttgtacttttgaattttctgattgaattacagactgcgaacaacggctttcagaatgagggacttccatcagactctaatgataatagtagcacaaattgaaaacttccccaaagctttcacagaatattttctcataataaaatccaagtgaacagataattagaagaaacccttttccttcagggaaccaagcaactctattttagtactgacatgcattattttcactgtgaattcacttttttattgcatgttcagatgtccctctttgttttttttttttgtaacattaactgcaatgatgttcttcctggaattcatgaaaatataattaaaacacatttttaaac

SEQ ID NO: 1864 - protein, 787 aa, Homo sapiens
DLYLLLLSYSDKKDHLTVEELAQFLKVEQKMNNVTTDYCLDIIKKFEVSEENKVKNVLGIEGFTNFMRSPACDIFNPLHHEVYQDMDQPLCNYYIASSHNTYLTGDQLLSQSKVDMYARVLQEGCRCVEVDCWDGPDGEPVVHHGYTLTSKILFRDVVETINKHAFVKNEFPVILSIENHCSIQQQRKIAQYLKGIFGDKLDLSSVDTGECKQLPSPQSLKGKILVKGKKLPYHLGDDAEEGEVSDEDSADEIEDECKFKLHYSNGTTEHQVESFIRKKLESLLKESQIRDKEDPDSFTVRALLKATHEGLNAHLKQSPDVKESGKKSHGRSLMTNFGKHKKTTKSRSKSYSTDDEEDTQQSTGKEGGQLYRLGRRRKTMKLCRELSDLVVYTNSVAAQDIVDDGTTGNVLSFSETRAHQVVQQKSEQFMIYNQKQLTRIYPSAYRIDSSNFNPLPYWNAGCQLVALNYQSEGRMMQLNRAKFKANGNCGYVLKPQQMCKGTFNPFSGDPLPANPKKQLILKVISGQQLPKPPDSMFGDRGEIIDPFVEVEIIGLPVDCCKDQTRVVDDNGFNPVWEETLTFTVHMPEIALVRFLVWDHDPIGRDFVGQRTVTFSSLVPGYRHVYLEGLTEASIFVHITINEIYGKWSPLILNPSYTILHFLGATKNRQLQGLKGLFNKNPRHSSSENNSHYVRKRSIGDRILRRTASAPAKGRKKSKMGFQEMVEIKDSVSEATRDQDGVLRRTTRSLQARPVSMPVDRNLLGALSLPVSETAKDIEGKENSLVQI

SEQ ID NO: 1865 - DNA, 2809 bp, Homo sapiens
tttttttttttttttgctttcccgtttcttaaacattggcgttcccaagtttctccttggtcctcctgtcatttttatctactctcgtagcttcaaataccatctagtttatagtttatttagcatgttgtccaagccaccgtcttgggcccagggctctacctgtagcttttcatccacacttctcaggttgcttcttacacagcgccatagtagttaaaatacggtctggggatagtcgtctcttcatcagtctcccccgacgacctgcgcaggcgtggcttgaggaaacgcccgctgtgggcggagccacccgaaaggctccggtcgggggcgggaacaggatcggcccgcgggctggcgtcgataggctgccgcagagacagggcgggctctgctaagggacgcgcctcgccgtggggcggtgcctgcgcctgagcctctacgagagggaaggaacgctgctccgagctccgcgtcgcgtcgcgtagattcgcgtcgccgtcgacctcagaggcggggccggaagcgctacggtttgacccccgagtccctctgttcccgaaggggcggccgtctttctcccgacccgctccgcctcctctccttcttccccattacccggaggccgaagcccccagccagggcggggcggcgcagcccgagctcccggacccggaagaagcgccatctcccgcctccaccatggagcccaccgcaccgtccctcaccgaggaggacctcactgaagtgaagaaggacgccttagaaaatttacgtgtatacctgtgtgagaaaatcatagctgagagacattttgatcatctacgtgcaaaaaaaatactcagtagagaagacactgaagaaatttcttgtcgaacatcaagtagaaaaagggctggaaaattgttagactacttacaggaaaacccaaaaggtctggacacccttgttgaatctattcggcgagaaaaaacacagaacttcctgatacagaagattacagatgaagtgctgaaacttagaaatataaaactagaacatctgaaaggactaaaatgtagcagttgtgaaccttttccagatggagccacgaacaacctctccagatcaaattcagatgagagtaatttctctgaaaaactgagggcatccactgtcatgtaccatccagaaggagaatccagcacgacgccctttttttctactaattcttctctgaatttgcctgttctagaagtaggcagaactgaaaataccatcttctcttcaactacacttcccagacctggggacccaggggctcctcctttgccaccagatctacagttagaagaagaaggaacttgtgcaaactctagtgagatgtttcttcccttaagatcacgtactgtttcacgacaatgacactttattgccttttaatttttaatgatgacaaaaaatgttttaaagaatatgactttttataaaatggctgtaatcatttgtttacatttgatgcatgtcttttaaaatgcaatgtaagcatactttgtaaataggatttttagaattaaaaaagcatacttctaggatagctaactgtaaatcatgttgatcatgtactttttagtaatttctttttttcctttttaaggtctttcagtacttttttaaatattttctattttaagactgattttaatagggaatatatctctatttgagaatagacccttactaggaagaacgttttttcctcagtgcatttgtgctagaaattttcaagagtctaatagtctttgccagtcattcagcagcaaattttcagcattaagctgttcctgttcagtaataaaaccggtcactgatgggaaaactgccaatatagaaaaataaaaatctcttttccactccattgtcgtataggcatgtaaacagcctctttttgatactggaggaacacttgatggagtgtgagccacctaagatctcggtttgccaaaattcatttctaattaaccttactaattatactactttgttaggattttcacattcttggcttaatcattttcattcctaaagaaaaatatcttggcctaaacctcagttattacatgtaatttgatgaggtattttttccttttttcttttttttttttttgagacagtcttgctctatcgcccaggctggagtgcagtggcgcattctaggctcactgcaacttctgcctcccatgcttacgtgatcctctcacctcagcctctcaagtaatatagctgagactacaagtgtgtgccaccatgcctcactaatttttgtattatttttgtagagacggtgttttgccatgttggccaggctggtcttgaactcctggactcaagcaacctacccagcgtggcctcccaaagtgctgggattacagacacgagccacctcacctagcctgatgagatttttaaaaaatattttctctgtacttttcattctcttttaatgaggaccaatgtacagttgaaataactggaacaaattatttttggtgtgtgtgacaattctgtttttaatgctatttgaacaagtgggccattagccagatttgtctttttgttgtaaaacaaaatttgactaattttacatgtttataaatcttatgctctcactgtttgtttttatttaaattacaattttatctgtttcctgacattgtctcctatatatttctattattaattgcaaaaacatagaaatggaaattttgctatcaacaataaaatttttttaaagtaaaaaaaaaaaaaaaaaaaaaaaaaaaaaaaa

SEQ ID NO: 1866 - protein, 233 aa, Homo sapiens
MEPTAPSLTEEDLTEVKKDALENLRVYLCEKIIAERHFDHLRAKKILSREDTEEISCRTSSRKRAGKLLDYLQENPKGLDTLVESIRREKTQNFLIQKITDEVLKLRNIKLEHLKGLKCSSCEPFPDGATNNLSRSNSDESNFSEKLRASTVMYHPEGESSTTPFFSTNSSLNLPVLEVGRTENTIFSSTTLPRPGDPGAPPLPPDLQLEEEGTCANSSEMFLPLRSRTVSRQ

SEQ ID NO: 1867 - DNA, 4839 bp, Homo sapiens
gcatactgaatcagcaggactggctggtggtgcagcagacatcatgagtaagcaccgagaagtctgttccttatcacgtgtgtaaggggaaaaaggtttaaacaagtctcttaagtggtgtttcctcaccgatggagaattacttccaagcagaagcttacaacctgggacaaggtgttagatgaatttgaacaaaacgaagatgaaacagtttcttctactttattggatacaaagtggaataagattctagatcccccttctcaccggctgtcatttaaccctactttggccagtgtgaatgaatctgcagtttctaatgagtcacaaccacaactgaaagtcttctccctggctcattcagctcccctgaccacagaggaagaggatcactgtgctaatggacaggactgtaatctaaatccagagattgccacaatgtggattgatgaaaatgctgttgcagaagaccagttaattaagagaaactatagttgggatgatcaatgcagtgctgttgaagtgggagagaagaaatgtggaaacctggcttgtctgccagatgagaagaatgttcttgttgtagccgtcatgcataactgtgataaaaggacattacaaaacgatttacaggattgtaataattataatagtcaatcccttatggatgcttttagctgttcactggataatgaaaacagacaaactgatcaatttagttttagtataaatgagtccactgaaaaagatatgaattcagagaaacaaatggatccattgaatagaccgaaaacagaggggagatctgttaaccatctgtgtcctacttcatctgatagtctagccagtgtctgttccccttcacaattaaaggatgacggaagtataggtagagacccctccatgtctgcgattacaagtttaacggttgattcagtaatctcatcccagggaacagatggatgtcctgctgttaaaaagcaagagaactatataccagatgaggacctcactggcaaaatcagctctcctaggacagatctagggagtccaaattccttttcccacatgagtgaggggattttgatgaaaaaagagccagcagaggagagcaccactgaagaatccctccggtctggtttacctttgcttctcaaaccagacatgcctaatgggtctggaaggaataatgactgtgaacggtgttcagattgccttgtgcctaatgaagttagggctgatgaaaatgaaggttatgaacatgaagaaactcttggcactacagaattccttaatatgacagagcatttctctgaatctcaggacatgactaattggaagttgactaaactaaatgagatgaatgatagccaagtaaacgaagaaaaggaaaagtttctacagattagtcagcctgaggacactaatggtgatagtggaggacagtgtgttggattggcagatgcaggtctagatttaaaaggaacttgcattagtgaaagtgaagaatgtgatttctccactgttatagacacaccagcagcaaattatctatctaatggttgtgattcctatggaatgcaagacccaggtgtttcttttgttccaaagactttaccctccaaagaagattcagtaacagaagaaaaagaaatagaggaaagcaagtcagaatgctactcaaatatttatgaacagagaggaaatgaggccacagaagggagtggactacttttaaacagcactggtgacctaatgaagaaaaattatttacataatttctgtagtcaagttccatcagtgcttgggcaatcttcccccaaggtagtagcaagcctgccatctatcagtgttccttttggtggtgcaagacccaagcaaccttctaatcttaaacttcaaattccaaagccattatcagaccatttacaaaatgactttcctgcaaacagtggaaataatactaaaaataaaaatgatattcttgggaaagcaaaattaggggaaaactcagcaaccaatgtatgcagtccatctttgggaaacatctctaatgtcgatacaaatggggaacatttagaaagttatgaggctgagatctccactagaccatgccttgcattagctccagatagcccagataatgatctcagagctggtcagtttggaatttctgccagaaagccattcaccacgctgggtgaggtggctccagtatgggtaccggattctcaggctccaaattgcatgaaatgtgaagccaggtttacattcaccaaaaggaggcatcactgcagagcatgtgggaaggttttctgtgcttcctgctgtagcctgaaatgtaaactgttatacatggacagaaaggaagctagagtgtgtgtaatctgccattcagtgctaatgaatgctcaagcctgggagaacatgatgagtgcctcaagccagagccctaaccctaacaatcctgctgaatactgttctactatccctcccttgcagcaagctcaggcctcaggagctctgagctctccacctcccactgtgatggtacctgtgggagttttaaagcaccctggagcagaagtggctcagcccagagagcagaggcgagtttggtttgctgatgggatcttgcccaatggagaagttgctgatgcagccaaattaacaatgaatggaacttcctctgcaggaaccctggctgtgtcacacgacccagtcaagccagtaactaccagtcctctaccagcagagacggatatttgtctattctctgggagtataactcaggttggaagtcctgttggaagtgcaatgaatcttattcctgaagatggccttcctcccattctcatctccactggtgtaaaaggagactatgctgtggaagagaaaccatcacagatttcagtaatgcagcagttggaggatggtggccctgacccacttgtatttgttttaaatgcaaatttgttgtcaatggttaaaattgtaaattatgtgaacaggaagtgctggtgtttcacaaccaagggaatgcatgcagtgggtcagtctgagatagtcattcttctacagtgtttaccggatgaaaagtgtttgccaaaggatatctttaatcactttgtgcagctttatcgggatgctctggcagggaatgtggtgagcaacttgggacattccttcttcagtcaaagtttccttggcagtaaagaacatggtggattcttatatgtgacatctacctaccagtcactgcaagacctagtactcccaaccccaccttacttgtttgggattcttatccagaaatgggaaactccttgggctaaagtatttcctatccgtctgatgttgagacttggagctgaatatcgactttatccatgcccactattcagtgtcagatttcggaagccattgtttggagagacggggcataccatcatgaatcttcttgcagacttcagaaattaccagtataccttgccagtagttcaaggtttggtggttgatatggaagttcggaaaactagcatcaaaattcccagcaacagatacaatgagatgatgaaagccatgaacaagtccaatgagcatgtcctggcaggaggtgcctgcttcaatgaaaaggcagactctcatcttgtgtgtgtacagaatgatgatggaaactatcagacccaggctatcagtattcacaatcagcccagaaaagtgactggtgccagtttctttgtgttcagtggcgctctgaaatcctcttctggataccttgccaagtccagtattgtggaagatggtgttatggtccagattactgcagagaacatggattccttgaggcaggcactgcgagagatgaaggacttcaccatcacctgtgggaaggcggacgcggaggaaccccaggagcacatccacatccagtgggtggatgatgacaagaacgttagcaagggtgtcgtaagtcctatagatgggaagtccatggagactataacaaatgtgaagatattccatggatcagaatataaagcaaatggaaaagtaatcagatggacagaggtgtttttcctagaaaacgatgaccagcacaattgcctcagtgatcctgcagatcacagtagattgactgagcatgttgccaaagctttttgccttgctctctgtcctcacctgaaacttctgaaggaagatggaatgaccaaactgggactacgtgtgacacttgactcagatcaggttggctatcaagcagggagcaatggccagccccttccctcgcagtacatgaatgatctggatagcgccttggtgccggtgatccatggaggggcctgccagcttagtgagggccccgttgtcatggaactcatcttttatattctggaaaacatcgtataaacagagaagacttcatttttttctgttcagacttgttgcaacagcagtcatacccaaatcatttgcactttaaaactggaagattaagcttttgttaacactattaatggggtggggaatagggtgggagtgggggtttgggagacgggtgggaaagggtggttggggggaccgatgttccataattctaagtcttctatgcattgtccaccaagaagatctgggcagcttctgttcctgcacaacagttatgctatccttgcagctaatccccttctgttactgtttagacaagaattccgctcctctctcaagatttacttatggtcatgtgctcagaaatgctcaaatgggtacaaccatcaccaagggtgggatgggagggcagaggggaaataaaatataaagcatcaaaaaaaaaaaaaaaaa

SEQ ID NO: 1868 - protein, 1323 aa, Homo sapiens
MWIDENAVAEDQLIKRNYSWDDQCSAVEVGEKKCGNLACLPDEKNVLVVAVMHNCDKRTLQNDLQDCNNYNSQSLMDAFSCSLDNENRQTDQFSFSINESTEKDMNSEKQMDPLNRPKTEGRSVNHLCPTSSDSLASVCSPSQLKDDGSIGRDPSMSAITSLTVDSVISSQGTDGCPAVKKQENYIPDEDLTGKISSPRTDLGSPNSFSHMSEGILMKKEPAEESTTEESLRSGLPLLLKPDMPNGSGRNNDCERCSDCLVPNEVRADENEGYEHEETLGTTEFLNMTEHFSESQDMTNWKLTKLNEMNDSQVNEEKEKFLQISQPEDTNGDSGGQCVGLADAGLDLKGTCISESEECDFSTVIDTPAANYLSNGCDSYGMQDPGVSFVPKTLPSKEDSVTEEKEIEESKSECYSNIYEQRGNEATEGSGLLLNSTGDLMKKNYLHNFCSQVPSVLGQSSPKVVASLPSISVPFGGARPKQPSNLKLQIPKPLSDHLQNDFPANSGNNTKNKNDILGKAKLGENSATNVCSPSLGNISNVDTNGEHLESYEAEISTRPCLALAPDSPDNDLRAGQFGISARKPFTTLGEVAPVWVPDSQAPNCMKCEARFTFTKRRHHCRACGKVFCASCCSLKCKLLYMDRKEARVCVICHSVLMNAQAWENMMSASSQSPNPNNPAEYCSTIPPLQQAQASGALSSPPPTVMVPVGVLKHPGAEVAQPREQRRVWFADGILPNGEVADAAKLTMNGTSSAGTLAVSHDPVKPVTTSPLPAETDICLFSGSITQVGSPVGSAMNLIPEDGLPPILISTGVKGDYAVEEKPSQISVMQQLEDGGPDPLVFVLNANLLSMVKIVNYVNRKCWCFTTKGMHAVGQSEIVILLQCLPDEKCLPKDIFNHFVQLYRDALAGNVVSNLGHSFFSQSFLGSKEHGGFLYVTSTYQSLQDLVLPTPPYLFGILIQKWETPWAKVFPIRLMLRLGAEYRLYPCPLFSVRFRKPLFGETGHTIMNLLADFRNYQYTLPVVQGLVVDMEVRKTSIKIPSNRYNEMMKAMNKSNEHVLAGGACFNEKADSHLVCVQNDDGNYQTQAISIHNQPRKVTGASFFVFSGALKSSSGYLAKSSIVEDGVMVQITAENMDSLRQALREMKDFTITCGKADAEEPQEHIHIQWVDDDKNVSKGVVSPIDGKSMETITNVKIFHGSEYKANGKVIRWTEVFFLENDDQHNCLSDPADHSRLTEHVAKAFCLALCPHLKLLKEDGMTKLGLRVTLDSDQVGYQAGSNGQPLPSQYMNDLDSALVPVIHGGACQLSEGPVVMELIFYILENIV

SEQ ID NO: 1869 - DNA, 2625 bp, Homo sapiens
atgctgaagcggaggcggccgctgctcgaggatcaaacagagcatactgaatcagcaggactggctggtggtgcagcagacatcatgagtaagcaccgagaagtctgttccttatcacgtgtgtaaggggaaaaaggtttaaacaagtctcttaagtggtgtttcctcaccgatggagaattacttccaagcagaagcttacaacctggacaaggtgttagatgaatttgaacaaaacgaagatgaaacagtttcttctactttattggatacaaagtggaataagattctagatcccccttctcaccggctgtcatttaaccctactttggccagtgtgaatgaatctgcagtttctaatgagtcacaaccacaactgaaagtcttctccctggctcattcagctcccctgaccacagaggaagaggatcactgtgctaatggacaggactgtaatctaaatccagagattgccacaatgtggattgatgaaaatgctgttgcagaagaccagttaattaagagaaactatagttgggatgatcaatgcagtgctgttgaagtgggagagaagaaatgtggaaacctggcttgtctgccagatgagaagaatgttcttgttgtagccgtcatgcataactgtgataaaaggacattacaaaacgatttacaggattgtaataattataatagtcaatcccttatggatgcttttagctgttcactggataatgaaaacagacaaactgatcaatttagttttagtataaatgagtccactgaaaaagatatgaattcagagaaacaaatggatccattgaatagaccgaaaacagaggggagatctgttaaccatctgtgtcctacttcatctgatagtctagccagtgtctgttccccttcacaattaaaggatgacggaagtataggtagagacccctccatgtctgcgattacaagtttaacggttgattcagtaatctcatcccagggaacagatggatgtcctgctgttaaaaagcaagagaactatataccagatgaggacctcactggcaaaatcagctctcctaggacagatctagggagtccaaattccttttcccacatgagtgaggggattttgatgaaaaaagagccagcagaggagagcaccactgaagaatccctccggtctggtttacctttgcttctcaaaccagacatgcctaatgggtctggaaggaataatgactgtgaacggtgttcagattgccttgtgcctaatgaagttagggctgatgaaaatgaaggttatgaacatgaagaaactcttggcactacagaattccttaatatgacagagcatttctctgaatctcaggacatgactaattggaagttgactaaactaaatgagatgaatgatagccaagtaaacgaagaaaaggaaaagtttctacagattagtcagcctgaggacactaatggtgatagtggaggacagtgtgttggattggcagatgcaggtctagatttaaaaggaacttgcattagtgaaagtgaagaatgtgatttctccactgttatagacacaccagcagcaaattatctatctaatggttgtgattcctatggaatgcaagacccaggtgtttcttttgttccaaagactttaccctccaaagaagattcagtaacagaagaaaaagaaatagaggaaagcaagtcagaatgctactcaaatatttatgaacagagaggaaatgaggccacagaagggagtggactacttttaaacagcactggtgacctaatgaagaaaaattatttacataatttctgtagtcaagttccatcagtgcttgggcaatcttcccccaaggtagtagcaagcctgccatctatcagtgttccttttggtggtgcaagacccaagcaaccttctaatcttaaacttcaaattccaaagccattatcagaccatttacaaaatgactttcctgcaaacagtggaaataatactaaaaataaaaatgatattcttgggaaagcaaaattaggggaaaactcagcaaccaatgtatgcagtccatctttgggaaacatctctaatgtcgatacaaatggggaacatttagaaagttatgaggctgagatctccactagaccatgccttgcattagctccagatagcccagataatgatctcagagctggtcagtttggaatttctgccagaaagccattcaccactctgggtgaggtggctccagtatgggtaccggattctcaggctccaaattgcatgaaatgtgaagccaggtttacattcaccaaaaggaggcatcactgcagagcatgtgggaaggttttctgtgcttcctgctgtagcctgaaatgtaaactgttatacatggacagaaaggaagctagagtgtgtgtaatctgccattcagtgctaatgaatggtaagtattaaaacaggttgatttcatagttattgagacaaaacaagggaattacgatgagaagacttttttccccctgcctttctttacaagttgctcaccttctcaaatgtcataactttaactgaaaatatttagctaaatttccatgttttgaaagtatcttagcatttca

SEQ ID NO: 1870 - protein, 762 aa, Homo sapiens
MENYFQAEAYNLDKVLDEFEQNEDETVSSTLLDTKWNKILDPPSHRLSFNPTLASVNESAVSNESQPQLKVFSLAHSAPLTTEEEDHCANGQDCNLNPEIATMWIDENAVAEDQLIKRNYSWDDQCSAVEVGEKKCGNLACLPDEKNVLVVAVMHNCDKRTLQNDLQDCNNYNSQSLMDAFSCSLDNENRQTDQFSFSINESTEKDMNSEKQMDPLNRPKTEGRSVNHLCPTSSDSLASVCSPSQLKDDGSIGRDPSMSAITSLTVDSVISSQGTDGCPAVKKQENYIPDEDLTGKISSPRTDLGSPNSFSHMSEGILMKKEPAEESTTEESLRSGLPLLLKPDMPNGSGRNNDCERCSDCLVPNEVRADENEGYEHEETLGTTEFLNMTEHFSESQDMTNWKLTKLNEMNDSQVNEEKEKFLQISQPEDTNGDSGGQCVGLADAGLDLKGTCISESEECDFSTVIDTPAANYLSNGCDSYGMQDPGVSFVPKTLPSKEDSVTEEKEIEESKSECYSNIYEQRGNEATEGSGLLLNSTGDLMKKNYLHNFCSQVPSVLGQSSPKVVASLPSISVPFGGARPKQPSNLKLQIPKPLSDHLQNDFPANSGNNTKNKNDILGKAKLGENSATNVCSPSLGNISNVDTNGEHLESYEAEISTRPCLALAPDSPDNDLRAGQFGISARKPFTTLGEVAPVWVPDSQAPNCMKCEARFTFTKRRHHCRACGKVFCASCCSLKCKLLYMDRKEARVCVICHSVLMNGKY

SEQ ID NO: 1871 - DNA, 10919 bp, Homo sapiens
gcacgagactgcgctcgcctccctcctcacgcgggcgggattttcttgccttgtgaaaaaccgtctcggcggctgcccccgcctcctctgctggcatgtgaaatggcggtcggcgagtggtttgcgtccgtgacatcatcatcatggcaacaagagctgcagcctgggaccgaggagcccgtgtgattcccggcggtggcgcagtggcggcagcaccagcaccgacgaaagcttcgagggcttctctccttgcggccccttgccgggtgctcctgaggaggcggcggcagcagcgcctacaccgccccgcccgccgttcctcgaggtgcctctgtgtgaggggagggggccgtgccgagaaggggagggggcgccgccgccgctgcggagggagccgccgccgctgctgctgccgctgccgggtcgccagtgaagggaggcagtggcggcggcggcgaacatgttttcagtaaggatagtgactgcagactaatacatggccagcccgctgcaggggctggatacctgccaatcccccctcacccaggcccctgtcaagaaggtgccggtggtgcgagtcttcggagcgaccccggcagaataaaacccaagacaagccacataaaagcaacctaaaaattaaactgtcatcatattatttgttttaaaactatggaataatatatctgaggaagatttctctcaaaattgtttttctcaatttcaagtcagaagacatgtcttcatctacatggcatctttccttacctctatgtgccatacgatggttatggacagcagccagaaagctatctttctcagatggcattcagtatcgacagagcacttaatgtggctttaggcaatccatcttccactgctcagcatgtgttcaaagtgtcattagtatcaggaatgcctttttatggttatcatgagaaggaaagacactttatgaagatctatctttacaatcctacaatggtgaaaaggatatgtgaacttttgcaaagcggagccataatgaataaattttaccagcctcatgaagcgcatattccctacctcctacagctcttcattgactacaatctttatggcatgaatttaataaatctggctgctgtcaagttccgaaaagcaagaaggaaaagtaatacattgcatgcaactggatcctgcaagaatcatttatcaggaaattctcttgctgatactttatttcggtgggaacaagatgaaataccaagctctttaatattggaaggtgttgaaccacacagtacatgtgaattacaagtggatgctgtagctgctgatatcttaaatcgtctggacattgaagctcaaattggtggaaaccctggtctacaggccatatgggaagatgaaaagcaacggcgaagaaacagaaatgaaacttctcaaatgagccaacctgagtcacaagatcacaggtttgtgccagcaacagaaagtgaaaaaaaatttcagaagagacttcaggaaattctcaaacagaatgatttctctgtaacattatcaggatctgtggactacagcgatggatcccaggagttctctgctgagttaacattgcactctgaggttctgtctcctgaaatgcttcagtgtacaccagccaatatggtagaagttcacaaagacaaagagtcaagcaaaggtcacactagacacaaagtggaagaagctcttattaatgaagaagcaattttgaaccttatggaaaatagtcagacttttcagcctttgacccaaagactgagtgagtcacctgttttcatggacagtagtcctgatgaggctctggtacatcttcttgctggtttggaaagtgatggatatcggggggaaagaaataggatgccatcaccatgtcgctcctttggaaataataaatatccacaaaatagtgatgatgaagaaaatgaaccacagattgaaaaagaggaaatggagcttagtttggtgatgtcccagagatgggacagcaatattgaagaacattgtgccaaaaagagatcactgtgcagaaatacccacagaagttcaactgaagatgatgactcatcttcaggagaagaaatggaatggagtgataacagtttgcttctagccagtctttctatacctcagttagatggaactgcagatgaaaatagtgacaatccattgaacaatgaaaattctagaacccactcttctgtaattgcaacaagcaagctttcagttaaaccctccatctttcacaaagatgctgctacattagaaccctcatcttctgctaagattacctttcagtgtaaacacacaagtgccctttcttcccatgttttgaacaaggaagatttaattgaagacctttcacagacaaacaaaaatacagaaaaaggtctagataactcagtcacttcttttacaaacgaaagcacttattctatgaaataccctggatctttaagcagtactgttcattcagaaaattctcataaagagaatagtaagaaagagatcctcccagtatcttcctgtgaaagtagtatttttgattatgaagaagatattccatctgttacaagacaagtaccaagtagaaaatatacaaacattagaaaaatcgaaaaggattccccttttatacatatgcaccgtcaccctaacgagaatacattgggcaaaaattctttcaacttttctgacttaaatcattcaaaaaataaagtatcctctgaaggaaatgaaaaaggaaacagcacagctctgagtagtttattcccttcatcatttactgaaaattgtgaattactgtcatgctcaggggagaatagaactatggtgcattctcttaatagcactgctgatgaaagtggactaaataaacttaaaattaggtatgaagaatttcaagaacataaaacagaaaagccaagcctcagccagcaagcagcacactatatgttttttcccagtgttgttctttctaactgtcttactagaccacagaaactatctcctgtcacatataaattacaacctggcaataaaccatcccggttaaaattgaataaaaggaaacttgcaggtcatcaggagacttctaccaaaagtagtgagactggatccacaaaagataattttatacaaaataatccttgtaatagtaatcctgagaaggataatgcattggctagtgatttaactaaaaccactcgtggagcttttgaaaataaaacacccacagatggttttatagactgtcactttggagatggaacgttagaaactgagcagtcctttggactatatggaaataaatacacacttagagccaaacgcaaggtaaattatgagactgaagacagtgagtcaagttttgtaactcacaactcaaaaattagtctacctcatcccatggaaattggtgaaagtttagatggaactctcaaatcccgaaaacgaagaaaaatgtctaaaaagctgccccctgtcatcataaagtatattattattaatagatttagagggagaaaaaatatgcttgtgaagctaggaaaaatagactctaaagaaaaacaagtaatattaacagaagaaaaaatggaactatataaaaagcttgcacctttgaaggacttttggccaaaagttcccgactcccctgcaaccaaatatcccatttatccactaacaccaaagaaaagtcacagaagaaagtcaaaacataaatctgctaagaaaaaaactggtaaacaacaaaggacaaataatgaaaatattaaaagaactttgtctttcaggaaaaaacggtcacatgctattctttctcctccctcaccatcttacaatgctgaaaccgaagattgtgacttgaattatagtgatgttatgtctaaactaggttttctttctgagagaagcacaagtcccataaattcttctccacctcgctgctggtctcccacagatccaagagctgaagaaatcatggctgctgcagaaaaagaggcaatgctttttaagggtcctaatgtatgtaagaagactgttaattctcgtataggaaaaactagtcgcgcaagagcacagattaagaaatcaaaagcaaagcttgctaatccctctatagttactaagaaaaggaacaaacgaaatcagacaaataaactagtagatgatggaaaaaagaaaccaagagcaaaacaaaaaacaaatgagaaaggtacatcgagaaagcatataacacttaaggatgaaaaaataaaatctcagtctggtgctgaggttaagtttgtactgaaacaccagaatgtgtctgaatttgcaagtagttctggaggctctcaactactttttaaacagaaagatatgccactaatgggctctgctgtagatcatcccctttctgcttccctacccactggaattaatgcacaacagaagttatctggctgcttttcttctttcttagaaagcaagaagtctgtagatttgcagacattccccagttcacgagatgatttgcatccatcagttgtttgtaattctataggacctggagtctcaaaaattaatgttcaaaggcctcataatcaaagtgctatgtttactctaaaggaatcaacgttaattcaaaaaaatatatttgacctttccaatcatttatctcaggtagcacagaatacacagatatcttctggtatgtcctcaaagatagaagataatgcaaataatatacaaagaaactatttgtcatcaatcggaaagttaagtgaatatcgcaattccctagaatcaaagctggaccaagcatatacccctaattttttgcattgcaaagacagtcagcagcagattgtgtgcatagcggaacagtcaaagcacagtgaaacttgttctccgggaaatacagcttcagaggaaagccaaatgcctaataattgctttgtaacttccttgagaagtccaatcaaacaaatagcatgggagcaaaagcaaaggggctttattttagatatgtcaaattttaaacctgaaagagtaaaaccgaggtcattatcagaagcaatttcacaaaccaaagcactttctcagtgtaaaaatcgaaatgtgtcaacaccttcagcatttggtgaaggacagtctggactggcagttctaaaagaattgttacaaaaaagacagcaggaagcacaaaatgcaaatactacacaagacccattatccaataaacatcaaccaaataaaaatatttctggttcccttgagcataacaaagcaaataaacggacacgatcggtaacgtccccaagaaaacctcgaactcccagaagtacaaaacaaaaagaaaaaatccccaaacttctcaaagtagactctttaaatttacaaaactctagccagttggataactctgtatcagatgatagtcccatctttttttcagatccaggctttgaaagttgttactcacttgaagatagtttatctcctgaacataattataattttgatattaacacaataggtcagactggattttgtagcttttattctggaagtcagtttgtcccagctgatcagaatttgcctcagaagttcctaagtgatgctgttcaggatctttttccaggacaagctatagaaaaaaatgagtttttaagtcatgacaaccagaaatgtgatgaagacaagcatcataccacagactcagcctcatggattagatctggtactttaagtcctgaaatttttgagaagtcaaccatagatagcaatgagaatcgtcgccacaaccagtggaaaaatagctttcatcctctaacaactcggtctaactcaataatggattctttctgtgttcagcaggcagaagactgtctaagtgaaaaatctagattgaataggagttcagtaagcaaagaagtgtttcttagcctcccacagccaaacaattcagactggattcaaggtcacaccagaaaagaaatgggacagtctcttgactcagccaatacctcttttactgcaatactctcctcccctgatggtgaacttgtagacgtggcctgtgaagatttagaactgtatgtttcaagaaacaatgatatgttgacaccaactcctgatagttcaccaagatctactagctctccttcacaatctaaaaatggcagcttcacccctcgaactgctaacattctgaaaccacttatgtcccccccaagtagggaagaaattatggcaactttgttggatcatgacctgtctgagactatttaccaggaaccattttgcagtaatccttctgatgtaccagaaaagcccagggagattggtggacggctcctcatggtagaaactcgacttgcaaatgatctggctgagtttgagggagacttttccttggaaggacttcgtctttggaaaacagcattctcagcaatgactcagaatccaaggccagggtcaccccttcgcagtggccaaggagttgtcaataaagggtcaagtaatagccctaagatggttgaagataaaaaaattgtgattatgccttgcaaatgtgccccaagtcgacaactggttcaagtgtggcttcaagccaaagaagaatacgaacgttccaagaaactgcctaaaaccaagccaactggagttgtaaaatctgctgagaactttagctcttcagttaacccagatgacaaacctgtagtgcctccaaaaatggatgtaagtccatgtatactccccactacagcacataccaaggaggatgttgataattctcagattgctttacaagcaccaaccacgggatgtagtcaaactgcaagtgaaagtcagatgctgccaccagttgcctctgcaagtgatcccgaaaaagatgaagatgatgatgataactattacattagttatagctcccctgattctccagtaattcccccttggcaacaaccaatatccccagattccaaagcattaaatggagatgatagaccctcatcaccagtagaggagctgccttcattggcttttgagaacttcttaaagccaataaaagatggtatacaaaaaagcccctgcagtgagcctcaagagcctctagtgatatctccaattaatactagggcaagaactgggaaatgtgaatcactttgctttcatagtacaccaatcatacagagaaaacttctggaaaggcttcctgaagcacctggccttagcccattatcaacagaaccaaaaacacagaagttgagtaataagaaaggaagtaatactgacactcttagaagagtactgttaacacaagcaaagaatcaatttgcagcagtaaataccccacagaaagaaacttctcagattgatggaccatctttaaacaatacttacggtttcaaagtcagcatacaaaacttacaggaggcaaaagctttacatgagatacaaaatcttaccctaatcagtgtggagttgcatgctcgaactagacgagacttagaaccggatcctgaatttgacccaatctgtgctctgttctactgcatctcatctgacactccactgccagatacagaaaaaacagaactcacaggtgtaatagtgattgataaagacaagacagttttcagtcaagatatcagatatcagactccattacttattagatctggaattacaggactcgaagtcacctatgctgctgatgagaaggcactttttcatgaaattgcaaatataataaagaggtatgatcctgatattctgctaggatatgagattcagatgcattcctggggttacctcttacaaagggctgccgctttaagtattgacttatgtcggatgatctctcgggtgccagatgacaaaattgagaacagatttgcagctgaaagagatgagtatggatcatatacaatgagtgagataaatattgttggccgaattacactaaatctttggagaatcatgagaaatgaggtggctctaactaactacacctttgaaaatgtgagctttcatgttcttcatcagcgttttcccctctttacctttcgagtcttgtcagactggtttgataacaagacagatctatacagatggaaaatggttgatcattatgttagccgtgtccgtggaaatctccaaatgttagaacagctggacctgattgggaaaaccagtgagatggctagactttttggcattcagtttttacatgtactgacaaggggttcacagtaccgtgtggaatcaatgatgttgcgtattgctaaaccaatgaactatattcctgtgacacctagtgttcagcaaagatcccagatgagagccccacagtgtgttcctctaattatggagcctgaatcccgcttctatagcaactctgttctcgttttggatttccaatcactttatccttctattgtgattgcatataactactgcttttccacctgccttggccatgtggagaacttgggaaagtatgatgagttcaaatttggctgtacctctctgagagtacctccagatttactttaccaagttaggcatgatatcacagtgtcccccaatggagtagcttttgtcaagccttcagtaagaaaaggtgtactaccaagaatgcttgaagaaattttgaagactagatttatggtgaagcagtcaatgaaggcttacaagcaagacagagccctgtcacgaatgcttgatgcgcgtcagttgggacttaagctgatagcaaatgtcacatttggctatacatctgctaatttttctgggagaatgccatgcattgaggttggcgatagtattgttcacaaagccagagagaccttggaacgagctattaaactggtgaatgataccaagaaatggggggctagggttgtatatggcgatactgacagtatgtttgtgctactgaaaggagccactaaggagcagtcttttaagattggtcaggaaattgccgaagctgtaactgctaccaatcctaaaccagtgaaattgaagtttgaaaaggtatatttgccctgtgttttacaaacaaaaaagaggtatgtgggttacatgtatgaaacactggatcagaaggacccagtatttgatgcaaaaggaatagaaacagtcagaagagattcctgccctgctgtttctaagatacttgagcgttctctaaagctgctatttgaaacgagagatataagtctaattaaacagtatgttcagcgacaatgtatgaagcttctggaaggaaaggccagcatacaagactttatctttgccaaggaatacagaggaagtttttcttataaaccaggagcttgtgtgccagcccttgaacttacaaggaaaatgctgacttatgaccggcgctctgagcctcaggttggggagcgagtgccatacgtcatcatttatgggacccccggagtaccacttatccagcttgtaaggcgcccagtggaagtcctgcaggacccaactctgagactgaatgctacttactatattaccaagcaaatccttccacccttggcaagaatcttctcacttattggtattgatgtcttcagctggtatcatgaattaccaaggatccataaagctaccagctcctcgcgaagtgaacctgaagggcggaaaggcactatttcacaatattttactaccttacactgtcctgtgtgtgatgacctaactcagcatggcatctgtagtaaatgtcggagccaacctcagcatgttgcagtcatcctcaaccaagaaatccgggagttggaacgtcaacaggagcaacttgtaaagatatgcaagaactgtacaggttgctttgatcgacacatcccatgtgtttctctgaactgcccagtacttttcaaactctcccgagtaaatagagaattgtccaaggcaccatatctccggcagttattagaccagttttaaattgtcaatatcacagtattacaggtgctatttttttcagtgcttaccactaaactgttgtgcatggtgctttttaactttcatcgagtcaaggatgttcactgtctgttatctgaagactatgaagacttctatgctaaccgaattaaaatgtacttgttgatctctgaatagctcacttcttacaatgtacaaattcctcattctgtcaccttttaaacattgttttataatgcaggtgttggatttgctccagtatgtgtaccatcttgtaaattcatttgagtagatcatgtttacttcccagtggaaggagcactgaaaacctcttaaagaaaaagcatttgtgtgttttccttgaactgtctgtatcaagacgtgttacttcgagatatccattcactttataattttgactgcaaaatattttgtaaatacacttttttacttttcaaacgagtaaaataatgtgcaatgatttttatacaaatgattttcaagttgtttggtatatttcctctaggttttgcttgactcaaagtagatcgttattttgatcaaactgtgcaaacagtagtaccacgtgtagcattttgaaacattattttttaaaaaatgctgtcttgctttagctattaatggggcattgtgaggaactgtgcaaagacatttttgttacaaacctgtgggcctgttgcaatactttaaaaataaaaaattttattccatttgcttgttttgtatagacatttctattgcttctaaatatacttaaaatattttctttccttatgtactgtacagttaatcttatttgccatcatcttgaacacaaaatgtgtatttagaatatttgtataactgtgtaaaataaaaaaggaattatgtggtcagtgcattgttttttaaactggaaatcattttgttttaaaagttaa

SEQ ID NO: 1872 - protein, 3052 aa, Homo sapiens
MAFSIDRALNVALGNPSSTAQHVFKVSLVSGMPFYGYHEKERHFMKIYLYNPTMVKRICELLQSGAIMNKFYQPHEAHIPYLLQLFIDYNLYGMNLINLAAVKFRKARRKSNTLHATGSCKNHLSGNSLADTLFRWEQDEIPSSLILEGVEPHSTCELQVDAVAADILNRLDIEAQIGGNPGLQAIWEDEKQRRRNRNETSQMSQPESQDHRFVPATESEKKFQKRLQEILKQNDFSVTLSGSVDYSDGSQEFSAELTLHSEVLSPEMLQCTPANMVEVHKDKESSKGHTRHKVEEALINEEAILNLMENSQTFQPLTQRLSESPVFMDSSPDEALVHLLAGLESDGYRGERNRMPSPCRSFGNNKYPQNSDDEENEPQIEKEEMELSLVMSQRWDSNIEEHCAKKRSLCRNTHRSSTEDDDSSSGEEMEWSDNSLLLASLSIPQLDGTADENSDNPLNNENSRTHSSVIATSKLSVKPSIFHKDAATLEPSSSAKITFQCKHTSALSSHVLNKEDLIEDLSQTNKNTEKGLDNSVTSFTNESTYSMKYPGSLSSTVHSENSHKENSKKEILPVSSCESSIFDYEEDIPSVTRQVPSRKYTNIRKIEKDSPFIHMHRHPNENTLGKNSFNFSDLNHSKNKVSSEGNEKGNSTALSSLFPSSFTENCELLSCSGENRTMVHSLNSTADESGLNKLKIRYEEFQEHKTEKPSLSQQAAHYMFFPSVVLSNCLTRPQKLSPVTYKLQPGNKPSRLKLNKRKLAGHQETSTKSSETGSTKDNFIQNNPCNSNPEKDNALASDLTKTTRGAFENKTPTDGFIDCHFGDGTLETEQSFGLYGNKYTLRAKRKVNYETEDSESSFVTHNSKISLPHPMEIGESLDGTLKSRKRRKMSKKLPPVIIKYIIINRFRGRKNMLVKLGKIDSKEKQVILTEEKMELYKKLAPLKDFWPKVPDSPATKYPIYPLTPKKSHRRKSKHKSAKKKTGKQQRTNNENIKRTLSFRKKRSHAILSPPSPSYNAETEDCDLNYSDVMSKLGFLSERSTSPINSSPPRCWSPTDPRAEEIMAAAEKEAMLFKGPNVCKKTVNSRIGKTSRARAQIKKSKAKLANPSIVTKKRNKRNQTNKLVDDGKKKPRAKQKTNEKGTSRKHITLKDEKIKSQSGAEVKFVLKHQNVSEFASSSGGSQLLFKQKDMPLMGSAVDHPLSASLPTGINAQQKLSGCFSSFLESKKSVDLQTFPSSRDDLHPSVVCNSIGPGVSKINVQRPHNQSAMFTLKESTLIQKNIFDLSNHLSQVAQNTQISSGMSSKIEDNANNIQRNYLSSIGKLSEYRNSLESKLDQAYTPNFLHCKDSQQQIVCIAEQSKHSETCSPGNTASEESQMPNNCFVTSLRSPIKQIAWEQKQRGFILDMSNFKPERVKPRSLSEAISQTKALSQCKNRNVSTPSAFGEGQSGLAVLKELLQKRQQEAQNANTTQDPLSNKHQPNKNISGSLEHNKANKRTRSVTSPRKPRTPRSTKQKEKIPKLLKVDSLNLQNSSQLDNSVSDDSPIFFSDPGFESCYSLEDSLSPEHNYNFDINTIGQTGFCSFYSGSQFVPADQNLPQKFLSDAVQDLFPGQAIEKNEFLSHDNQKCDEDKHHTTDSASWIRSGTLSPEIFEKSTIDSNENRRHNQWKNSFHPLTTRSNSIMDSFCVQQAEDCLSEKSRLNRSSVSKEVFLSLPQPNNSDWIQGHTRKEMGQSLDSANTSFTAILSSPDGELVDVACEDLELYVSRNNDMLTPTPDSSPRSTSSPSQSKNGSFTPRTANILKPLMSPPSREEIMATLLDHDLSETIYQEPFCSNPSDVPEKPREIGGRLLMVETRLANDLAEFEGDFSLEGLRLWKTAFSAMTQNPRPGSPLRSGQGVVNKGSSNSPKMVEDKKIVIMPCKCAPSRQLVQVWLQAKEEYERSKKLPKTKPTGVVKSAENFSSSVNPDDKPVVPPKMDVSPCILPTTAHTKEDVDNSQIALQAPTTGCSQTASESQMLPPVASASDPEKDEDDDDNYYISYSSPDSPVIPPWQQPISPDSKALNGDDRPSSPVEELPSLAFENFLKPIKDGIQKSPCSEPQEPLVISPINTRARTGKCESLCFHSTPIIQRKLLERLPEAPGLSPLSTEPKTQKLSNKKGSNTDTLRRVLLTQAKNQFAAVNTPQKETSQIDGPSLNNTYGFKVSIQNLQEAKALHEIQNLTLISVELHARTRRDLEPDPEFDPICALFYCISSDTPLPDTEKTELTGVIVIDKDKTVFSQDIRYQTPLLIRSGITGLEVTYAADEKALFHEIANIIKRYDPDILLGYEIQMHSWGYLLQRAAALSIDLCRMISRVPDDKIENRFAAERDEYGSYTMSEINIVGRITLNLWRIMRNEVALTNYTFENVSFHVLHQRFPLFTFRVLSDWFDNKTDLYRWKMVDHYVSRVRGNLQMLEQLDLIGKTSEMARLFGIQFLHVLTRGSQYRVESMMLRIAKPMNYIPVTPSVQQRSQMRAPQCVPLIMEPESRFYSNSVLVLDFQSLYPSIVIAYNYCFSTCLGHVENLGKYDEFKFGCTSLRVPPDLLYQVRHDITVSPNGVAFVKPSVRKGVLPRMLEEILKTRFMVKQSMKAYKQDRALSRMLDARQLGLKLIANVTFGYTSANFSGRMPCIEVGDSIVHKARETLERAIKLVNDTKKWGARVVYGDTDSMFVLLKGATKEQSFKIGQEIAEAVTATNPKPVKLKFEKVYLPCVLQTKKRYVGYMYETLDQKDPVFDAKGIETVRRDSCPAVSKILERSLKLLFETRDISLIKQYVQRQCMKLLEGKASIQDFIFAKEYRGSFSYKPGACVPALELTRKMLTYDRRSEPQVGERVPYVIIYGTPGVPLIQLVRRPVEVLQDPTLRLNATYYITKQILPPLARIFSLIGIDVFSWYHELPRIHKATSSSRSEPEGRKGTISQYFTTLHCPVCDDLTQHGICSKCRSQPQHVAVILNQEIRELERQQEQLVKICKNCTGCFDRHIPCVSLNCPVLFKLSRVNRELSKAPYLRQLLDQF

SEQ ID NO: 1873 - DNA, 2394 bp, Homo sapiens
gaattccgggctcggagcctcggcggaccttgctgcctctgtctctttaacgcgagaggaagcgatgcagaggggtggaaaatggcagagctgcagatgttactagaggaggagatcccgtctggcaagagggcgctgatcgagagttaccagaacctgactcgggtggcagactactgtgaaaacaactacatacaggctacagacaagagaaaagctttagaggagaccaaagcctatacaacccaatctctagctagtgttgcttatcaaataaatgcattggccaacaatgtactccagttgctggatatccaagcctctcagcttcggagaatggagtcttccatcaatcatatctcacagactgtggatattcataaggagaaagtggcacgaagagagattggtattttgacaacaaataagaatacatcaagaactcacaaaataatagcacctgcgaatatggagcgccctgtaaggtatattcggaaacctatcgattacacagttctggatgatgtgggccatggtgtcaagtggctaaaagccaagcatggaaataaccagcctgcaagaactggcacactgtcgagaacaaatcctcttactcagaaaccgccaagtcctcccatgtcaggccggggaacactgggacggaatactccttataaaaccctggaacctgttaaacccccaacagttcctaatgactatatgaccagtcctgctaggcttggaagtcagcatagtccaggcaggacagcatctttaaatcagagaccaaggacacacagtggaagtagtggaggaagtggaagtcgagaaaacagtggtagcagtagtattggcattcccattgctgtgcctacaccttcgccacccactattggaccagaaaacatttctgtccctcctccttctggagctccaccagcaccacctctggcaccacttctcccagtgagcactgtgatagcagccccgggctcagctcctggttcccagtatggcacaatgaccaggcagatatctcgacacaactctactacttcttcgacatcttctggtggatacagacgaactccctctgtgactgctcaattttctgctcagcctcatgttaatggaggtccactttattctcaaaattcaatttctattgctccaccccctccccctatgcctcagttgactccacagatacctctcacaggcttcgtggccagggtgcaggaaaacattgctgatagtccaactccaccgccaccacctccaccagatgacattcccatgtttgatgactttccacctcccccaccaccaccaccagtggattatgaagatgaggaggctgcagtagttcagtataatgatccatatgcagatggggatcctgcttgggcccccaagaattatattgagaaagttgttgcaatatatgattatacaaaagacaaggatgatgagctgtcatttatggagggtgcaatcatttatgttataaagaagaatgatgatggctggtatgaaggagtctgcaatcgagtgactggtctgttccctgggaactatgttgaatcaatcatgcactatactgattaatttttttttttcttttgaagtagattcttattactcagtcatactgtgggactattatggttaacagaactgtcttaatatgttttaaaatgtgcccatattttcagaacatgctgttttattggtaaattgaatgtctacctgtaagcataaatctttgaggcagtttatgtattgctgaatagcaatttatacaagaagctgtccataactgattatgcttatgtacttacttacacatttttaactttatgaccagcctaaatattctggggggagtggggtataatatttaacgaatcatgattcaggttgtaccattacatgtttcagtgcagcatggttactaacgctatgtcagactaatattaaaatcagaaaatttaaatgctggtgctggtcagactttttttgttagattctctcatttaaaaaaaatactgtttgtttaaagcatgcataaaaatttatgtattgaaatatacttaaaaattcaagatgcttcccatttgtgtaatatttacctggaggactccgtacttaggtgtcttaacgtggattgggtttcccaggtttccatgtggaacaagccaaaagaggattatttgtaatgttgtaatttgtacctaagttttttaatgagtggaatttgcattataaactttttccatttataaaaacataagtggacccaaggtttttgtcctttccttcactgatttgcttttaaaaaaataaaagataatgatttattggaaaaaaaaaaaaaaaaaaaaaaaaaaaaaa

SEQ ID NO: 1874 - protein, 508 aa, Homo sapiens
MAELQMLLEEEIPSGKRALIESYQNLTRVADYCENNYIQATDKRKALEETKAYTTQSLASVAYQINALANNVLQLLDIQASQLRRMESSINHISQTVDIHKEKVARREIGILTTNKNTSRTHKIIAPANMERPVRYIRKPIDYTVLDDVGHGVKWLKAKHGNNQPARTGTLSRTNPLTQKPPSPPMSGRGTLGRNTPYKTLEPVKPPTVPNDYMTSPARLGSQHSPGRTASLNQRPRTHSGSSGGSGSRENSGSSSIGIPIAVPTPSPPTIGPENISVPPPSGAPPAPPLAPLLPVSTVIAAPGSAPGSQYGTMTRQISRHNSTTSSTSSGGYRRTPSVTAQFSAQPHVNGGPLYSQNSISIAPPPPPMPQLTPQIPLTGFVARVQENIADSPTPPPPPPPDDIPMFDDFPPPPPPPPVDYEDEEAAVVQYNDPYADGDPAWAPKNYIEKVVAIYDYTKDKDDELSFMEGAIIYVIKKNDDGWYEGVCNRVTGLFPGNYVESIMHYTD

SEQ ID NO: 1875 - DNA, 3302 bp, Homo sapiens
cggtgctgccgccgttgccgggagccgcggagacaagtcattacgttttcatttctcacaactgggctgagcacaactgaaccatgggggaacacagtccagacaacaacatcatctactttgaggcagaggaagatgagctgacccccgatgataaaatgctcaggtttgtggataaaaacggactggtgccttcctcatctggaactgtttatgataggaccactgttcttattgagcaggaccctggcactttggaggatgaagatgacgacggacagtgcggagaacacttgccttttctagtagggggtgaagagggctttcacctgatagatcatgaagcaatgtcccagggttatgtgcagcacattatctcaccagatcagattcatttgacaataaaccctggttccacacccatgccaagaaatattgaaggtgcaaccctcactctgcagtcggaatgtccggaaacaaaacgtaaagaagtaaagcggtaccaatgtacctttgagggctgtccccgcacctacagcacagcaggcaacctgcgaacccaccagaagactcaccgaggagagtacacctttgtctgtaatcaggagggctgtggcaaagccttccttacctctcacagcctcaggatccacgtgcgagtgcacacgaaggagaagccatttgagtgtgacgtgcagggctgtgagaaggcattcaacacactgtacaggctgaaagcacatcagaggcttcacacagggaaaacgtttaactgtgaatctgaaggctgcagcaaatacttcaccacactcagtgatctgaggaagcacattcgaactcatacaggggaaaagccatttcggtgcgatcacgatggctgtggaaaagcatttgcagcaagccaccaccttaaaactcacgttcgtacacatactggtgaaagacccttcttctgccccagtaatggctgtgagaaaacattcagcactcaatacagtctcaaaagtcacatgaaaggtcatgataacaaaggacactcatacaatgcacttccacaacacaatggatcagaggatacaaatcactcactttgtctaagtgacttgagccttctgtccacagattctgaattgcgagaaaattccagtacgacccagggccaggacctcagcacaatttcaccagcaatcatctttgaatcaatgttccagaattcagatgatacggcaattcaggaagatcctcaacagacagcttccttgactgaaagttttaatggtgatgcagagtcagtcagtgatgttccgccatccacaggaaattcagcatctttatctcttccacttgtactgcaacctggcctctccgagccaccccagcctctactacctgcctcagctccgtctgctcctccgcctgctccctccctaggacctggctcccagcaagctgcatttggcaacccccctgctctcttacaacctccagaagtgcctgttccccacagcacacagtttgctgctaatcatcaagagtttcttccgcacccccaggcaccgcagcccattgtaccaggactttctgttgttgctggggcttctgcatcagcagcggcagtggcatcagctgtggcagcaccagccccaccacaaagtactactgagcccctgccagccatggtccagactctgcccctgggtgccaactctgtcctaactaataatcccacaataaccatcaccccaactcccaacacagctatcctgcagtccagcctagtcatgggagaacagaacttacaatggatattaaatggtgccaccagttctccacaaaaccaagaacaaattcagcaagcatctaaagttgagaaggtgttttttaccactgcagtaccagtagccagtagcccagggagctctgtccagcagattggcctcagtgttcctgtgatcatcatcaaacaagaagaggcatgtcagtgtcagtgtgcatgccgggactctgcaaaggagcgggcatccagcaggagaaagggctgctcctccccaccccctccagagccgagcccccaggctcctgatgggcccagcctgcagctcccagcgcagactttctcttcagcccctgttcccgggtcatcatcctctaccttgccctcctcctgtgagcaaagccgacaagcagagactccttcagaccctcagacagaaacattaagtgccatggatgtgtcagagtttctatccctccagagcctggacaccccgtccaatctgattcccattgaagcactactgcagggggaggaggagatgggcctcaccagcagcttctccaagtgaagggcccatgtgtgctcacctctgggaaaagcgggtgagcaggaggcatgaggtacaatgcctgccatcatgggtcagaaatttgaaggatgaagaaatctactgtttgaaatcctcacctttcagacgtattttctttattcacatcccaggagcatccattttaaggaactattctttggaaaaaaacaaaaaacaaaaaaaacaacaaaaaaagctaagttataagtgaactgtttggctgcactgtatgtcacttttgcttgttgtcatgtgaacttggaaactaaggttactcgtgtgcataaaaattctaaatgaaagggtgtggtttccatcaatctgatgctgcccatcgcttgcactggggtctttgtggatcgggcaggagttttcagtgtgttgggtgttgctccttcctatgtgtcttttgaatctgaggctgacatttgcttggaaggccagacccttgctccatcagagagggcagtggcaaaggccagtgaggcagctgtgagttggacagggttcaggtgagatggtgttgtcatttgtgcttagtgttggtggtgctcagggtggataacacgggtcgttctgcagcccgcttcagcacaaataggcagcttaaggcctggctcacaggctgtggggttgatctggctctgcagaggccctaggcagcttgttgactgctgtctgttgatgacgtgtgtgcaaagcaggctctagcaacatgatcactgtccttgccttcctggttctttctctcggttggttgccagggcttgcagatcgcagtgaattttccttggggaacatcgctgttttgtcctagagtgaacttgtggcttatggccagtgctgtttggtggtctgccttctttttaatggtattttcttcctcagagcagaagggctgcattttgcttatcagaagaaggtgcagatttaagg

SEQ ID NO: 1876 - protein, 753 aa, Homo sapiens
MGEHSPDNNIIYFEAEEDELTPDDKMLRFVDKNGLVPSSSGTVYDRTTVLIEQDPGTLEDEDDDGQCGEHLPFLVGGEEGFHLIDHEAMSQGYVQHIISPDQIHLTINPGSTPMPRNIEGATLTLQSECPETKRKEVKRYQCTFEGCPRTYSTAGNLRTHQKTHRGEYTFVCNQEGCGKAFLTSHSLRIHVRVHTKEKPFECDVQGCEKAFNTLYRLKAHQRLHTGKTFNCESEGCSKYFTTLSDLRKHIRTHTGEKPFRCDHDGCGKAFAASHHLKTHVRTHTGERPFFCPSNGCEKTFSTQYSLKSHMKGHDNKGHSYNALPQHNGSEDTNHSLCLSDLSLLSTDSELRENSSTTQGQDLSTISPAIIFESMFQNSDDTAIQEDPQQTASLTESFNGDAESVSDVPPSTGNSASLSLPLVLQPGLSEPPQPLLPASAPSAPPPAPSLGPGSQQAAFGNPPALLQPPEVPVPHSTQFAANHQEFLPHPQAPQPIVPGLSVVAGASASAAAVASAVAAPAPPQSTTEPLPAMVQTLPLGANSVLTNNPTITITPTPNTAILQSSLVMGEQNLQWILNGATSSPQNQEQIQQASKVEKVFFTTAVPVASSPGSSVQQIGLSVPVIIIKQEEACQCQCACRDSAKERASSRRKGCSSPPPPEPSPQAPDGPSLQLPAQTFSSAPVPGSSSSTLPSSCEQSRQAETPSDPQTETLSAMDVSEFLSLQSLDTPSNLIPIEALLQGEEEMGLTSSFSK

SEQ ID NO: 1877 - DNA, 629 bp, Homo sapiens
tgggagggagccatgaagcattacgaggtggagattctggacgcaaagacaagggagaagctgtgtttcttcgccgcgtggatggcctattacatcaatcaccctctctacactccccctacctacggagctcagcaggtgaaactggcgctcgccatctttgtgatctgccagctcggcaacttctccatccacatggccctgcgggacctgcggcccgctgggtccaagacgcggaagatcccataccccaccaagaaccccttcacgtggctcttcctgctggtgtcctgccccaactgcacctacgaggtggggtcctggatcggtttcgccatcatgacgcagtgtctcccagtggccctgttctccctggtgggcttcacccagatgaccatctgggccaagggcaagcaccgcagctacctgaaggagttccgggactacccgcccctgcgcatgcccatcatccccttcctgctctgagcagctcacccctgctgaggctcagcccctcaacccggtggcattctgggggaggagtggggcccacagctctccagcacccggaataaagcccgcctgtccccagtcggaacaaaaaaaaaaaaaaaaaaaaaaaaaaaaaa

SEQ ID NO: 1878 - protein, 157 aa, Homo sapiens
MKHYEVEILDAKTREKLCFFAAWMAYYINHPLYTPPTYGAQQVKLALAIFVICQLGNFSIHMALRDLRPAGSKTRKIPYPTKNPFTWLFLLVSCPNCTYEVGSWIGFAIMTQCLPVALFSLVGFTQMTIWAKGKHRSYLKEFRDYPPLRMPIIPFLL

SEQ ID NO: 1879 - DNA, 1139 bp, Homo sapiens
ggcacgagggagcgctgtagggagcctgtgctgtgccgcgcagttaggcagcagcagccgcggagcagtagccgccgtgggagggagccatgaagcattacgaggtggagattctggacgcaaagacaagggagaagctgtgtttcttggacaaggtggagccccacgccaccattgcggagatcaagaacctcttcactaagacccatccgcagtggtaccccgcccgccagtccctccgcctggaccccaagggcaagtccctgaaggatgaggatgttctgcagaagctgcccgtgggcaccacggccacactgtacttccgggacctgggggcccagatcagctgggtgacggtcttcctaacagagtacgcggggccccttttcatctacctgctcttctacttccgagtgcccttcatctatggccacaaatatgactttacgtccagtcggcatacagtggtgcacctcgcctgcatctgtcactcattccactacatcaagcgcctgctggagacgctcttcgtgcaccgcttctcccatggcactatgcctttgcgcaacatcttcaagaactgcacctactactggggcttcgccgcgtggatggcctattacatcaatcaccctctctacactccccctacctacggagctcagcaggtgaaactggcgctcgccatctttgtgatctgccagctcggcaacttctccatccacatggccctgcgggacctgcggcccgctgggtccaagacgcggaagatcccataccccaccaagaaccccttcacgtggctcttcctgctggtgtcctgccccaactacacctacgaggtggggtcctggatcggtttcgccatcatgacgcagtgtctcccagtggccctgttctccctggtgggcttcacccagatgaccatctgggccaagggcaagcaccgcagctacctgaaggagttccgggactacccgcccctgcgcatgcccatcatccccttcctgctctgagcgctcacccctgctgaggctcagcccctcaacccggtggcattctgggggaggagtggggcccacagctctccagcacccggaataaagcccgcctgccccagtcggaaaaaaaaaaaaaaa

SEQ ID NO: 1880 - protein, 308 aa, Homo sapiens [sequence omitted]

SEQ ID NO: 1881 - DNA, 918 bp, Homo sapiens
cccacgcgtccgggggtgagtggtacccaacgggccggggcgccgcgtccgcaggaagaggcgcggggtgcaggcttgtaaacatataacataaaaatggcttccaaaagagctctggtcatcctggctaaaggagcagaggaaatggagacggtcatccctgtagatgtcatgaggcgagctgggattaaggtcaccgttgcaggcctggctggaaaagacccagtacagtgtagccgtgatgtggtcatttgtcctgatgccagccttgaagatgcaaaaaaagagggaccatatgatgtggtggttctaccaggaggtaatctgggtgcacagaatttatctgagtctgctgctgtgaaggagatactgaaggagcaggaaaaccggaagggcctgatagccgccatctgtgcaggtcctactgctctgttggctcatgaaataggttttggaagtaaagttacaacacaccctcttgctaaagacaaaatgatgaatggaggtcattacacctactctgagaatcgtgtggaaaaagacggcctgattcttacaagccgggggcctgggaccagcttcgagtttgcgcttgcaattgttgaagccctgaatggcaaggaggtggcggctcaagtgaaggctccacttgttcttaaagactagagcagcgaactgcgacgatcacttagagaaacaggccgttaggaatccattctcactgtgttcgctctaaacaaaacagtggtaggttaatgtgttcagaagtcgctgtccttactacttttgcggaagtatggaagtcacaactacacagagatttctcagcctacaaattgtgtctatacatttctaagccttgtttgcagaataaacagggcatttagcaaaaaaaaaaaaaaaaaaaaaaaaaaaaaa

SEQ ID NO: 1882 - protein, 189 aa, Homo sapiens
MASKRALVILAKGAEEMETVIPVDVMRRAGIKVTVAGLAGKDPVQCSRDVVICPDASLEDAKKEGPYDVVVLPGGNLGAQNLSESAAVKEILKEQENRKGLIAAICAGPTALLAHEIGCGSKVTTHPLAKDKMMNGGHYTYSENRVEKDGLILTSRGPGTSFEFALAIVEALNGKEVAAQVKAPLVLKD

SEQ ID NO: 1883 - DNA, 2764 bp, Homo sapiens
gggtgctcgggctgccgtccgctccgccagaagcaccgagcagccgagccggggcccgccgccctcctcctccatgaggcccgagtgaggcgcggcggctatagccgacccgcggcgccttccccccgcgtcctatcgcgagcgcagcggcagcggcccctggaggaggaggcggaggaggaggagcatgtcggacggtttcgatcgggccccaggtgctggtcggggccggagccggggcctgggccgcggagggggcgggcctgagggcggcggtttcccgaacggagcggggcctgctgagcgggcgcggcaccagccgccgcaacccaaagccccgggcttcctgcagccaccgccgctgcgccagcccaggacgaccccgccgccaggggcccagtgcgaggtccccgccagcccccagcggccttcccggcccggggcgctcccagagcaaacgaggcccctgagagctccacctagttcacaggataaaatcccacagcagaactcggagtcagcaatggctaagccccaggtggttgtagctcctgtattaatgtctaagctgtctgtgaatgcccctgaattttacccttcaggttattcttccagttacacagaatcctatgaggatggttgtgaggattatcctactctatcagaatatgttcaggattttttgaatcatcttacagagcagcctggcagttttgaaactgaaattgaacagtttgcagagaccctgaatggttgtgttacaacagatgatgctttgcaagaacttgtggaactcatctatcaacaggccacatctatcccaaatttctcttatatgggagctcgcctgtgtaattacctgtcccatcatctgacaattagcccacagagtggcaacttccgccaattgctacttcaaagatgtcggactgaatatgaagttaaagatcaagctgcaaaaggggatgaagttactcgaaaacgatttcatgcatttgtactctttctgggagaactttatcttaacctggagatcaagggaacaaatggacaggttacaagagcagatattcttcaggttggtcttcgagaattgctgaatgccctgttttctaatcctatggatgacaatttaatttgtgcagtaaaattgttaaagttgacaggatcagttttggaagatgcttggaaggaaaaaggaaagatggatatggaagaaattattcagagaattgaaaacgttgtcctagatgcaaactgcagtagagatgtaaaacagatgctcttgaagcttgtagaactccggtcaagtaactggggcagagtccatgcaacttcaacatatagagaagcaacaccagaaaatgatcctaactactttatgaatgaaccaacattttatacatctgatggtgttcctttcactgcagctgatccagattaccaagagaaataccaagaattacttgaaagagaggacttttttccagattatgaagaaaatggaacagatttatccggggctggtgatccatacttggatgatattgatgatgagatggacccagagatagaagaagcttatgaaaagttttgtttggaatcagagcgtaagcgaaaacagtaaagttaaatttcagcatatcagttttataaagcagtttaggtatggtgatttagcagaacacaagagagcaagaaaatgtgtcacatctataccaaattaaggatgttgagttatgttactaatgtatgcaactttaattttgtttaacactatctgccaaaataaactttattccctataacttaaaatgtgtatatatatataatagtttattatgtacagttaattctactgttttggctgcaataaaatcgattttgaaataaatgaaatgttgaaaattttgctagttggttagatgcttatcctttaaattctacttttcttgaggggaaaaagtcttcgcctggaaatacatattactgcaaaaatgtagcatccttttttaggtaggagtattatagctttcattttagtttgacatttagtgtcccaatgaattgaatttcaaatatgaatcataatcttgaaaatctttagcactaaagtcttggaatatatcaacaactgatttacatatgcagatgctatttacatatgcagatgctatttgataccaagggctttttaaatgtcatgggggggaaaaacccaacttggttgaactcccagctaaacaaccaagacttcactgaagatttattccaattctagaattgttctttttttattttttattttttcaactgactaacttcattaccttaaagcctagaacattattctgctttatttatatggctttctcaattttattttgtagcatgggttgaatcgaactttttactagagaattttactagatatttgtcattcaagttttcatctgctttataattgatacaccttgagggtcacttttctaatacttttacctataatgtggtacccacctcagcccctaataaataatatttttaccctaatgtcaaatctttttcccaggctaactaaaaactgtgtacaaaaggattgcttgtaaatatgcatgtaaatagttctgttaataacccactgttttacatttggtacatctgtgtctgctaatacagttagctttctcacttttctgcttgtttgttcagtctgaattaaaattagactttgaaaataaagcttaaatagttgtttcctcta

SEQ ID NO: 1884 - protein, 479 aa, Homo sapiens
MSDGFDRAPGAGRGRSRGLGRGGGGPEGGGFPNGAGPAERARHQPPQPKAPGFLQPPPLRQPRTTPPPGAQCEVPASPQRPSRPGALPEQTRPLRAPPSSQDKIPQQNSESAMAKPQVVVAPVLMSKLSVNAPEFYPSGYSSSYTESYEDGCEDYPTLSEYVQDFLNHLTEQPGSFETEIEQFAETLNGCVTTDDALQELVELIYQQATSIPNFSYMGARLCNYLSHHLTISPQSGNFRQLLLQRCRTEYEVKDQAAKGDEVTRKRFHAFVLFLGELYLNLEIKGTNGQVTRADILQVGLRELLNALFSNPMDDNLICAVKLLKLTGSVLEDAWKEKGKMDMEEIIQRIENVVLDANCSRDVKQMLLKLVELRSSNWGRVHATSTYREATPENDPNYFMNEPTFYTSDGVPFTAADPDYQEKYQELLEREDFFPDYEENGTDLSGAGDPYLDDIDDEMDPEIEEAYEKFCLESERKRKQ

SEQ ID NO: 1885 - DNA, 693 bp, Homo sapiens
tccccgcccttctcttttctacagtatctgttacctcagtcagattgaggatgcacatatactgggaaaataatcgacttccagcgtccctcatgtagtctctacctgattcaggaatctctaacccagtatcggaacgttaagcggcttctccgctttcctgccgtgagaaactcgaggtgaccaacctccgtttccggttggctccggttgcagagttgagtgtcctgagaggtcagattgctgtcagacatggcccatgaacatggacatgagcatggacatcataaaatggaacttccagattatagacaatggaagatagaagggacaccattagaaactatccagaagaagctggctgcaaaagggctaagggatccatggggccgcaatgaagcttggagatacatgggtggctttgcaaagagtgtttccttttctgatgtattctttaaaggattcaaatggggatttgctgcatttgtggtagctgtaggagctgaatattacctggagtccctgaataaagataagaagcatcactgaagataatacctggaagcatcatagtggtttcttaactctccaaaataagatttcttctctgtagcctacttgtctggtttatcccttacagaatattagtaaagatttaatcaattaaaatatatataaaaaaaaaaaaaaaaa

SEQ ID NO: 1886 - protein, 98 aa, Homo sapiens
MAHEHGHEHGHHKMELPDYRQWKIEGTPLETIQKKLAAKGLRDPWGRNEAWRYMGGFAKSVSFSDVFFKGFKWGFAAFVVAVGAEYYLESLNKDKKHH

SEQ ID NO: 1887 - DNA, 5172 bp, Homo sapiens
tggtcttgaactcctgaccttgtgatccgctcgcctcagcctcccaaagtgctgggattacaggcatgagccaccgtgcctgtcctagaaccactggtaactcttaactgagacaagatttcgccatgttgcccaggctggtctcgaacttctgagctcaagcgatctacctgcctcgtcctcccaaagtgttggaattgcaggtgtgagccactgcacccggcccttgcctcatgtttgaatgataatttacctgggcataaaattctggacacttgtggtggcacgagctgtctgcttttctgtggagactgcgggttgcagacaccagcagccccctattgctgcacgtcaggtgtcctccacctcagtactgtggacatctcgggccgcatagccctgttgcgcgggcatcctgtgcgttgcaggagatgcagcagcatccatgaccgcaacccatcagagtgttctaagaacggaagcatctgggctggatggaatttagcatcaagcagagtcccctttctgttcagagtgttgtaaagtgcataaagatgaagcaggcaccagaaatcctcggcagtgccaacgggaagactccgagctgcgaggtgaaccgcgagtgttctgtgttcctcagcaaagcccagctctccagtagcctgcaggagggggtcatgcagaagtttaacggccacgacgccctgccctttattccagccgacaagctgaaagatcttacttcccgggtgtttaatggagaacccggcgcacacgatgccaaactgcgttttgagtcccaggaaatgaaagggattgggacaccccctaacactacccctatcaaaaatggctctccagaaattaagctgaaaatcaccaaaacatacatgaatgggaagcctctctttgaatcttccatttgtggtgacagtgctgctgatgtgtctcagtcagaagaaaatggacaaaaaccagaaaacaaggcgagaaggaacaggaagaggagcataaaatatgactccttgctggagcagggccttgtcgaagcagctcttgtgtctaagatctcaagtccttcagataaaaagattccagctaagaaagagtcttgtccaaacactggaagagacaaagaccacctgttgaaatacaacgttggtgatttggtgtggtccaaagtgtcgggttacccttggtggccttgcatggtttctgcagatccactccttcacagctataccaaacttaaaggtcagaaaaagagtgcacgccagtatcacgtacagttctttggtgacgccccagaaagagcttggatatttgagaagagcctcgtagcttttgaaggagaaggacagtttgaaaaattatgccaggaaagtgccaagcaggcacccacgaaagctgagaaaattaagctattgaaaccaatttcagggaaattgagggcccagtgggaaatgggcattgttcaagcagaagaagctgcaagcatgtcagtggaggagcggaaagccaagttcacctttctctatgtgggggaccagcttcatctcaaccctcaagtagccaaggaggctggcattgctgcagagtctttgggagaaatggcagaatcctcaggagtcagtgaagaagctgctgaaaaccccaagtctgtgagagaagagtgcattcccatgaagagaaggcggagggccaaactgtgtagctctgcagagaccctggagagtcaccccgacatagggaagagtactcctcaaaagacggcagaggctgaccccagaagaggagtagggtctcctcctgggaggaagaagaccacagtctccatgccacgaagcaggaagggagatgcagcatcccagtttttggtcttctgtcaaaaacacagggatgaggtggtagctgagcacccagatgcttcaggtgaggagattgaagagctgctcaggtcacagtggagtctgctgagtgagaagcagagagcacgctacaacaccaagtttgccctggtggcccctgtccaggctgaagaagactctggtaatgtaaatgggaaaaaaagaaaccacacaaagaggatacaggaccctacagaagatgctgaagctgaggacacacccaggaaaagactcaggacggacaagcacagtcttcggaagagagacacaatcactgacaaaacggccagaacaagctcttacaaggccatggaggcagcctcctcgctcaagagccaggcagcaacgaaaaatctgtctgatgcatgtaaaccactgaagaagcgaaatcgggcttccacggcagcatcttcagctcttgggtttagcaaaagttcatctccttctgcatccttaactgagaatgaggtaaaataataataataacgataaccatggcattggtatgaaggccatttagctgcccacgctgcagtgtgagtaatgctcagacttcataagcgcagcattggtgctcactgccagtgcagatgttttagggcctcttggctaactcagattcatgaaatggacaaacagtgcactatgttagtttatttgagcactttttatacacacgcacacagtgtctgtgtacatgtacagatatacttcagtcttgatgcagtttcatagttcttaaaatctgtctgaagaatgttgtgttctgtgtagccctcacactgtaagagttcacatggaagtaagtctgcgttggttctgaaagggcacagtgtcagttgagctgacatatactgggtggggtggaaggcgactcacacaccacacctgattcctgttgcttccagacctaggctcatggaggaagccaaagatttctttgttctcatgcatttcatggctttggtcctttaaattctggcacatttttagttacttgagtgttgaggtgagtcagaactaccattgtaatatgactcctgtgttctggacttgcagagtacatgatagcaaaataaagccatttggggctgctgcctgccatcattgtaacatgacacttagactttattatcaaacctaaattttttgccgttgccaaaaacaacaaatagccacagaacgtaggtgtgacacttttttgttcggaggtagttttggtttcctgatttttagggattaccttcatagagctttggagttttaatttcttgttatttggttctccgtgatgctgtttttctcattgtagacatgggtcctgtttttgtcatgtttatgaggagatgataactgggggcccttttggaacagggtagtgaggcaagggttggacaggccccttactcttgctgagtcagaaggcggcacttctggccaggtctctgccatggtccccaggaaggatggggtgtgcctcagttgtttccactcattagaggagtgtaggccttccagtgcaggaaggtcagggacctaggcaacctgggcggggctcatagagctctgcggcttgccactctgaatcctcagcgaccactcctccgagtgggattttctgcagggactcaaaccaactcagtggtggtcgagacctgttcacggatggtgggactggggctgctttacagtttgatacgtgtagataattaagcattttgtgatgtttggacacactggagaaaaggcagtaagaattatttactgaaacatctaggagcttactgaaatatgaaaaggcaaattttatacaaattatttttcctttttcctttctttcttgtccaagttcaggttaaaatcttagaaaattaaatgaaaggtcatttacagttccaaagaagaatattaaacatttttcacttaagttgagatttttgctttaaagagcttttaatgagtttttctgttatcataattttggtccggttattcacttgagttgttgcttatactgttgtcaggtacagtagagagaacatggagcctgctgagatcttctctgttattcctgatcctaagtcatgtatatcgaaggctttgatttagagtaatgcatgaggccagtgtagcggggtcgaggcctgcccatgagtcaggggagctcagtctccctggcctaggcagttgtcctgaccttgagaagacatagatgaagcattttatcatcattagacttaaattttaattcttcagaatgtcagaagttgataggttgttaaatacatttatataatacattaaatatgtgaaattaatacaccttcctacattttgaaggtgatgcatagatcccatagtgtgcatcatgttccttatatgaaaacgtttaaattactgggtcttttccattaaactacttttgtatggcttagataaatcttccattagtgttcatttttatagaattatgctgttaaaactactttaggtgaacaaataaacttgtctattatatattaacgcgactgaactacagtaaatgtttgtgatgtttccaatgctgaatgcctgttagcatatgaggcaaagtgtagtgttataaaaaacagcctgttgactgctgggcccgattctgatatgagttaggtgaccatgagaattgctgtttgaggtccacactgacacacacccattgggtcacaccccctttgcatgtttgtatttcctccctttcatcacatttgtttgaaataaggtacttttatagggttggtatttcagaacactttaggtcatgttgtagtttaaattcttcttgaaaaaggtatatgtgataaataaaaatttttattggaataattattacatggtactacatcaccctgaggaagagaataaattaaaattacacacttgcatgacaaaggcctgtgaaggaattaatgtgatttaagtgttttgtaacttcattttttattcctttagtagagcaaattcttatttttttcgccttcactggtaacagcttttgtgggagcccacaccagtcaagttggatttgaacccagctgctctgtactgcacttagaatgatgtaatattccaggatgctgctgcaggtggcgtatcatcgtacacactcagtgacatttctatcacaatcattttatggaagatgtgtgataatctgtttttactggtattaataaacacatacaatgaagaaaacagataacaaattttaagaccaaggtaagataac

SEQ ID NO: 1888 - protein, 629 aa, Homo sapiens
MEFSIKQSPLSVQSVVKCIKMKQAPEILGSANGKTPSCEVNRECSVFLSKAQLSSSLQEGVMQKFNGHDALPFIPADKLKDLTSRVFNGEPGAHDAKLRFESQEMKGIGTPPNTTPIKNGSPEIKLKITKTYMNGKPLFESSICGDSAADVSQSEENGQKPENKARRNRKRSIKYDSLLEQGLVEAALVSKISSPSDKKIPAKKESCPNTGRDKDHLLKYNVGDLVWSKVSGYPWWPCMVSADPLLHSYTKLKGQKKSARQYHVQFFGDAPERAWIFEKSLVAFEGEGQFEKLCQESAKQAPTKAEKIKLLKPISGKLRAQWEMGIVQAEEAASMSVEERKAKFTFLYVGDQLHLNPQVAKEAGIAAESLGEMAESSGVSEEAAENPKSVREECIPMKRRRRAKLCSSAETLESHPDIGKSTPQKTAEADPRRGVGSPPGRKKTTVSMPRSRKGDAASQFLVFCQKHRDEVVAEHPDASGEEIEELLRSQWSLLSEKQRARYNTKFALVAPVQAEEDSGNVNGKKRNHTKRIQDPTEDAEAEDTPRKRLRTDKHSLRKRDTITDKTARTSSYKAMEAASSLKSQAATKNLSDACKPLKKRNRASTAASSALGFSKSSSPSASLTENEVK

SEQ ID NO: 1889 - DNA, 8458 bp, Homo sapiens
tggtcttgaactcctgaccttgtgatccgctcgcctcagcctcccaaagtgctgggattacaggcatgagccaccgtgcctgtcctagaaccactggtaactcttaactgagacaagatttcgccatgttgcccaggctggtctcgaacttctgagctcaagcgatctacctgcctcgtcctcccaaagtgttggaattgcaggtgtgagccactgcacccggcccttgcctcatgtttgaatgataatttacctgggcataaaattctggacacttgtggtggcacgagctgtctgcttttctgtggagactgcgggttgcagacaccagcagccccctattgctgcacgtcaggtgtcctccacctcagtactgtggacatctcgggccgcatagccctgttgcgcgggcatcctgtgcgttgcaggagatgcagcagcatccatgaccgcaacccatcagagtgttctaagaacggaagcatctgggctggatggaatttagcatcaagcagagtcccctttctgttcagagtgttgtaaagtgcataaagatgaagcaggcaccagaaatcctcggcagtgccaacgggaagactccgagctgcgaggtgaaccgcgagtgttctgtgttcctcagcaaagcccagctctccagtagcctgcaggagggggtcatgcagaagtttaacggccacgacgccctgccctttattccagccgacaagctgaaagatcttacttcccgggtgtttaatggagaacccggcgcacacgatgccaaactgcgttttgagtcccaggaaatgaaagggattgggacaccccctaacactacccctatcaaaaatggctctccagaaattaagctgaaaatcaccaaaacatacatgaatgggaagcctctctttgaatcttccatttgtggtgacagtgctgctgatgtgtctcagtcagaagaaaatggacaaaaaccagaaaacaaggcgagaaggaacaggaagaggagcataaaatatgactccttgctggagcagggccttgtcgaagcagctcttgtgtctaagatctcaagtccttcagataaaaagattccagctaagaaagagtcttgtccaaacactggaagagacaaagaccacctgttgaaatacaacgttggtgatttggtgtggtccaaagtgtcgggttacccttggtggccttgcatggtttctgcagatccactccttcacagctataccaaacttaaaggtcagaaaaagagtgcacgccagtatcacgtacagttctttggtgacgccccagaaagagcttggatatttgagaagagcctcgtagcttttgaaggagaaggacagtttgaaaaattatgccaggaaagtgccaagcaggcacccacgaaagctgagaaaattaagctattgaaaccaatttcagggaaattgagggcccagtgggaaatgggcattgttcaagcagaagaagctgcaagcatgtcagtggaggagcggaaagccaagttcacctttctctatgtgggggaccagcttcatctcaaccctcaagtagccaaggaggctggcattgctgcagagtctttgggagaaatggcagaatcctcaggagtcagtgaagaagctgctgaaaaccccaagtctgtgagagaagagtgcattcccatgaagagaaggcggagggccaaactgtgtagctctgcagagaccctggagagtcaccccgacatagggaagagtactcctcaaaagacggcagaggctgaccccagaagaggagtagggtctcctcctgggaggaagaagaccacagtctccatgccacgaagcaggaagggagatgcagcatcccagtttttggtcttctgtcaaaaacacagggatgaggtggtagctgagcacccagatgcttcaggtgaggagattgaagagctgctcaggtcacagtggagtctgctgagtgagaagcagagagcacgctacaacaccaagtttgccctggtggcccctgtccaggctgaagaagactctggtaatgtaaatgggaaaaaaagaaaccacacaaagaggatacaggaccctacagaagatgctgaagctgaggacacacccaggaaaagactcaggacggacaagcacagtcttcggaagagagacacaatcactgacaaaacggccagaacaagctcttacaaggccatggaggcagcctcctcgctcaagagccaggcagcaacgaaaaatctgtctgatgcatgtaaaccactgaagaagcgaaatcgggcttccacggcagcatcttcagctcttgggtttagcaaaagttcatctccttctgcatccttaactgagaatgaggtctcggacagcccgggagacgagccctcggagtccccatacgaaagtgcagacgaaacacaaactgaagtatctgtctcatccaaaaagtctgagcgaggagtgactgccaaaaaggagtatgtgtgccagctgtgtgagaagccgggcagcctcctgctctgtgaaggaccctgctgcggagctttccacctcgcctgccttgggctttcccggaggccagaagggaggttcacctgcagcgagtgtgcctcaggtgtcgcccggcacagtctggggtctgtgaggatgatgagaggacacctgcacagccgtggcccttcctgcctactcaccgggcccaaggagtctcctatctcacgtcagaacacttcctgggtcaggaagacacctggagagtctcccaggccatggcagccccacagcagcacctcacttatgggagtgtctgtctgcctgcccagaatgataagtgactgctccaccactggccagctgctctcaaggaggaaaggcctcttttcataggagccccttctttcaagcttcttgccagttagactgggcctccccagccaggctgcctagtaagattctcctgtatttcaggtgaagctggagctcagatcgcagcaaggtaatccttgatggctggatctttttgctggagaatgcttggactagtgagcaaggttggaaacagggccaggtgctttagcagcgtggctgcctctgaagaggagttgcttgattttagtggctcagaactgcaatttaattcttgttctttgcacctctctctccaccccttctttaactttttgttagggattcactcatgtttcgtgtgtaaagagagcaagacagatgttaagcgctgtgtggtaactcagtgtggaaaattttaccatgaggcttgtgtgaaaaaataccctctgactgtatttgagagccgaggtttccgctgccccctccacagctgtgtgagctgccatgcttccaacccttcaaacccaaggccgtcaaaaggtaaaatgatgcggtgtgtccgctgccccgttgcctatcacagcggggatgcttgtctggcagcaggatgctcagtgatcgcctccaacagcatcatctgcactgcccacttcactgctcggaaggggaagcgacaccacgcccacgtcaacgtgagctggtgcttcgtgtgctccaaaggggggagccttctgtgctgtgagtcctgcccagcggccttccaccctgactgcctgaacatcgagatgcctgacggcagctggttctgcaatgactgcagggctgggaagaagctgcacttccaggatatcatttgggtgaaacttgggaactacagatggtggccggcagaagtttgccatcccaaaaatgttcccccaaatattcagaaaatgaagcacgagattggagaattccctgtgtttttctttgggtctaaagattattactggacgcatcaggcgcgagtgttcccgtacatggagggggaccggggcagccgctaccagggggtcagagggatcggaagagtcttcaaaaacgcactgcaagaagctgaagctcgttttcgtgaaattaagcttcagagggaagcccgagaaacacaggagagcgagcgcaagcccccaccatacaagcacatcaaggtgaataagccttacgggaaagtccagatctacacagcggatatttcagaaatccctaagtgcaactgcaagcccacagatgagaatccttgtggctttgattcggagtgtctgaacaggatgctgatgtttgagtgccacccgcaggtgtgtcccgcgggcgagttctgccagaaccagtgcttcaccaagcgccagtacccagagaccaagatcatcaagacagatggcaaagggtggggcctggtcgccaagagggacatcagaaagggagaatttgttaacgagtacgttggggagctgatcgacgaggaggagtgcatggcgagaatcaagcacgcacacgagaacgacatcacccacttctacatgctcactatagacaaggaccgtataatagacgctggccccaaaggaaactactctcgatttatgaatcacagctgccagcccaactgtgagaccctcaagtggacagtgaatggggacactcgtgtgggcctgtttgccgtctgtgacattcctgcagggacggagctgacttttaactacaacctcgattgtctgggcaatgaaaaaacggtctgccggtgtggagcctccaattgcagtggattcctcggggatagaccaaagacctcgacgaccctttcatcagaggaaaagggcaaaaagaccaagaagaaaacgaggcggcgcagagcaaaaggggaagggaagaggcagtcagaggacgagtgcttccgctgcggtgatggcgggcagctggtgctgtgtgaccgcaagttctgcaccaaggcctaccacctgtcctgcctgggccttggcaagcggcccttcgggaagtgggaatgtccttggcatcattgtgacgtgtgtggcaaaccttcgacttcattttgccacctctgccccaattcgttctgtaaggagcaccaggacgggacagccttcagctgcaccccggacgggcggtcctactgctgtgagcatgacttaggggcggcatcggtcagaagcaccaagactgagaagccccccccagagccagggaagccgaaggggaagaggcggcggcggaggggctggcggagagtcacagagggcaaatagcgccaggcggccgcttggccggatccaggggcggtgcagggcggccggccctgcctgcgggagagggcgagcatgaactggcccggaggacccagctcgagccgccaggacacagacgtacaggcctcctcgggagggagcgcctccccaccactgagccatcctcagcagcgtccgctgcgtctgcactgatgaccgtctgagcccagctcagcgttcctggacaaacagcctcactcctcagcgttaccgccacacttgaatttctccgaatgtcaaggttccctcccactctatttttttaggttaaagttaattggcatatggaatgttttaatctcctctgaaatgtgtagcgtaggcttttcccaagggtcgctagaaactcgtcttcgcgttgccccctttctggctctcagcgccgtcgccactcgggagaggctgggtgaggcccgtgtgaggactgaccctggattcctcgaaactgccattgtgatcattactctgctctttggaaatggctgtatcatttttttgtactaatgtgaattgttcctcagaaacgcttcttttccatcctagtgagaagctggccctgcaggtggtggcagcaatggtgttgtaagatttcctcccgtagttttttctcctcatggatttgaatgaaatgccaataacacgtccactttcaacgtgtagtttacgcggagcactttcgaggcctggccgggttgggcctacttctcacctgggcctatcttctgaactcgctaggttcttatcaacatttgggggataactttgtatatttttttcatttggcttttctttaccagtttctgatttttattctcaatatatttttgctaaacctatttcacaaatcaccaccgactgaagtgtgtgtttactgatgcggccctgagctccatggcgaaaggagtgactttgcagggcgtgagaccgcagtctgcttagagcacaggaagtgacaacttagggagccccgtagggcgctgcaggccccggggaccccagcacgtgggtctaaagagagacggagtctagctctcctgccacccagagtggcttccatctcagcactctgtgggtctggtgatggaagatgcagtctctgctgatcacatgtgccctctgccagggcacctactgagaggtgcggtcctgggggtggaggcctgcctggcaggtgtgcgtgcctcgtacgtgtgttatgggcactggtctaggccaggtatgacacccactctcctgtgagatttcactttagtttttaaaaggtccagttctacagagtgagacctatctatctgagtactacatatgttttaagacttggttctttttttgagggatccttgaccctgggaagtctggagcaccctgagaagggggcaccatgtgtgcctttgcccacgtgtcctgaggggctgcttgtctgggagggagggagagaacattcagcagcaggtgcttttttatggccttttcttaaaataacctaagggggacacatccatcttgcagagaagtttacagaactccccttgaaaactgctgctgaggctcctgttaaattttctgtggcatcttttatgccttggtaaaaactgcagtgtctttggacctgagagtggctactccgtggttttgtgacctgtaagcgtggggttcaggggtgtgtggccctgcagggtcccacgcctccctgagcactgactggaagtttcactggctggtggctgtcccttctcccatcagggtccccagcaaagttaactacacagaggacccaggggaaacgagctgtgtagccactgacttgctcgcgcggccgtggcctctgaggggcactcgccggttaagacagggtgggagtagtgctttccagttcagactctaacttctcccaaagtgtcctaagaaaatactggatcggctcatagatttatgctccttatgatgccctaacttggaaggttgttctagggacaggccgggcagtgtccccacacacaccttagagtcgaaggccccagggccccgctgtcacttgcccaaaagatcccttccggcaggtaagggactaccaatgcttacgtcaaaacagcagaatcggctttgcagtgcactttggggagcagatattaacttatttttgtgttggacagtagtgaaatcttgtgatttttaatcgctttgataatacttccaaattttatgatttttctgaaggaaataatgcaaacattttaaatatgtttctccccctttccaaaaactgttaaactaatgagcaagtaacactaactttgaatgtctctacaatacccgttgataactcagtggagccaggctttggggtagcggccctgagcttgcagggtttctcgccactggggctgaccacgcccccagctgtgaccgtgggtgtggctggctctcggccctgcccagctttgttctgaggacgtggtgacttcctgaacatcagcttcaatcctccatcattaatgtgaagcaaaacacaaaaaccgccccaatccctcaggattccttggcatccgaaaccagcatctgcacctaaacccatacccacccgtgtgcgcccacagggggatgtgtccgaatgggcagcttaaaatgtggtcacctgtgggggaaactcttcaggcacctgaagtgagaacccagctgtccgtcctcaggccggcctttcttccggcgacacccgtccatggctggctgggtccccttcgcagtgtttgtctgtcttgacatctaaaccccggcgtgtgcagtgcccatcttccaggactaccttattttccagaattaaacctgttttataattcaagttaatgcaaatgactgtcagttgccaaatatcttgatcctgtgagtgtagttgatgactgtttgttagtcagtagagtaaaatgctgtgtccacggggtgtcacagcctcaccataccctgttgaggtgtgaaatgccccgtcagaaattaaatacaaacttaaatgtgcctattggtgtctaaacttcatacaatgtaaggtcagattccttttaggaatactgggtgctgtcaccaggtttgatagttagacttaaaaacttgaaattcactttttggggggagggatatactgaaatagagagttgagacttgccagttgggggaaaatagcatttaaaatggaaagctgtgtttggaaaattgtgtatgagtatttttgtattaaaaacattttaaaggcttttttcttaa

SEQ ID NO: 1890 - protein, 802 aa, Homo sapiens
MEFSIKQSPLSVQSVVKCIKMKQAPEILGSANGKTPSCEVNRECSVFLSKAQLSSSLQEGVMQKFNGHDALPFIPADKLKDLTSRVFNGEPGAHDAKLRFESQEMKGIGTPPNTTPIKNGSPEIKLKITKTYMNGKPLFESSICGDSAADVSQSEENGQKPENKARRNRKRSIKYDSLLEQGLVEAALVSKISSPSDKKIPAKKESCPNTGRDKDHLLKYNVGDLVWSKVSGYPWWPCMVSADPLLHSYTKLKGQKKSARQYHVQFFGDAPERAWIFEKSLVAFEGEGQFEKLCQESAKQAPTKAEKIKLLKPISGKLRAQWEMGIVQAEEAASMSVEERKAKFTFLYVGDQLHLNPQVAKEAGIAAESLGEMAESSGVSEEAAENPKSVREECIPMKRRRRAKLCSSAETLESHPDIGKSTPQKTAEADPRRGVGSPPGRKKTTVSMPRSRKGDAASQFLVFCQKHRDEVVAEHPDASGEEIEELLRSQWSLLSEKQRARYNTKFALVAPVQAEEDSGNVNGKKRNHTKRIQDPTEDAEAEDTPRKRLRTDKHSLRKRDTITDKTARTSSYKAMEAASSLKSQAATKNLSDACKPLKKRNRASTAASSALGFSKSSSPSASLTENEVSDSPGDEPSESPYESADETQTEVSVSSKKSERGVTAKKEYVCQLCEKPGSLLLCEGPCCGAFHLACLGLSRRPEGRFTCSECASGVARHSLGSVRMMRGHLHSRGPSCLLTGPKESPISRQNTSWVRKTPGESPRPWQPHSSTSLMGVSVCLPRMISDCSTTGQLLSRRKGLFS

SEQ ID NO: 1891 - DNA, 7886 bp, Homo sapiens
tggtcttgaactcctgaccttgtgatccgctcgcctcagcctcccaaagtgctgggattacaggcatgagccaccgtgcctgtcctagaaccactggtaactcttaactgagacaagatttcgccatgttgcccaggctggtctcgaacttctgagctcaagcgatctacctgcctcgtcctcccaaagtgttggaattgcaggtgtgagccactgcacccggcccttgcctcatgtttgaatgataatttacctgggcataaaattctggacacttgtggtggcacgagctgtctgcttttctgtggagactgcgggttgcagacaccagcagccccctattgctgcacgtcaggtgtcctccacctcagtactgtggacatctcgggccgcatagccctgttgcgcgggcatcctgtgcgttgcaggagatgcagcagcatccatgaccgcaacccatcagagtgttctaagaacggaagcatctgggctggatggaatttagcatcaagcagagtcccctttctgttcagagtgttgtaaagtgcataaagatgaagcaggcaccagaaatcctcggcagtgccaacgggaagactccgagctgcgaggtgaaccgcgagtgttctgtgttcctcagcaaagcccagctctccagtagcctgcaggagggggtcatgcagaagtttaacggccacgacgccctgccctttattccagccgacaagctgaaagatcttacttcccgggtgtttaatggagaacccggcgcacacgatgccaaactgcgttttgagtcccaggaaatgaaagggattgggacaccccctaacactacccctatcaaaaatggctctccagaaattaagctgaaaatcaccaaaacatacatgaatgggaagcctctctttgaatcttccatttgtggtgacagtgctgctgatgtgtctcagtcagaagaaaatggacaaaaaccagaaaacaaggcgagaaggaacaggaagaggagcataaaatatgactccttgctggagcagggccttgtcgaagcagctcttgtgtctaagatctcaagtccttcagataaaaagattccagctaagaaagagtcttgtccaaacactggaagagacaaagaccacctgttgaaatacaacgttggtgatttggtgtggtccaaagtgtcgggttacccttggtggccttgcatggtttctgcagatccactccttcacagctataccaaacttaaaggtcagaaaaagagtgcacgccagtatcacgtacagttctttggtgacgccccagaaagagcttggatatttgagaagagcctcgtagcttttgaaggagaaggacagtttgaaaaattatgccaggaaagtgccaagcaggcacccacgaaagctgagaaaattaagctattgaaaccaatttcagggaaattgagggcccagtgggaaatgggcattgttcaagcagaagaagctgcaagcatgtcagtggaggagcggaaagccaagttcacctttctctatgtgggggaccagcttcatctcaaccctcaagtagccaaggaggctggcattgctgcagagtctttgggagaaatggcagaatcctcaggagtcagtgaagaagctgctgaaaaccccaagtctgtgagagaagagtgcattcccatgaagagaaggcggagggccaaactgtgtagctctgcagagaccctggagagtcaccccgacatagggaagagtactcctcaaaagacggcagaggctgaccccagaagaggagtagggtctcctcctgggaggaagaagaccacagtctccatgccacgaagcaggaagggagatgcagcatcccagtttttggtcttctgtcaaaaacacagggatgaggtggtagctgagcacccagatgcttcaggtgaggagattgaagagctgctcaggtcacagtggagtctgctgagtgagaagcagagagcacgctacaacaccaagtttgccctggtggcccctgtccaggctgaagaagactctggtaatgtaaatgggaaaaaaagaaaccacacaaagaggatacaggaccctacagaagatgctgaagctgaggacacacccaggaaaagactcaggacggacaagcacagtcttcggaagagagacacaatcactgacaaaacggccagaacaagctcttacaaggccatggaggcagcctcctcgctcaagagccaggcagcaacgaaaaatctgtctgatgcatgtaaaccactgaagaagcgaaatcgggcttccacggcagcatcttcagctcttgggtttagcaaaagttcatctccttctgcatccttaactgagaatgaggtctcggacagcccgggagacgagccctcggagtccccatacgaaagtgcagacgaaacacaaactgaagtatctgtctcatccaaaaagtctgagcgaggagtgactgccaaaaaggagtatgtgtgccagctgtgtgagaagccgggcagcctcctgctctgtgaaggaccctgctgcggagctttccacctcgcctgccttgggctttcccggaggccagaagggaggttcacctgcagcgagtgtgcctcagggattcactcatgtttcgtgtgtaaagagagcaagacagatgttaagcgctgtgtggtaactcagtgtggaaaattttaccatgaggcttgtgtgaaaaaataccctctgactgtatttgagagccgaggtttccgctgccccctccacagctgtgtgagctgccatgcttccaacccttcaaacccaaggccgtcaaaaggtaaaatgatgcggtgtgtccgctgccccgttgcctatcacagcggggatgcttgtctggcagcaggatgctcagtgatcgcctccaacagcatcatctgcactgcccacttcactgctcggaaggggaagcgacaccacgcccacgtcaacgtgagctggtgcttcgtgtgctccaaaggggggagccttctgtgctgtgagtcctgcccagcggccttccaccctgactgcctgaacatcgagatgcctgacggcagctggttctgcaatgactgcagggctgggaagaagctgcacttccaggatatcatttgggtgaaacttgggaactacagatggtggccggcagaagtttgccatcccaaaaatgttcccccaaatattcagaaaatgaagcacgagattggagaattccctgtgtttttctttgggtctaaagattattactggacgcatcaggcgcgagtgttcccgtacatggagggggaccggggcagccgctaccagggggtcagagggatcggaagagtcttcaaaaacgcactgcaagaagctgaagctcgttttcgtgaaattaagcttcagagggaagcccgagaaacacaggagagcgagcgcaagcccccaccatacaagcacatcaaggtgaataagccttacgggaaagtccagatctacacagcggatatttcagaaatccctaagtgcaactgcaagcccacagatgagaatccttgtggctttgattcggagtgtctgaacaggatgctgatgtttgagtgccacccgcaggtgtgtcccgcgggcgagttctgccagaaccagtgcttcaccaagcgccagtacccagagaccaagatcatcaagacagatggcaaagggtggggcctggtcgccaagagggacatcagaaagggagaatttgttaacgagtacgttggggagctgatcgacgaggaggagtgcatggcgagaatcaagcacgcacacgagaacgacatcacccacttctacatgctcactatagacaaggaccgtataatagacgctggccccaaaggaaactactctcgatttatgaatcacagctgccagcccaactgtgagaccctcaagtggacagtgaatggggacactcgtgtgggcctgtttgccgtctgtgacattcctgcagggacggagctgacttttaactacaacctcgattgtctgggcaatgaaaaaacggtctgccggtgtggagcctccaattgcagtggattcctcggggatagaccaaagacctcgacgaccctttcatcagaggaaaagggcaaaaagaccaagaagaaaacgaggcggcgcagagcaaaaggggaagggaagaggcagtcagaggacgagtgcttccgctgcggtgatggcgggcagctggtgctgtgtgaccgcaagttctgcaccaaggcctaccacctgtcctgcctgggccttggcaagcggcccttcgggaagtgggaatgtccttggcatcattgtgacgtgtgtggcaaaccttcgacttcattttgccacctctgccccaattcgttctgtaaggagcaccaggacgggacagccttcagctgcaccccggacgggcggtcctactgctgtgagcatgacttaggggcggcatcggtcagaagcaccaagactgagaagccccccccagagccagggaagccgaaggggaagaggcggcggcggaggggctggcggagagtcacagagggcaaatagcgccaggcggccgcttggccggatccaggggcggtgcagggcggccggccctgcctgcgggagagggcgagcatgaactggcccggaggacccagctcgagccgccaggacacagacgtacaggcctcctcgggagggagcgcctccccaccactgagccatcctcagcagcgtccgctgcgtctgcactgatgaccgtctgagcccagctcagcgttcctggacaaacagcctcactcctcagcgttaccgccacacttgaatttctccgaatgtcaaggttccctcccactctatttttttaggttaaagttaattggcatatggaatgttttaatctcctctgaaatgtgtagcgtaggcttttcccaagggtcgctagaaactcgtcttcgcgttgccccctttctggctctcagcgccgtcgccactcgggagaggctgggtgaggcccgtgtgaggactgaccctggattcctcgaaactgccattgtgatcattactctgctctttggaaatggctgtatcatttttttgtactaatgtgaattgttcctcagaaacgcttcttttccatcctagtgagaagctggccctgcaggtggtggcagcaatggtgttgtaagatttcctcccgtagttttttctcctcatggatttgaatgaaatgccaataacacgtccactttcaacgtgtagtttacgcggagcactttcgaggcctggccgggttgggcctacttctcacctgggcctatcttctgaactcgctaggttcttatcaacatttgggggataactttgtatatttttttcatttggcttttctttaccagtttctgatttttattctcaatatatttttgctaaacctatttcacaaatcaccaccgactgaagtgtgtgtttactgatgcggccctgagctccatggcgaaaggagtgactttgcagggcgtgagaccgcagtctgcttagagcacaggaagtgacaacttagggagccccgtagggcgctgcaggccccggggaccccagcacgtgggtctaaagagagacggagtctagctctcctgccacccagagtggcttccatctcagcactctgtgggtctggtgatggaagatgcagtctctgctgatcacatgtgccctctgccagggcacctactgagaggtgcggtcctgggggtggaggcctgcctggcaggtgtgcgtgcctcgtacgtgtgttatgggcactggtctaggccaggtatgacacccactctcctgtgagatttcactttagtttttaaaaggtccagttctacagagtgagacctatctatctgagtactacatatgttttaagacttggttctttttttgagggatccttgaccctgggaagtctggagcaccctgagaagggggcaccatgtgtgcctttgcccacgtgtcctgaggggctgcttgtctgggagggagggagagaacattcagcagcaggtgcttttttatggccttttcttaaaataacctaagggggacacatccatcttgcagagaagtttacagaactccccttgaaaactgctgctgaggctcctgttaaattttctgtggcatcttttatgccttggtaaaaactgcagtgtctttggacctgagagtggctactccgtggttttgtgacctgtaagcgtggggttcaggggtgtgtggccctgcagggtcccacgcctccctgagcactgactggaagtttcactggctggtggctgtcccttctcccatcagggtccccagcaaagttaactacacagaggacccaggggaaacgagctgtgtagccactgacttgctcgcgcggccgtggcctctgaggggcactcgccggttaagacagggtgggagtagtgctttccagttcagactctaacttctcccaaagtgtcctaagaaaatactggatcggctcatagatttatgctccttatgatgccctaacttggaaggttgttctagggacaggccgggcagtgtccccacacacaccttagagtcgaaggccccagggccccgctgtcacttgcccaaaagatcccttccggcaggtaagggactaccaatgcttacgtcaaaacagcagaatcggctttgcagtgcactttggggagcagatattaacttatttttgtgttggacagtagtgaaatcttgtgatttttaatcgctttgataatacttccaaattttatgatttttctgaaggaaataatgcaaacattttaaatatgtttctccccctttccaaaaactgttaaactaatgagcaagtaacactaactttgaatgtctctacaatacccgttgataactcagtggagccaggctttggggtagcggccctgagcttgcagggtttctcgccactggggctgaccacgcccccagctgtgaccgtgggtgtggctggctctcggccctgcccagctttgttctgaggacgtggtgacttcctgaacatcagcttcaatcctccatcattaatgtgaagcaaaacacaaaaaccgccccaatccctcaggattccttggcatccgaaaccagcatctgcacctaaacccatacccacccgtgtgcgcccacagggggatgtgtccgaatgggcagcttaaaatgtggtcacctgtgggggaaactcttcaggcacctgaagtgagaacccagctgtccgtcctcaggccggcctttcttccggcgacacccgtccatggctggctgggtccccttcgcagtgtttgtctgtcttgacatctaaaccccggcgtgtgcagtgcccatcttccaggactaccttattttccagaattaaacctgttttataattcaagttaatgcaaatgactgtcagttgccaaatatcttgatcctgtgagtgtagttgatgactgtttgttagtcagtagagtaaaatgctgtgtccacggggtgtcacagcctcaccataccctgttgaggtgtgaaatgccccgtcagaaattaaatacaaacttaaatgtgcctattggtgtctaaacttcatacaatgtaaggtcagattccttttaggaatactgggtgctgtcaccaggtttgatagttagacttaaaaacttgaaattcactttttggggggagggatatactgaaatagagagttgagacttgccagttgggggaaaatagcatttaaaatggaaagctgtgtttggaaaattgtgtatgagtatttttgtattaaaaacattttaaaggcttttttcttaa

SEQ ID NO: 1892 - protein, 1365 aa, Homo sapiens
MEFSIKQSPLSVQSVVKCIKMKQAPEILGSANGKTPSCEVNRECSVFLSKAQLSSSLQEGVMQKFNGHDALPFIPADKLKDLTSRVFNGEPGAHDAKLRFESQEMKGIGTPPNTTPIKNGSPEIKLKITKTYMNGKPLFESSICGDSAADVSQSEENGQKPENKARRNRKRSIKYDSLLEQGLVEAALVSKISSPSDKKIPAKKESCPNTGRDKDHLLKYNVGDLVWSKVSGYPWWPCMVSADPLLHSYTKLKGQKKSARQYHVQFFGDAPERAWIFEKSLVAFEGEGQFEKLCQESAKQAPTKAEKIKLLKPISGKLRAQWEMGIVQAEEAASMSVEERKAKFTFLYVGDQLHLNPQVAKEAGIAAESLGEMAESSGVSEEAAENPKSVREECIPMKRRRRAKLCSSAETLESHPDIGKSTPQKTAEADPRRGVGSPPGRKKTTVSMPRSRKGDAASQFLVFCQKHRDEVVAEHPDASGEEIEELLRSQWSLLSEKQRARYNTKFALVAPVQAEEDSGNVNGKKRNHTKRIQDPTEDAEAEDTPRKRLRTDKHSLRKRDTITDKTARTSSYKAMEAASSLKSQAATKNLSDACKPLKKRNRASTAASSALGFSKSSSPSASLTENEVSDSPGDEPSESPYESADETQTEVSVSSKKSERGVTAKKEYVCQLCEKPGSLLLCEGPCCGAFHLACLGLSRRPEGRFTCSECASGIHSCFVCKESKTDVKRCVVTQCGKFYHEACVKKYPLTVFESRGFRCPLHSCVSCHASNPSNPRPSKGKMMRCVRCPVAYHSGDACLAAGCSVIASNSIICTAHFTARKGKRHHAHVNVSWCFVCSKGGSLLCCESCPAAFHPDCLNIEMPDGSWFCNDCRAGKKLHFQDIIWVKLGNYRWWPAEVCHPKNVPPNIQKMKHEIGEFPVFFFGSKDYYWTHQARVFPYMEGDRGSRYQGVRGIGRVFKNALQEAEARFREIKLQREARETQESERKPPPYKHIKVNKPYGKVQIYTADISEIPKCNCKPTDENPCGFDSECLNRMLMFECHPQVCPAGEFCQNQCFTKRQYPETKIIKTDGKGWGLVAKRDIRKGEFVNEYVGELIDEEECMARIKHAHENDITHFYMLTIDKDRIIDAGPKGNYSRFMNHSCQPNCETLKWTVNGDTRVGLFAVCDIPAGTELTFNYNLDCLGNEKTVCRCGASNCSGFLGDRPKTSTTLSSEEKGKKTKKKTRRRRAKGEGKRQSEDECFRCGDGGQLVLCDRKFCTKAYHLSCLGLGKRPFGKWECPWHHCDVCGKPSTSFCHLCPNSFCKEHQDGTAFSCTPDGRSYCCEHDLGAASVRSTKTEKPPPEPGKPKGKRRRRRGWRRVTEGK

SEQ ID NO: 1893 - DNA, 7706 bp, Homo sapiens
tggtcttgaactcctgaccttgtgatccgctcgcctcagcctcccaaagtgctgggattacaggcatgagccaccgtgcctgtcctagaaccactggtaactcttaactgctgtctgcttttctgtggagactgcgggttgcagacaccagcagccccctattgctgcacgtcaggtgtcctccacctcagtactgtggacatctcgggccgcatagccctgttgcgcgggcatcctgtgcgttgcaggagatgcagcagcatccatgaccgcaacccatcagagtgttctaagaacggaagcatctgggctggatggaatttagcatcaagcagagtcccctttctgttcagagtgttgtaaagtgcataaagatgaagcaggcaccagaaatcctcggcagtgccaacgggaagactccgagctgcgaggtgaaccgcgagtgttctgtgttcctcagcaaagcccagctctccagtagcctgcaggagggggtcatgcagaagtttaacggccacgacgccctgccctttattccagccgacaagctgaaagatcttacttcccgggtgtttaatggagaacccggcgcacacgatgccaaactgcgttttgagtcccaggaaatgaaagggattgggacaccccctaacactacccctatcaaaaatggctctccagaaattaagctgaaaatcaccaaaacatacatgaatgggaagcctctctttgaatcttccatttgtggtgacagtgctgctgatgtgtctcagtcagaagaaaatggacaaaaaccagaaaacaaggcgagaaggaacaggaagaggagcataaaatatgactccttgctggagcagggccttgtcgaagcagctcttgtgtctaagatctcaagtccttcagataaaaagattccagctaagaaagagtcttgtccaaacactggaagagacaaagaccacctgttgaaatacaacgttggtgatttggtgtggtccaaagtgtcgggttacccttggtggccttgcatggtttctgcagatccactccttcacagctataccaaacttaaaggtcagaaaaagagtgcacgccagtatcacgtacagttctttggtgacgccccagaaagagcttggatatttgagaagagcctcgtagcttttgaaggagaaggacagtttgaaaaattatgccaggaaagtgccaagcaggcacccacgaaagctgagaaaattaagctattgaaaccaatttcagggaaattgagggcccagtgggaaatgggcattgttcaagcagaagaagctgcaagcatgtcagtggaggagcggaaagccaagttcacctttctctatgtgggggaccagcttcatctcaaccctcaagtagccaaggaggctggcattgctgcagagtctttgggagaaatggcagaatcctcaggagtcagtgaagaagctgctgaaaaccccaagtctgtgagagaagagtgcattcccatgaagagaaggcggagggccaaactgtgtagctctgcagagaccctggagagtcaccccgacatagggaagagtactcctcaaaagacggcagaggctgaccccagaagaggagtagggtctcctcctgggaggaagaagaccacagtctccatgccacgaagcaggaagggagatgcagcatcccagtttttggtcttctgtcaaaaacacagggatgaggtggtagctgagcacccagatgcttcaggtgaggagattgaagagctgctcaggtcacagtggagtctgctgagtgagaagcagagagcacgctacaacaccaagtttgccctggtggcccctgtccaggctgaagaagactctggtaatgtaaatgggaaaaaaagaaaccacacaaagaggatacaggaccctacagaagatgctgaagctgaggacacacccaggaaaagactcaggacggacaagcacagtcttcggaagagagacacaatcactgacaaaacggccagaacaagctcttacaaggccatggaggcagcctcctcgctcaagagccaggcagcaacgaaaaatctgtctgatgcatgtaaaccactgaagaagcgaaatcgggcttccacggcagcatcttcagctcttgggtttagcaaaagttcatctccttctgcatccttaactgagaatgaggtctcggacagcccgggagacgagccctcggagtccccatacgaaagtgcagacgaaacacaaactgaagtatctgtctcatccaaaaagtctgagcgaggagtgactgccaaaaaggagtatgtgtgccagctgtgtgagaagccgggcagcctcctgctctgtgaaggaccctgctgcggagctttccacctcgcctgccttgggctttcccggaggccagaagggaggttcacctgcagcgagtgtgcctcagggattcactcatgtttcgtgtgtaaagagagcaagacagatgttaagcgctgtgtggtaactcagtgtggaaaattttaccatgaggcttgtgtgaaaaaataccctctgactgtatttgagagccgaggtttccgctgccccctccacagctgtgtgagctgccatgcttccaacccttcaaacccaaggccgtcaaaaggtaaaatgatgcggtgtgtccgctgccccgttgcctatcacagcggggatgcttgtctggcagcaggatgctcagtgatcgcctccaacagcatcatctgcactgcccacttcactgctcggaaggggaagcgacaccacgcccacgtcaacgtgagctggtgcttcgtgtgctccaaaggggggagccttctgtgctgtgagtcctgcccagcggccttccaccctgactgcctgaacatcgagatgcctgacggcagctggttctgcaatgactgcagggctgggaagaagctgcacttccaggatatcatttgggtgaaacttgggaactacagatggtggccggcagaagtttgccatcccaaaaatgttcccccaaatattcagaaaatgaagcacgagattggagaattccctgtgtttttctttgggtctaaagattattactggacgcatcaggcgcgagtgttcccgtacatggagggggaccggggcagccgctaccagggggtcagagggatcggaagagtcttcaaaaacgcactgcaagaagctgaagctcgttttcgtgaaattaagcttcagagggaagcccgagaaacacaggagagcgagcgcaagcccccaccatacaagcacatcaaggtgaataagccttacgggaaagtccagatctacacagcggatatttcagaaatccctaagtgcaactgcaagcccacagatgagaatccttgtggctttgattcggagtgtctgaacaggatgctgatgtttgagtgccacccgcaggtgtgtcccgcgggcgagttctgccagaaccagtgcttcaccaagcgccagtacccagagaccaagatcatcaagacagatggcaaagggtggggcctggtcgccaagagggacatcagaaagggagaatttgttaacgagtacgttggggagctgatcgacgaggaggagtgcatggcgagaatcaagcacgcacacgagaacgacatcacccacttctacatgctcactatagacaaggaccgtataatagacgctggccccaaaggaaactactctcgatttatgaatcacagctgccagcccaactgtgagaccctcaagtggacagtgaatggggacactcgtgtgggcctgtttgccgtctgtgacattcctgcagggacggagctgacttttaactacaacctcgattgtctgggcaatgaaaaaacggtctgccggtgtggagcctccaattgcagtggattcctcggggatagaccaaagacctcgacgaccctttcatcagaggaaaagggcaaaaagaccaagaagaaaacgaggcggcgcagagcaaaaggggaagggaagaggcagtcagaggacgagtgcttccgctgcggtgatggcgggcagctggtgctgtgtgaccgcaagttctgcaccaaggcctaccacctgtcctgcctgggccttggcaagcggcccttcgggaagtgggaatgtccttggcatcattgtgacgtgtgtggcaaaccttcgacttcattttgccacctctgccccaattcgttctgtaaggagcaccaggacgggacagccttcagctgcaccccggacgggcggtcctactgctgtgagcatgacttaggggcggcatcggtcagaagcaccaagactgagaagccccccccagagccagggaagccgaaggggaagaggcggcggcggaggggctggcggagagtcacagagggcaaatagcgccaggcggccgcttggccggatccaggggcggtgcagggcggccggccctgcctgcgggagagggcgagcatgaactggcccggaggacccagctcgagccgccaggacacagacgtacaggcctcctcgggagggagcgcctccccaccactgagccatcctcagcagcgtccgctgcgtctgcactgatgaccgtctgagcccagctcagcgttcctggacaaacagcctcactcctcagcgttaccgccacacttgaatttctccgaatgtcaaggttccctcccactctatttttttaggttaaagttaattggcatatggaatgttttaatctcctctgaaatgtgtagcgtaggcttttcccaagggtcgctagaaactcgtcttcgcgttgccccctttctggctctcagcgccgtcgccactcgggagaggctgggtgaggcccgtgtgaggactgaccctggattcctcgaaactgccattgtgatcattactctgctctttggaaatggctgtatcatttttttgtactaatgtgaattgttcctcagaaacgcttcttttccatcctagtgagaagctggccctgcaggtggtggcagcaatggtgttgtaagatttcctcccgtagttttttctcctcatggatttgaatgaaatgccaataacacgtccactttcaacgtgtagtttacgcggagcactttcgaggcctggccgggttgggcctacttctcacctgggcctatcttctgaactcgctaggttcttatcaacatttgggggataactttgtatatttttttcatttggcttttctttaccagtttctgatttttattctcaatatatttttgctaaacctatttcacaaatcaccaccgactgaagtgtgtgtttactgatgcggccctgagctccatggcgaaaggagtgactttgcagggcgtgagaccgcagtctgcttagagcacaggaagtgacaacttagggagccccgtagggcgctgcaggccccggggaccccagcacgtgggtctaaagagagacggagtctagctctcctgccacccagagtggcttccatctcagcactctgtgggtctggtgatggaagatgcagtctctgctgatcacatgtgccctctgccagggcacctactgagaggtgcggtcctgggggtggaggcctgcctggcaggtgtgcgtgcctcgtacgtgtgttatgggcactggtctaggccaggtatgacacccactctcctgtgagatttcactttagtttttaaaaggtccagttctacagagtgagacctatctatctgagtactacatatgttttaagacttggttctttttttgagggatccttgaccctgggaagtctggagcaccctgagaagggggcaccatgtgtgcctttgcccacgtgtcctgaggggctgcttgtctgggagggagggagagaacattcagcagcaggtgcttttttatggccttttcttaaaataacctaagggggacacatccatcttgcagagaagtttacagaactccccttgaaaactgctgctgaggctcctgttaaattttctgtggcatcttttatgccttggtaaaaactgcagtgtctttggacctgagagtggctactccgtggttttgtgacctgtaagcgtggggttcaggggtgtgtggccctgcagggtcccacgcctccctgagcactgactggaagtttcactggctggtggctgtcccttctcccatcagggtccccagcaaagttaactacacagaggacccaggggaaacgagctgtgtagccactgacttgctcgcgcggccgtggcctctgaggggcactcgccggttaagacagggtgggagtagtgctttccagttcagactctaacttctcccaaagtgtcctaagaaaatactggatcggctcatagatttatgctccttatgatgccctaacttggaaggttgttctagggacaggccgggcagtgtccccacacacaccttagagtcgaaggccccagggccccgctgtcacttgcccaaaagatcccttccggcaggtaagggactaccaatgcttacgtcaaaacagcagaatcggctttgcagtgcactttggggagcagatattaacttatttttgtgttggacagtagtgaaatcttgtgatttttaatcgctttgataatacttccaaattttatgatttttctgaaggaaataatgcaaacattttaaatatgtttctccccctttccaaaaactgttaaactaatgagcaagtaacactaactttgaatgtctctacaatacccgttgataactcagtggagccaggctttggggtagcggccctgagcttgcagggtttctcgccactggggctgaccacgcccccagctgtgaccgtgggtgtggctggctctcggccctgcccagctttgttctgaggacgtggtgacttcctgaacatcagcttcaatcctccatcattaatgtgaagcaaaacacaaaaaccgccccaatccctcaggattccttggcatccgaaaccagcatctgcacctaaacccatacccacccgtgtgcgcccacagggggatgtgtccgaatgggcagcttaaaatgtggtcacctgtgggggaaactcttcaggcacctgaagtgagaacccagctgtccgtcctcaggccggcctttcttccggcgacacccgtccatggctggctgggtccccttcgcagtgtttgtctgtcttgacatctaaaccccggcgtgtgcagtgcccatcttccaggactaccttattttccagaattaaacctgttttataattcaagttaatgcaaatgactgtcagttgccaaatatcttgatcctgtgagtgtagttgatgactgtttgttagtcagtagagtaaaatgctgtgtccacggggtgtcacagcctcaccataccctgttgaggtgtgaaatgccccgtcagaaattaaatacaaacttaaatgtgcctattggtgtctaaacttcatacaatgtaaggtcagattccttttaggaatactgggtgctgtcaccaggtttgatagttagacttaaaaacttgaaattcactttttggggggagggatatactgaaatagagagttgagacttgccagttgggggaaaatagcatttaaaatggaaagctgtgtttggaaaattgtgtatgagtatttttgtattaaaaacattttaaaggcttttttcttaa

SEQ ID NO: 1894 - DNA, 1484 bp, Homo sapiens
  misc_feature (317)..(317): n is a, c, g, or t
  misc_feature (825)..(826): n is a, c, g, or t
  misc_feature (858)..(858): n is a, c, g, or t
  misc_feature (905)..(905): n is a, c, g, or t
  misc_feature (978)..(978): n is a, c, g, or t
  misc_feature (1037)..(1037): n is a, c, g, or t
atttttatattatttatttattcttcgttagtttgtttttggagcgtgggttttgttttgttttttgatttttttctttttttccgacccacggatttattcttattgcccaggcttgaagtgcaatggcgtgttctcagcttactcaacctccgcctcttgggtttgggtaattgttgtgcctcggcctccctctgcctcttgggcttgggcgattgttccacctcatccgccctccgcctcttgggtttcggtgattgttccacctcatccaccctccacctcttggggtttggggtgggtttttccgcctcggncctcctgagtagctaagggaggagtcttgagattatcatccactgagggtggaagaggagagggtggaagagggacaaagagacagtccttcagattatcatccactgagggtggaagaggagagggtggaagagggaccaggagacactccttcagattatcatccactgagggtggaagaggagcaagaggacactccttgatattatcatccactgagggtggaaggggatgaaggagacattcgggaggtgtcttgaggctcagggagttatcagttatagaatgttgttgagttggaggaggtggctggcggcccatcctgttttttaaagtttcagctgtgaggtagggccagcagggcaatcctgaagaatgatgatgctccgctgccgccattctgacctgtagggccgaagaagggaatgttttcacacatattcatttgatggacaaaattaccgccaccaacacggtctgcaccttctgttgctggtgatagatttnngcacctttccatcctccaggtttcaaaatagnagtatcagtgtcataatatcacccttccactgagtactgccgacagntggggagtaaagaaaagtcattgggacacactgttgtctccacatgccactgtgtctgtctgcaaatgtaggnaggctggggtcctgccccagggaagacagagtcataacagagtaataaagaggcatgtntgagacacaggagtgtctatgtctatcctcattcctccctcacagccatcaccagagcatgtttcttgcaccaggtcaacagacagtaagagaggcatgaaaagcccattgtccacacatgttgcagcttctttttggagaatgttttccaggccttttatgttctgtctctgattctcggaactctgcaaggtcagtgtgaccaccctgctccaaatctaagaaaacagaggttaccagaggaaggagaaattgtgcccggggtcacacagcttgcaagaggcagagtggaagttgattccagctctgcctgcaggaccctctcatttcccctgtttcccttcttgataaaggatcttcttcactctggaggtgccacccatgagaacaaagagctctgcagagatgtggattcctgaagagctgcaggggaactgggagagggtt

SEQ ID NO: 1895 - DNA, 1947 bp, Homo sapiens
ggcttactcactatagggctcgagcggccgcccgggcaggtctagaattcagcggccgctgaattctagcggaggcggcggcggcggccgcggccgaggtcgaggcgatcagtgggtgaccgcggctgcgagggactttgtcatccgtcctccaggatctggggagaaagagccccatcccttctctctctgccaccatttcggacaccccgcagggactcgttttgggattcgcactgacttcaaggaaggacgcgaacccttctctgaccccagctcgggcggccacctgtctttgccgcggtgacccttctctcatgaccctgcggtgccttgagccctccgggaatggcggggaagggacgcggagccagtgggggaccgcggggtcggcggaggagccatccccgcaggcggcgcgtctggcgaaggccctgcgggagctcggtcagacaggatggtactggggaagtatgactgttaatgaagccaaagagaaattaaaagaggcaccagaaggaactttcttgattagagatagctcgcattcagactacctactaacaatatctgttaaaacatcagctggaccaactaatcttcgaatcgaataccaagacggaaaattcagattggactctatcatatgtgtcaaatccaagcttaaacaatttgacagtgtggttcatctgatcgactactatgttcagatgtgcaaggataagcggacaggtccagaagccccccggaacggcactgttcacctttatctgaccaaaccgctctacacgtcagcaccatctctgcagcatctctgtaggctcaccattaacaaatgtaccggtgccatctggggactgcctttaccaacaagactaaaagattacttggaagaatataaattccaggtataaatgtttctctttttttaaacatgtctcacatagagtatctccgaatgcagctatgtaaaagagaaccaaaacttgagtgctctggataactatatggaatgctttctaagaacagctgaagctaatctaatttaaatttaacagcttgaagaggtagctaggtgtttaaagttcctccagatacttttacctgagtgatgcttcccttcctaaggctgaccaagacctgttgatccttttagattaaaaataaaatgtcgcatgtaaaggctgaagtcgcgttttatcagaatgccttgccttcttaggttcttttccattatgtcaaaggtccaggctccagtaggagagaaagaactcctcataggaatactgaagaagtgggaaggaaccaagctgacacaggcctcactgcaatttgatatgcctgctgatcagagtctcttgggcattttatattttgcattctgatgtacctaggagttttgttaaacagatgatgtatgtgagtatttatcccattttatgcaattaaccaaatcaaccaaaaaaagtgaccatgaagtcctgtatttgtctttttactacatgtaggaactctcatgtgaatgagtactgtagtaatccattctatgggagccttatttcagaaatatttcaaactggtgcaaatggaaaagactttctcttttcctttaaagctaaagacaagaatatcatgctatacaggtgcaactcaatccccgttaataaaaaccaatgtaggtataggcattctaccctttcaaatagctgtgtcccaacctgttgccattgattttttggaaatggctttagaaatatccaagttgtccttgaattgtctaaccatggacataaacagttgtctcccttctactgtgtagaatactttgacttaattttcttccagatacagggggatacctgcctgtttttcaaagtgtttatttactgctgttactatttgattagaatgtattaaataaaaaaaacctgatttctaaaaaaaaaa

SEQ ID NO: 1896 - protein, 198 aa, Homo sapiens
MTLRCLEPSGNGGEGTRSQWGTAGSAEEPSPQAARLAKALRELGQTGWYWGSMTVNEAKEKLKEAPEGTFLIRDSSHSDYLLTISVKTSAGPTNLRIEYQDGKFRLDSIICVKSKLKQFDSVVHLIDYYVQMCKDKRTGPEAPRNGTVHLYLTKPLYTSAPSLQHLCRLTINKCTGAIWGLPLPTRLKDYLEEYKFQV

SEQ ID NO: 1897 - DNA, 2770 bp, Homo sapiens
ggcgccccgcctcccgcccgccatgcccgcgccccgcgccccgcgcgctctggcggccgccgcgcccgcgtccgggaaggccaagctgacgcacccggagaaggcgatcctggcaggcggcctggcgggtggcatcgagatctgcatcaccttccccaccgagtacgtgaagacgcagctgcagctggacgagcgctcgcacccgccgcggtaccggggcatcggtgaggagggggagggccgcggccgccgggcgggcgggtacccagggcgggccaccgagggccgtggggtcctgaccgccccctcccccaggggactgcgtgcggcagacggttcgcagccatggcgtcctgggcctgtaccgcggccttagctccctgctctacggttccatccccaaggcggccgtcagtgtaggccggcgtctgcgggagggggctcggccgcgggcagcccctctcacccgcctcccgcctccaggtttggaatgttcgagttcctcagcaaccacatgcgggatgcccagggacggctggacagcacgcgtgggctgctgtgcggcctgggcgctggcgtggccgaggccgtggtggtcgtgtgccccatggagaccatcaaggtggggaaggtcctggcgaggacccggacagcgagggagtacggagacgggcggccccgctggcccggtgctcccggggcaaccgcaagctggggagggtctcctggacgccagggaaggccggcggggtgacccgggggccctggggcaggacgcctgccacgaagggccacccgtggaggctgagtctatgctaaaggcagccttaaagtctttaaaaaatacttttataaagcagaaaacaaaatgacaccttcactgccaaaactggaaaagagcagcaaacataaagggagaggctgctcacagggctgccctgtgtccagagcatggtctcgtgtgggctgccctgtgtcccggggcatggtccgtgtgggcagcccagggcgcttggctgcacggcttcctggggaagagttcccagttccctccaccctggatgggccctgggctgccagctagccaggacccacccaggtgcagccgagaacctgcgcctttgcttctctctctcaggtgaagttcatccacgaccagacctccccaaaccccaagtacagaggattcttccacggggttagggagattgtgcgggaacaaggtgagccactcgaccttcctgatagggctcagggacctgggcagggtgggaagggcctgcacctcccatcctgccttgggctttgtgcaacacccaccccccacacacaccaattcccaaccggggcctgagaggctgcagggtaaccccgtgcctgccttcccgcagggctgaaggggacgtaccagggcctcacagccactgtcctgaagcagggctcgaaccaggccatccgcttcttcgtcatgacctccctgcgcaactggtaccgaggtgtgtctgcatcacagggccccatctctgcacatggccagctcctctcctctccttggggccacccctgggtggcgggcacccaccttttgaagtgctgatccaggcccctcccggcaccctctgacccacctcacccctcctatatccaggggacaaccccaacaagcccatgaaccctctgatcactggggtcttcggagctattgcaggcgcagcgagtgtctttggaaacactcctctggatgtgattaagacccggatgcaggtggtggggccgggaaggggaggggaaggggggaccaggccagagctagctgctgagcccctgcctgctgatgtccccataggcctggaggcgcacaaataccggaacacgtgggactgcggcttgcagatcctgaagaaggaggggctcaaggcgtgagtggggaggggcagggctattgtccccacctcaaacctttcgccctacctggcctgcccactctgtccccttcagcctctgtgcctctcacttcagtatctggggattgccctgtgcagggacactgtgctgacctgccttcctctccccgcccctcctcccacccagattctacaagggcactgtcccccgcctgggccgggtctgcctggatgtggccatagtgtttgtcatctatgatgaagtggtgaagctgctcaacaaagtgtggaagacggactaagcctagagaggccgcaaggggaccgccccaggcaccgcagagtgtctcgtacctttgtctcacatgattcagtgcagtagtgccaaaaggcccttccacgtcctcgagctctgtagcctggtctgtgcattgtggctgtcaaatccatgtgtcccccctgtggtctgtgtgtgacaccaccactgtgtcccagtgtctggcccagcatggcggtatgtgcatctggcctatgaccctgtgcccacttgtcatgtgcttactgtgaaccctgtgcctgtgtttcatgttctgtcacgtgaccctgtgccgcctcccggggtgcccgtgtggcctgggtcctcgccctgtagccctgccggtcccagtccggtgccttccaccctgccctggcctaccacagctgcctccggcctcggcctggcttcaccgcattccaggctgcagccccctgcttctcccgccattgccttaactgccctcgggccctctctccgccccggacagggtggcacccaccactctcaggaccaccctgccaaggcagaataaaccggatcctgttgc

SEQ ID NO: 1898 - protein, 318 aa, Homo sapiens
APRLPPAMPAPRAPRALAAAAPASGKAKLTHPEKAILAGGLAGGIEICITFPTEYVKTQLQLDERSHPPRYRGIGDCVRQTVRSHGVLGLYRGLSSLLYGSIPKAAVRFGMFEFLSNHMRDAQGRLDSTRGLLCGLGAGVAEAVVVVCPMETIKVKFIHDQTSPNPKYRGFFHGVREIVREQGLKGTYQGLTATVLKQGSNQAIRFFVMTSLRNWYRGDNPNKPMNPLITGVFGAIAGAASVFGNTPLDVIKTRMQGLEAHKYRNTWDCGLQILKKEGLKAFYKGTVPRLGRVCLDVAIVFVIYDEVVKLLNKVWKTD

SEQ ID NO: 1899 - DNA, 4912 bp, Homo sapiens
ggcacgaggctgctctcgcaactcaagatggcggacgagagtgagacagcagtgaagccgccggcacctccgctgccgcagatgatggaagggaacgggaacggccatgagcactgcagcgattgcgagaatgaggaggacaacagctacaaccggggtggtttgagtccagccaatgacactggagccaaaaagaagaaaaagaaacaaaaaaagaagaaagaaaaaggcagtgagacagattcagcccaggatcagcctgtgaagatgaactctttgccagcagagaggatccaggaaatacagaaggccattgagctgttctcagtgggtcagggacctgccaaaaccatggaggaggctagcaagcgaagctaccagttctgggatacgcagcccgtccccaagctgggcgaagtggtgaacacccatggccccgtggagcctgacaaggacaatatccgccaggagccctacaccctgccccagggcttcacctgggatgctttggacttgggcgatcgtggtgtgctaaaagaactgtacaccctcctgaatgagaactatgtggaagatgatgacaacatgttccgatttgattattccccggagtttcttttgtgggctctccggccacccggctggctcccccagtggcactgtggggttcgagtggtctcaagtcggaaattggttgggttcattagcgccatcccagcaaacatccatatctatgacacagagaagaagatggtagagatcaacttcctgtgtgtccacaagaagctgcgttccaagagggttgctccagttctgatccgagagatcaccaggcgggttcacctggagggcatcttccaagcagtttacactgccggggtggtactaccaaagcccgttggcacctgcaggtattggcatcggtccctaaacccacggaagctgattgaagtgaagttctcccacctgagcagaaatatgaccatgcagcgcaccatgaagctctaccgactgccagagactcccaagacagctgggctgcgaccaatggaaacaaaggacattccagtagtgcaccagctcctcaccaggtacttgaagcaatttcaccttacgcccgtcatgagccaggaggaggtggagcactggttctacccccaggagaatatcatcgacactttcgtggtggagaacgcaaacggagaggtgacagatttcctgagcttttatacgctgccctccaccatcatgaaccatccaacccacaagagtctcaaagctgcttattctttctacaacgttcacacccagacccctcttctagacctcatgagcgacgcccttgtcctcgccaaaatgaaagggtttgatgtgttcaatgcactggatctcatggagaacaaaaccttcctggagaagctcaagtttggcataggggacggcaacctgcagtattacctttacaattggaaatgccccagcatgggggcagagaaggttggactggtgctacaataaccagtcaccagtgcgattctggataaagccactgaaaattcgaaccaggaaatggaaccccaccactgttggtccaattttcacacacgtgagaatccctggcaaagggagcagaactgaaccggctttaccaaaccgccagcgaacttgacaattgtattgcgatggcgtgggctgcgtgacgtcacctccggtcgtgtctctggtctccgtgttttccagttaattacatcctcatgcagccgtgatcaagggaatgtaactgctgaaaactagctcgtgattggcatataatggagttaacgggtgaataataaaagtatatatatatattatatatatataaatattttaaatatctttcatgttccaaatgtacaaggatgtttggtctttaatgaaaagctgaatctagatcattcctcagaatgaggacccgaggacagtggcagacagacgcgttggcacagttcatggtttcctccagaggagacattggcttatcatggggaaaaagaggatctggagaacctcatccagctccccttctgaatcagctgggatgactggctttgagaaggaagggaagatggaacaggctcagatctcatgggatagcacgtggagctcttggctggggctgaccctgggcagggactttcctgcagggccagacctgcctgcattctgagacaaagcaatggacggtccgcagaagcagacctcattgattgagtcctttcttccatccccttggcctgctccctgtaggaagtcatcctgccaactgatttaaaagggctctttagccagttgttgccaaccttatagggatgagtcccctgtgagattttgcttttccactgcctgggatgatgcagtttgaagaggcccttggacctccttgtaacatcagggacctttggagaccattatcagtgtaagccctgcttagctcatcttagagcaaagagccagcaccctgatgtccctggggtggctaggcaggagtggcgtggggccaatacccagaccccttcagccaccagcccctggcctgtgccttccaacccattagccatttcttgttgtgcccctttccaagatacagcctgcaagtggtagcaagaagtgattagaggcagatctggacttggcaacagaagtggtttcccatctccattgtctgagtctgattttcgctgatgctgttttgtggatttttgtggtagtgatggttgtcagtgctgccagtttcccaaaacgtaatcaagcctctggtcacatggctgtcgatgtaggcattctggagtggtgttcagccaagtgaccgggcaaaattgggctgtgaaattgtacttccaggcttggatgtaatttttgctctagagagaagcaagtggtgggaaggaggtagcatgacgtgtggtgtgcgggtttccttgctgccgtcacctctccgctcatacaggaatgaagccttagccaggaggccaggctcagccctgtgccactcaccgaagccactttctacaggccagcaggggcttgttgcaggctgtgggttttggtgtggtttgtcagaggctaattctgcagagtttccaaaaccagaagacatcgtatgcttgggatgggggccgtgccacccgtgggaatgctgcccgctctgcagactgctgctagagccagcaactccactaaggtggattttcatcaggggcctgcagggccctcccttttcccattgttcctgcgctgcaaattgcaggccccagcaatcgtgactgacgtttgctccttgactccaagaaactgagaccaaagaagctgctgttcttagcaagatgcgcactgcattccacaggtgggaggagtcggagaggcaggggcttgctttgcagccccacagacaacagttgcacagtgcctcaagccccagagtggctcaccctgtccagacctttgaggatatcaaaggacaaagtgcccaagtctttcctaccttgggggaacctggaacttggaaaggctccctgtcctagtcttgatctgttctgggccaggtcccagcttgagctgcctctgagatttgggctgtgcggatctctggagtgagctctgtttcggttgacccaggtcatggaatggaaacggtgaggccccagtggctgttctggaagaaacagatctcctggcaaaggccccagcatctccctcactgaaaccaggtggccggctcctcggactctgctttatgttgcggtgagaactctgcccaggtgtgcagggtttggcttgtgggctgcttgctgctcatctgatttttgtcccagtagtccctgcgttcttcattcaaccccttctgggacttcagctcagagagcaccatcccgggggtcagggcctccccacaggagccctgcagtgtggtagcgccatggctgtctcaaaccaagcaaaggaaggaccctgaggccttcacgctaaccatcctcgagcaactgctgttggaaggcctccctgggcctggcccccaccctctgccacccagtcctcccagctgccatgtttcaaagacgacctttacctcctgcctttggattgactctgcatttgaccacggactccagtctgtgtgtagggagagagctgagtaggaggcctccactccggatcgaggcctgtatagggctcgtttccccacacatgcctatttctgaagaggcttctgtcttatttgaaggccagcccacacccagctactttaacaccaggtttatggaaaatgtcaggccttccccacaactcctgtctaactgctgtcgcccccctacttgctggctctcagaagcctaggggagtccctgtggtcctgaattctttccccaaagacgaccagcatttaaccaacctaagggcccaaaggccttggacaactgcatggagctgcactctaggagaaggaggggaaccagatgttagatcaggggagggagcaggagtgtccctcccgtcagtgcctacccacctgtgaggcagccttctgatggcctggcccaccttccccagaaccaggggaggcctgaggcttcagttttactctgctgcaaaatgaaggcgggcctgcaagccgactacacctacggaggctgttgaggacaatttcattccattaaattaaaaaatactgactggctggcaggcaggtgccatgtctgggaacagggacgggggagcttcacctttttgtcttggcttttctttgggctgtgggggggcatccatttccagggtcggggaggaaataccaaatgcattgttgttctgctcaatacatctcacttgtttctaataaagaaagcagctgaacaaaaaaaaaaaaaaaaaaaaa

SEQ ID NO: 1900 - protein, 496 aa, Homo sapiens
MADESETAVKPPAPPLPQMMEGNGNGHEHCSDCENEEDNSYNRGGLSPANDTGAKKKKKKQKKKKEKGSETDSAQDQPVKMNSLPAERIQEIQKAIELFSVGQGPAKTMEEASKRSYQFWDTQPVPKLGEVVNTHGPVEPDKDNIRQEPYTLPQGFTWDALDLGDRGVLKELYTLLNENYVEDDDNMFRFDYSPEFLLWALRPPGWLPQWHCGVRVVSSRKLVGFISAIPANIHIYDTEKKMVEINFLCVHKKLRSKRVAPVLIREITRRVHLEGIFQAVYTAGVVLPKPVGTCRYWHRSLNPRKLIEVKFSHLSRNMTMQRTMKLYRLPETPKTAGLRPMETKDIPVVHQLLTRYLKQFHLTPVMSQEEVEHWFYPQENIIDTFVVENANGEVTDFLSFYTLPSTIMNHPTHKSLKAAYSFYNVHTQTPLLDLMSDALVLAKMKGFDVFNALDLMENKTFLEKLKFGIGDGNLQYYLYNWKCPSMGAEKVGLVLQ

SEQ ID NO: 1901 - DNA, 5655 bp, Homo sapiens
aaaaaatcctgcggtgcagtttttataccagaaactgataggttggctaaatgaagatcaaaggaaggattttggtttcctggtggacattttgtacagtgctctccggtgctgtgacaatgatatggaaagaaaaaaagtcttggatgatctaaccaaggtggacttgaaatggaattctcttcttaagattattgaaaaggcatgtcctagttcagataaacatgctttagtaactccttggctcaaaggcgatatccttggtgagaaattggtcaacttggcagattgtctttgtaatgaggacttggaatccagggtatcttcagaatctcacttctcagaaagatggactcttctaagcttggtattatcccaacatgttaaaaatgattacttgattggagacgtatatgttgaaagaatcattgttagacttcatgaaactttattcaaaacaaagaaattatcagaagctgaaagcagtgactcatcagtgtcttttatctgtgatgtggcctataactatttcagctcagcgaaaggatgcttgctaatgccatcatctgaagatttattattaactctctttcagttatgtgctcagagcaaagaaaaaacacatttgccagattttcttatctgtaaactgaaaaatacttggctctctggtgtaaatttattggttcatcaaactgacagttcatataaagagagtaccttcctacatttgtctgctctgtggctgaagaaccaagttcaggcttcatctttggatatcaacagtctccaagtcctcttgtctgctgttgatgatttgctaaatacacttctagagagtgaagattcttatcttatgggagtttatattggaagtgtaatgccgaacgacagtgaatgggaaaagatgaggcagtctcttcctatgcagtggttacatagacctcttttagagggaagattgagtttgaattatgaatgtttcaaaacagattttaaggaacaggacataaagacacttcccagccatttgtgtacttcagcattattgagcaaaatggtcttaattgcactgagaaaggaaacagtcttagaaaataatgagcttgagaaaataattgcagaactgctttattcactgcagtggtgtgaagaattagataacccacctatttttctaattggattttgtgaaatacttcaaaaaatgaatattacgtatgataacttacgtgtacttggtaatacgtcgggccttttgcagctgttatttaacaggtccagagaacatggcacactgtggtctcttattattgctaagttgatcctttcccgaagcatttcatctgatgaagtaaaaccacattataagagaaaagaaagtttttttccactaactgaaggcaatttgcataccattcaaagtctatgtccatttttgtcaaaagaagaaaagaaagaatttagtgctcaatgtatacctgctcttttgggctggactaagaaagatctttgcagcactaatggaggttttggacatcttgccattttcaattcttgtctgcaaaccaaaagtatagatgatggagagctattacatggaatattaaaaatcataatatcctggaagaaagagcatgaagatatttttcttttcagttgtaatctatcagaagcaagtccagaggtactgggtgtaaatatagaaataatccggtttctttccctgtttctgaaatactgctcatcccctttggcagagagtgagtgggacttcatcatgtgctccatgttggcttggttggagacaacaagtgagaatcaggcattgtattctattccacttgtgcaactgtttgcctgtgtcagctgtgatttggcctgtgacctcagtgctttctttgattccacaactctggataccattggcaatcttcctgtaaatctaatcagtgaatggaaagaatttttttcccaaggcatccacagtttgcttttacctattttggtgactgttacaggagaaaacaaagatgtgtctgaaacatcctttcagaatgcaatgctgaaacccatgtgtgaaacattaacgtatatctcaaaggaacagctattgagtcacaaacttcctgcaagattagttgctgaccaaaaaacaaacttaccagaatatctccagactttgttaaatacattggccccattactcctcttcagagctaggcctgtgcaaattgctgtttatcatatgctatacaaattgatgcctgaattaccacagtatgatcaggataatctaaagtcatacggagatgaagaagaagagccagccttgtcaccaccagcagcactgatgtctcttcttagcattcaagaggacttactagaaaatgttttggggtgtattcctgttggacagatagttactattaaaccactgagtgaagacttctgttatgttctgggataccttctcacttggaaattaatactaactttcttcaaagctgcatcatcacagcttcgggctttgtattccatgtatcttcggaaaacaaagagtttgaataaattgctctatcacctgttcaggcttatgccagaaaatccaacctatgcagagacagcagttgaggtcccaaataaggaccctaaaacattctttactgaggagctccagctgagtattagagaaacaacaatgcttccataccacattccacacttggcttgttcagtctatcatatgacattaaaagacttgcctgccatggttaggttgtggtggaatagcagtgagaagcgtgttttcaatattgtggatagatttacaagcaagtatgtcagcagtgttctttcttttcaagaaatatcttctgtacaaacaagtacacaactatttaatggcatgacggttaaagctcgagctactactcgagaggtaatggctacttatactattgaggacatagttattgaacttataatacaactgccttcaaattatccactgggttcaataatagtagaaagtgggaaaagagtaggagtagctgttcagcagtggcggaactggatgctgcagttaagcacttacctcacccatcagaatggaagtattatggaaggcttagctttatggaaaaataacgtagacaaacgttttgagggtgttgaagattgcatgatctgtttctcagtcattcacggtttcaactattcccttcccaaaaaagcctgtagaacatgcaagaaaaaattccattcagcctgcttgtacaaatggtttacatctagcaacaaatccacttgtccactgtgtcgtgagacgtttttctgagatttttttcactggaagggatccctgaagtacatcaaacaaaggcattggatttggatccgtctgaaagtgtggatgtggggaagccagtgagcattacttttaaataggaccttctctggaaaattattttggttaatgtaataatcctaaaatcaggtttacttaactttagattgctttgtaaatgtttggaaactttcttttacaaaagaatattacatatttgagagaaaatatttctattaatggtttaatttctttgtatatttaaaaataaatatgaaaaacccctaaattacagaattggaatttgtgaaaagattgcacaactatattattgataaacccattccgtttgttgatctgtgttttagaatagtccaagtgaagcaaaacgaactgagagagctgatttacatctatagatattttaagccttatttattagttatgacaataaattagtattctgatatttgtagattattttaatgataaaaatgacactaagctattaatacggcttgtcttaagatatctggaggcatgctctgaaatcctatataaaagagtttaaactgaactttaaggtgcctccatttatcaagggttatgaaactcagaaaattaaattcttgatgctgacctttttgcttgtgggagaattatttctatatattagtgaaatttgaattgtaaacttgtcagtgaatttatcactctgagcgagtctctagagggtgagaatttgagagaaatagtaatttgattatttcattcatgaagcggagtggtagttatccttctattgagagggaagaaataaatgagtattactgaaacttaaagatcagtggaaaaaaaaaacatttaaaaatgttgtaggagactttcaattttggaagcaaactgagctattcttaccagccaaagttatactaaataagagacttgggggagcaaatgtttttcagccttcagaaatgaaagttaaggattttagcactaggtaaaattcagtataataggctgaagtggagtaagtgaaaacctgccttttgccactcttaaaaattgtgcccaaaatataaaagtgtggaactttagaacttggaataattttattgcagtcttccattacatggaaatagcatatctaatatctaggttacttgagagaccagctaatcatctctgttgcacatgtttaattggcaaaaagcaattcatgataaataaaattactgctttccatctactgggtaaaatgactattgaaatagtatgaatgtggtcagaggattatagttgagagtgaagtactatgtgtgagttatagatctctcgaattatatttatagatgcagtgtcctgcccagttttgtttgcctcctacattttactgtaaaatatttattgtcttctagccttgagcctctgagggtcagtaagtgaagtacagatagcaaaattttactacctcgttaacccttttcttaaaatattctctatctttctatgtctctttctgacatagtaatcccaaaggattgtgttactccccgtgaaagttattacttttcctttaaaaatggttttataataagactgtttaaaacctttccagtattggtacatcttggcttctggcccaaaccccaagcagaaaagaaaatggaataatggagcattgtttttccacattagtattagggcatcagattcttggtgaaacactataattaagtagttataattaaataactgttcttcatacttaggactcttaatacatttctttaagacttgtaagtataattgtaaagcttgttaactgtttatatactaaagaaaaagctttacaagataagactgaaattcagaataccacattaaagttttatctgtacagcgttgacaactctaactaaaaggattacagcccttaaaattttagcttaaggacattttaaaattgcatgagattagcaaaattattaatttaaaaccccaaagtaaattgcaaattttaaaatttatttttgactcttttatcacatgctccaatgtatgtacataagtgtctgtggcttaaataatatgttgttatttgatacatttttgtggtgcaagtaattaatgttattatttgattgttataccatatgtgcccattaaaattctttttaattaaaaatatttcaaatatgcagaaaaataataatataaatgcccttgtacccttcacatactattttgccatatttgcttctgatttttaaataaataaaatgttactcttttgtacttct

SEQ ID NO: 1902 - protein, 1112 aa, Homo sapiens
KNPAVQFLYQKLIGWLNEDQRKDFGFLVDILYSALRCCDNDMERKKVLDDLTKVDLKWNSLLKIIEKACPSSDKHALVTPWLKGDILGEKLVNLADCLCNEDLESRVSSESHFSERWTLLSLVLSQHVKNDYLIGDVYVERIIVRLHETLFKTKKLSEAESSDSSVSFICDVAYNYFSSAKGCLLMPSSEDLLLTLFQLCAQSKEKTHLPDFLICKLKNTWLSGVNLLVHQTDSSYKESTFLHLSALWLKNQVQASSLDINSLQVLLSAVDDLLNTLLESEDSYLMGVYIGSVMPNDSEWEKMRQSLPMQWLHRPLLEGRLSLNYECFKTDFKEQDIKTLPSHLCTSALLSKMVLIALRKETVLENNELEKIIAELLYSLQWCEELDNPPIFLIGFCEILQKMNITYDNLRVLGNTSGLLQLLFNRSREHGTLWSLIIAKLILSRSISSDEVKPHYKRKESFFPLTEGNLHTIQSLCPFLSKEEKKEFSAQCIPALLGWTKKDLCSTNGGFGHLAIFNSCLQTKSIDDGELLHGILKIIISWKKEHEDIFLFSCNLSEASPEVLGVNIEIIRFLSLFLKYCSSPLAESEWDFIMCSMLAWLETTSENQALYSIPLVQLFACVSCDLACDLSAFFDSTTLDTIGNLPVNLISEWKEFFSQGIHSLLLPILVTVTGENKDVSETSFQNAMLKPMCETLTYISKEQLLSHKLPARLVADQKTNLPEYLQTLLNTLAPLLLFRARPVQIAVYHMLYKLMPELPQYDQDNLKSYGDEEEEPALSPPAALMSLLSIQEDLLENVLGCIPVGQIVTIKPLSEDFCYVLGYLLTWKLILTFFKAASSQLRALYSMYLRKTKSLNKLLYHLFRLMPENPTYAETAVEVPNKDPKTFFTEELQLSIRETTMLPYHIPHLACSVYHMTLKDLPAMVRLWWNSSEKRVFNIVDRFTSKYVSSVLSFQEISSVQTSTQLFNGMTVKARATTREVMATYTIEDIVIELIIQLPSNYPLGSIIVESGKRVGVAVQQWRNWMLQLSTYLTHQNGSIMEGLALWKNNVDKRFEGVEDCMICFSVIHGFNYSLPKKACRTCKKKFHSACLYKWFTSSNKSTCPLCRETFF

SEQ ID NO: 1903 - DNA, 579 bp, Homo sapiens
acgaggggaaagggcgcagggtttgaaacatggcggacgacgtagaccagcaacaaactaccaacactgtagaggagcccctggatcttatcaggctcagcctagatgagcgaatttatgtgaaaatgagaaatgaccgagagcttcgaggcagattacatgcttatgatcaacatttaaatatgatcttgggagatgtggaagaaactgtgactactatagaaattgatgaagaaacatatgaagagatatataaatcaacgaaacggaatattccaatgctctttgtccggggagatggcgttgtcctggttgcccctccactgagagttggctgaaacaaagaatttgtcctgtatggaaaacgggagactttgtacagtggcctctctaaaagtacaaaacattcataagagaaacctgcatacattttgatattaagaaataattccggggattcttccactcctgaaatgagttgatttgcagataactcacaacttcttaagctaaatggtattttcatttttctcaagctctccaataaatatgaccaccaaaaaaaaaaaaaaaaaaaaa

SEQ ID NO: 1904 - protein, 102 aa, Homo sapiens
MADDVDQQQTTNTVEEPLDLIRLSLDERIYVKMRNDRELRGRLHAYDQHLNMILGDVEETVTTIEIDEETYEEIYKSTKRNIPMLFVRGDGVVLVAPPLRVG

SEQ ID NO: 1905 - DNA, 749 bp, Homo sapiens
cggtgactgagcaaccctagtgacaggagccgaagcagcagcgcaggttgtccccgtttcccctcccccttcccttctccggttgccttcccgggccccttacactccacagtcccggtcccgccatgtcccagaaacaagaagaagagaaccctgcggaggagaccggcgaggagaagcaggacacgcaggagaaagaaggtattctgcctgagagagctgaagaggcaaagctaaaggccaaatacccaagcctaggacaaaagcctggaggctccgacttcctcatgaagagactccagaaagggcaaaagtactttgactcaggagactacaacatggccaaagccaagatgaagaataagcagctgccaagtgcaggaccagacaagaacctggtgactggtgatcacatccccaccccacaggatctgccccagagaaagtcctcgctcgtcaccagcaagcttgcgggtggccaagttgaatgatgctgcccggggctctgccagatcctgagacgcttcccctccctgccccacccgggtcctgtgctggctcctgccccttcctgcttttgcagccaggggtcaggaggtggctcgggtgtgggctggagaggcagaagccctttcctgttggtgtcccagcacatggaccccttgggctgagcaccaagaccttgaaccttttttgttttaccttttttccaaataacagttgggagaaatatcaatgaaattctgccg

SEQ ID NO: 1906 - protein, 121 aa, Homo sapiens
MSQKQEEENPAEETGEEKQDTQEKEGILPERAEEAKLKAKYPSLGQKPGGSDFLMKRLQKGQKYFDSGDYNMAKAKMKNKQLPSAGPDKNLVTGDHIPTPQDLPQRKSSLVTSKLAGGQVE

SEQ ID NO: 1907 - DNA, 688 bp, Homo sapiens
agccccgccccaggcgagggcgccgcacccacaccgcgctgcgcagttttgttctgctccagctgttcgaaggtgatccagacgcaagatggctgtcctctctaaggaatatggttttgtgcttctaactggtgctgccagctttataatggtggcccacctagccatcaatgtttccaaggcccgcaagaagtacaaagtggagtatcctatcatgtacagcacggaccctgaaaatgggcacatcttcaactgcattcagcgagcccaccagaacacgttggaagtgtatcctcccttcttattttttctagctgttggaggtgtttaccacccgcgtatagcttctggcctgggcttggcctggattgttggacgagttctttatgcttatggctattacacgggagaacccagcaagcgtagtcgaggagccctggggtccatcgccctcctgggcttggtgggcacaactgtgtgctctgctttccagcatcttggttgggttaaaagtggcttgggcagtggacccaaatgctgccattaaagaattataggggtttaaaaactctcattcattttaaatgacttacctttatttccagttacattttttttctaaatataataaaaacttacctggcatcagcctcatacctaaaaaaaaaaaaaaaaaaaaaaaaaaaaa

SEQ ID NO: 1908 - protein, 152 aa, Homo sapiens
MAVLSKEYGFVLLTGAASFIMVAHLAINVSKARKKYKVEYPIMYSTDPENGHIFNCIQRAHQNTLEVYPPFLFFLAVGGVYHPRIASGLGLAWIVGRVLYAYGYYTGEPSKRSRGALGSIALLGLVGTTVCSAFQHLGWVKSGLGSGPKCCH

SEQ ID NO: 1909 - DNA, 6757 bp, Homo sapiens
  misc_feature (5926)..(5926): n is a, c, g, or t
  misc_feature (6250)..(6250): n is a, c, g, or t
  misc_feature (6253)..(6253): n is a, c, g, or t
  misc_feature (6323)..(6323): n is a, c, g, or t
ggccctctgcgcgctgcgcccgaagcggcggtcggtggcaggggtggtagcggcggcggcgacggtttcgtgggggccgcgcgctgctctgtgagcggcgggtggcagcaggggactcctgacacttccccttccccaccgaaccgcgctttctgaaacaaagactcattttgaagatgtttaacaaatcatttggaacaccctttgggggtggcacaggtggctttggcacaacttcaacatttggacagaatactggctttggcactactagtggaggggcatttggaacatctgcatttggttctagcaacaatactggaggcctctttggaaattcacagactaaaccaggaggattgtttggaaccagttcatttagccagccagctacctccacaagcactggctttgggtttggtacgtcaacaggaacagcaaataccttgtttggaactgcaagcacagggaccagtctcttctcatcccaaaacaatgcctttgcacaaaataaaccaactggctttggcaattttggaaccagtactagcagtggaggactctttggaaccacaaataccacctctaatccttttggcagcacatctggctccctctttgggccaagtagttttacagctgctcctactgggactactattaaatttaaccctccaactggtacagatactatggtcaaagctggagttagcactaacataagtaccaagcaccagtgtattactgctatgaaagaatatgaaagcaagtcactagaggaacttcgtttagaggattatcaggctaacaggaagggcccacagaaccaggtgggagcaggtaccacaactggcttgtttgggtcttctccagccacttccagcgcaacaggactcttcagctcctccaccactaattcaggctttgcatatggtcagaacaaaactgcctttggaactagtacaactggatttggaacaaatccaggtggtctctttggccaacagaatcagcagactaccagcctcttcagcaaaccatttggccaggctacaaccacccagaacactggcttttcctttggtaataccagcaccataggacagccaagcaccaacaccatgggattatttggagtaacccaagcctcacagcctggaggtctttttgggacagctacaaacaccagcactgggacagcatttggaacaggaacaggtctctttgggcagaccaatactggatttggtgctgttggttcgaccctgtttggcaataacaagcttactacatttggaagcagcacaaccagtgcaccttcatttggtacaaccagtggcgggctctttggttttggcacaaataccagtgggaatagtatttttggaagtaaaccagcacctgggactcttggaactgggcttggtgcaggatttggaacagctcttggtgctggacaggcatctttgtttgggaacaaccaacctaagattggagggcctcttggtacaggagcctttggggcccctggatttaatactacgacagccactttgggctttggagccccccaggccccagtagctttgacagatccaaatgcttctgctgcccagcaggctgttctccagcagcacatcaatagtctaacatactcaccttttggagactctcctctcttccggaatccgatgtcagaccctaagaagaaggaagagagattgaaaccaacaaatccagcagcccagaaggctcttactacacctactcattataaactgacaccccgccctgccactagagtccggccaaaggctttacaaacaacaggcacagccaagtcacatctctttgatgggctggatgacgatgaaccatccctagccaatggagcattcatgcccaagaagagcattaagaagttggttttgaagaaccttaataatagcaatctcttttctcctgttaatcgtgattcagaaaatctagcttcaccatctgaatatccagaaaatggagagagatttagtttcctaagcaaacctgttgatgagaatcaccagcaggatggagatgaagattcccttgtttcacatttttatactaaccctattgccaaacctattcctcaaaccccagaaagtgctggaaataaacacagcaacagcaacagtgtggatgataccattgttgcattaaacatgcgtgctgctttgcgaaatgggctggaaggaagcagtgaagaaacgtcttttcatgatgagtcacttcaggatgaccgagaagaaatagaaaataattcttaccatatgcacccagcaggtattattctcactaaggttggttactatactattccatctatggatgaccttgctaaaattaccaatgtaaaaggagagtgcattgtctctgatttcactattggtcggaaaggttatggttcaatctattttgaaggagatgtgaatttgacaaatctaaatttggatgatattgtgcatatccggaggaaagaagtagttgtctacttagatgataaccaaaaaccacctgtgggtgaagggctaaataggaaggctgaagttacattggatggagtttggccaacagataaaacatctcgttgtttaataaagagcccagatcgccttgctgatatcaactatgaaggaagattggaagcagtttcaaggaaacagggagctcaattcaaagaataccggcctgaaactggttcttgggtgtttaaggtctcccatttttctaagtatggccttcaggattctgatgaagaggaggaggagcatccgtctaaaactagtacaaagaagttgaagactgctcctttgcctcctgcaagccagactacgcccttgcagatggctcttaatggcaaacctgcacctccacctcagagccagagcccagaggtggagcagttagggagggttgtggaactggacagtgacatggtagatatcacccaggagccagttttggataccatgttagaagagagcatgcctgaggatcaggaacctgtgtctgcctcaacacatattgcatcttcactgggaattaatccacatgtcttacagatcatgaaagcatcattgcttactgatgaagaagatgtagatatggcactggatcaacgcttcagtcgcctgccttccaaagcagatacttctcaagaaatctgttctcccagactccccatttcagcatcccactcgtcgaaaactcgttcactagttggtgggttactacaatcaaaatttacaagtggagcttttctttcaccaagtgtctctgtgcaagaatgtcgtactcccagagcagcatctttaatgaatatcccatccacatcctcttggtctgtccctccacccctgacttctgtgttcacaatgcccagcccagcccctgaggttccgttgaaaacagtgggtacacgtaggcaactaggcctagtccctcgtgaaaagtctgtcacctatggcaagggaaaactcttgatggacatggccctattcatgggacgctcatttcgtgttggttggggccccaactggactcttgctaatagtggagaacagctgaatggctctcatgaactagaaaatcatcagattgccgattccatggagtttggattcctgcccaatccagtagctgttaaacccctaactgagtccccattcaaagttcacttagaaaaactcagtttgagacaaagaaagccagatgaagacatgaaattatatcagacacctctggagctcaaattaaaacacagcactgtccatgtggatgaactgtgtcctctcattgtccccaatctgggagttgctgtcattcatgactatgcagattgggttaaagaagcatcaggagacttaccagaagcacaaattgtgaagcactggagcctgacatggacactatgtgaagccctatggggccacctgaaggagcttgacagccagctaaatgaaccccgtgaatacattcaaattctggagcgaagaagagctttctcccgctggctatcctgtactgccacacctcagattgaagaggaagtctccttaacccaaaaaaacagccctgtggaggctgtattcagctacctcacaggcaaaaggatcagtgaggcctgctctctggcccagcagtcaggggatcatcgtcttgctcttcttttatctcagtttgtgggtagccagtcagtccgggagctgctcaccatgcagttggtggactggcatcagctccaagcagactccttcatccaggatgagagactgcgcatctttgctctgttggctggaaaaccggtgtggcagctctcagaaaagaagcaaataaacgtgtgctcccagttggattggaaacgctccctggctatccatctttggtatttgcttccaccaacagcctccatttctagggcgctcagcatgtatgaagaagcatttcagaatacctctgacagtgacagatatgcctgctccccacttccttcgtatctggagggttctggctgtgtgatagcggaggagcaaaactcacagacaccacttcgagatgtctgctttcaccttctaaaactctacagtgacagacattatgatctcaaccagctgctggagcctcgaagcataacagcagatcctttggactaccgcctaagctggcacttgtgggaagtgctgagggatcttaaatacacccatctatcagcgcagtgtgaaggtgtgctacaggccagttacgctggccagcttgaaagtgaggggctctgggagtgggccatctttgtcctcctgcacattgacaactcaggcatacgtgagaaggctgttcgagagctgcttacccggcactgccagctgttggagacccctgaatcttgggctaaagagactttccttacccagaagctccgtgtacctgccaaatggatccacgaggccaaagctgtgcgagcacacatggaatctgacaagcacttagaggccctttgcttatttaaggctgagcactggaaccgctgccacaagctcatcatccgacacttagcttctgatgccatcattaatgagaactatgactacctgaaggggttcttggaagacctggcacctccagagcgcagcagcctaattcaggattgggaaacatctgggcttgtttacctggactatattagagtcattgaaatgctccgccatatacagcaggtggagcatttcaatgactctaatatagtccaggtaatgacctggagcagttacacatcaaagtgacttcactgtgcagtcggatagagcagattcagtgttacagtgctaaagatcgcctggctcagtcagacatggccaaacgtgtagccaacctgctgcgcgtggtgctgagtctgcatcatcctcctgatagaacctccgactcaacaccagaccctcagcgagtccctttgcgcctcttggctccccacattggccggcttcccatgcctgaggactatgccatggacgaactgcgcagccttacccagtcctatctgcgagaactggctgttgggagcctgtgagccccaggcactttgcatcacagtcacatgcccattcacaccacacagaggttccctgccttgtttggattggcactgtttgccattctctgggttggctgtggcatctaccctcccgtcccctgctgccagaagcagcatcctccacttgttcagggcttttcttaatactgaacgtagcataagggcttctggaacccagaagaggagacagtttaccatcctcaagatcattcagtgtttttcctttaaaaaaatggtcaataaagctcctttggcagaatcccccaaagaaccagggtattctttttccatccttagccattntggatcttgtgaccttccatgccaaccagtttccttattcttaccatggccgttttatattaggactccttaggaggagtgagacaggtgataatggatccttaacagatgaactatccacagaaggaagagggatccgtctcttaagtaattggttagttaacactgaattttggaggcaaaggagggttggcctgagttaggaaacaaaatgggatctttctgacacacttagggcagaagtgaatgcctgtcacggagggattgatcttcagggctgtttttgttcctgcctttagagttccatgaacaccatacctttgntantactatgtgcaggaacccttggtcacatgtgacatgtctgtgggaagctcccagagtttggtttggtccntggttttcagtcttgctgagactctgtctggatttgcctgcagagtttggataaaaaataacaggttggtaaccttccaagttcatcccatgttagctccaaagcatttcccaccctccatctaccccttccagaaggcaaaacaaaccatgactgaggcaggcatggagttgggcgttaggggcaggcagagggcctttgctacactgctgacagctatagggagccccaggtaatggcatgagatagctggtgttagggctatctcaggcaatatggccagcacctgggtctttatgcatgaagataatgtaaaggtttttattaaaaaatatatatatgtataaataaatgatctagatattttcctctttttctgaagctactttcttaaaaaataaataaaatgtttatagcattcctggtaaaaaaaa

SEQ ID NO: 1910 - protein, 1712 aa, Homo sapiens
MFNKSFGTPFGGGTGGFGTTSTFGQNTGFGTTSGGAFGTSAFGSSNNTGGLFGNSQTKPGGLFGTSSFSQPATSTSTGFGFGTSTGTANTLFGTASTGTSLFSSQNNAFAQNKPTGFGNFGTSTSSGGLFGTTNTTSNPFGSTSGSLFGPSSFTAAPTGTTIKFNPPTGTDTMVKAGVSTNISTKHQCITAMKEYESKSLEELRLEDYQANRKGPQNQVGAGTTTGLFGSSPATSSATGLFSSSTTNSGFAYGQNKTAFGTSTTGFGTNPGGLFGQQNQQTTSLFSKPFGQATTTQNTGFSFGNTSTIGQPSTNTMGLFGVTQASQPGGLFGTATNTSTGTAFGTGTGLFGQTNTGFGAVGSTLFGNNKLTTFGSSTTSAPSFGTTSGGLFGFGTNTSGNSIFGSKPAPGTLGTGLGAGFGTALGAGQASLFGNNQPKIGGPLGTGAFGAPGFNTTTATLGFGAPQAPVALTDPNASAAQQAVLQQHINSLTYSPFGDSPLFRNPMSDPKKKEERLKPTNPAAQKALTTPTHYKLTPRPATRVRPKALQTTGTAKSHLFDGLDDDEPSLANGAFMPKKSIKKLVLKNLNNSNLFSPVNRDSENLASPSEYPENGERFSFLSKPVDENHQQDGDEDSLVSHFYTNPIAKPIPQTPESAGNKHSNSNSVDDTIVALNMRAALRNGLEGSSEETSFHDESLQDDREEIENNSYHMHPAGIILTKVGYYTIPSMDDLAKITNVKGECIVSDFTIGRKGYGSIYFEGDVNLTNLNLDDIVHIRRKEVVVYLDDNQKPPVGEGLNRKAEVTLDGVWPTDKTSRCLIKSPDRLADINYEGRLEAVSRKQGAQFKEYRPETGSWVFKVSHFSKYGLQDSDEEEEEHPSKTSTKKLKTAPLPPASQTTPLQMALNGKPAPPPQSQSPEVEQLGRVVELDSDMVDITQEPVLDTMLEESMPEDQEPVSASTHIASSLGINPHVLQIMKASLLTDEEDVDMALDQRFSRLPSKADTSQEICSPRLPISASHSSKTRSLVGGLLQSKFTSGAFLSPSVSVQECRTPRAASLMNIPSTSSWSVPPPLTSVFTMPSPAPEVPLKTVGTRRQLGLVPREKSVTYGKGKLLMDMALFMGRSFRVGWGPNWTLANSGEQLNGSHELENHQIADSMEFGFLPNPVAVKPLTESPFKVHLEKLSLRQRKPDEDMKLYQTPLELKLKHSTVHVDELCPLIVPNLGVAVIHDYADWVKEASGDLPEAQIVKHWSLTWTLCEALWGHLKELDSQLNEPREYIQILERRRAFSRWLSCTATPQIEEEVSLTQKNSPVEAVFSYLTGKRISEACSLAQQSGDHRLALLLSQFVGSQSVRELLTMQLVDWHQLQADSFIQDERLRIFALLAGKPVWQLSEKKQINVCSQLDWKRSLAIHLWYLLPPTASISRALSMYEEAFQNTSDSDRYACSPLPSYLEGSGCVIAEEQNSQTPLRDVCFHLLKLYSDRHYDLNQLLEPRSITADPLDYRLSWHLWEVLRDLKYTHLSAQCEGVLQASYAGQLESEGLWEWAIFVLLHIDNSGIREKAVRELLTRHCQLLETPESWAKETFLTQKLRVPAKWIHEAKAVRAHMESDKHLEALCLFKAEHWNRCHKLIIRHLASDAIINENYDYLKGFLEDLAPPERSSLIQDWETSGLVYLDYIRVIEMLRHIQQVEHFNDSNIVQVMTWSSYTSK

SEQ ID NO: 1911 - DNA, 6735 bp, Homo sapiens
ggccctctgcgcgctgcgcccgaagcggcggtcggtggcaggggtggtagcggcggcggcgacggtttcgtgggggccgcgcgctgctctgtgagcggcgggtggcagcaggggactcctgacacttccccttccccaccgaaccgcgctttctgaaacaaagactcattttgaagatgtttaacaaatcatttggaacaccctttgggggtggcacaggtggctttggcacaacttcaacatttggacagaatactggctttggcactactagtggaggggcatttggaacatctgcatttggttctagcaacaatactggaggcctctttggaaattcacagactaaaccaggaggattgtttggaaccagttcatttagccagccagctacctccacaagcactggctttgggtttggtacgtcaacaggaacagcaaataccttgtttggaactgcaagcacagggaccagtctcttctcatcccaaaacaatgcctttgcacaaaataaaccaactggctttggcaattttggaaccagtactagcagtggaggactctttggaaccacaaataccacctctaatccttttggcagcacatctggctccctctttgggccaagtagttttacagctgctcctactgggactactattaaatttaaccctccaactggtacagatactatggtcaaagctggagttagcactaacataagtaccaagcaccagtgtattactgctatgaaagaatatgaaagcaagtcactagaggaacttcgtttagaggattatcaggctaacaggaagggcccacagaaccaggtgggagcaggtaccacaactggcttgtttgggtcttctccagccacttccagcgcaacaggactcttcagctcctccaccactaattcaggctttgcatatggtcagaacaaaactgcctttggaactagtacaactggatttggaacaaatccaggtggtctctttggccaacagaatcagcagactaccagcctcttcagcaaaccatttggccaggctacaaccacccagaacactggcttttcctttggtaataccagcaccataggacagccaagcaccaacaccatgggattatttggagtaacccaagcctcacagcctggaggtctttttgggacagctacaaacaccagcactgggacagcatttggaacaggaacaggtctctttgggcagaccaatactggatttggtgctgttggttcgaccctgtttggcaataacaagcttactacatttggaagcagcacaaccagtgcaccttcatttggtacaaccagtggcgggctctttggttttggcacaaataccagtgggaatagtatttttggaagtaaaccagcacctgggactcttggaactgggcttggtgcaggatttggaacagctcttggtgctggacaggcatctttgtttgggaacaaccaacctaagattggagggcctcttggtacaggagcctttggggcccctggatttaatactacgacagccactttgggctttggagccccccaggccccagtagctttgacagatccaaatgcttctgctgcccagcaggctgttctccagcagcacatcaatagtctaacatactcaccttttggagactctcctctcttccggaatccgatgtcagaccctaagaagaaggaagagagattgaaaccaacaaatccagcagcccagaaggctcttactacacctactcattataaactgacaccccgccctgccactagagtccggccaaaggctttacaaacaacaggcacagccaagtcacatctctttgatgggctggatgacgatgaaccatccctagccaatggagcattcatgcccaagaagagcattaagaagttggttttgaagaaccttaataatagcaatctcttttctcctgttaatcgtgattcagaaaatctagcttcaccatctgaatatccagaaaatggagagagatttagtttcctaagcaaacctgttgatgagaatcaccagcaggatggagatgaagattcccttgtttcacatttttatactaaccctattgccaaacctattcctcaaaccccagaaagtgctggaaataaacacagcaacagcaacagtgtggatgataccattgttgcattaaacatgcgtgctgctttgcgaaatgggctggaaggaagcagtgaagaaacgtcttttcatgatgagtcacttcaggatgaccgagaagaaatagaaaataattcttaccatatgcacccagcaggtattattctcactaaggttggttactatactattccatctatggatgaccttgctaaaattaccaatgaaaaaggagagtgcattgtctctgatttcactattggtcggaaaggttatggttcaatctattttgaaggagatgtgaatttgacaaatctaaatttggatgatattgtgcatatccggaggaaagaagtagttgtctacttagatgataaccaaaaaccacctgtgggtgaagggctaaataggaaggctgaagttacattggatggagtttggccaacagataaaacatctcgttgtttaataaagagcccagatcgccttgctgatatcaactatgaaggaagattggaagcagtttcaaggaaacagggagctcaattcaaagaataccggcctgaaactggttcttgggtgtttaaggtctcccatttttctaagtatggccttcaggattctgatgaagaggaggaggagcatccgtctaaaactagtacaaagaagttgaagactgctcctttgcctcctgcaagccagactacgcccttgcagatggctcttaatggcaaacctgcacctccacctcagagccagagcccagaggtggagcagttagggagggttgtggaactggacagtgacatggtagatatcacccaggagccagttttggataccatgttagaagagagcatgcctgaggatcaggaacctgtgtctgcctcaacacatattgcatcttcactgggaattaatccacatgtcttacagatcatgaaagcatcattgcttactgatgaagaagatgtagatatggcactggatcaacgcttcagtcgcctgccttccaaagcagatacttctcaagaaatctgttctcccagactccccatttcagcatcccactcgtcgaaaactcgttcactagttggtgggttactacaatcaaaatttacaagtggagcttttctttcaccaagtgtctctgtgcaagaatgtcgtactcccagagcagcatctttaatgaatatcccatccacatcctcttggtctgtccctccacccctgacttctgtgttcacaatgcccagcccagcccctgaggttccgttgaaaacagtgggtacacgtaggcaactaggcctagtccctcgtgaaaagtctgtcacctatggcaagggaaaactcttgatggacatggccctattcatgggacgctcatttcgtgttggttggggccccaactggactcttgctaatagtggagaacagctgaatggctctcatgaactagaaaatcatcagattgccgattccatggagtttggattcctgcccaatccagtagctgttaaacccctaactgagtccccattcaaagttcacttagaaaaactcagtttgagacaaagaaagccagatgaagacatgaaattatatcagacacctctggagctcaaattaaaacacagcactgtccatgtggatgaactgtgtcctctcattgtccccaatctgggagttgctgtcattcatgactatgcagattgggttaaagaagcatcaggagacttaccagaagcacaaattgtgaagcactggagcctgacatggacactatgtgaagccctatggggccacctgaaggagcttgacagccagctaaatgaaccccgtgaatacattcaaattctggagcgaagaagagctttctcccgctggctatcctgtactgccacacctcagattgaagaggaagtctccttaacccaaaaaaacagccctgtggaggctgtattcagctacctcacaggcaaaaggatcagtgaggcctgctctctggcccagcagtcaggggatcatcgtcttgctcttcttttatctcagtttgtgggtagccagtcagtccgggagctgctcaccatgcagttggtggactggcatcagctccaagcagactccttcatccaggatgagagactgcgcatctttgctctgttggctggaaaaccggtgtggcagctctcagaaaagaagcaaataaacgtgtgctcccagttggattggaaacgctccctggctatccatctttggtatttgcttccaccaacagcctccatttctagggcgctcagcatgtatgaagaagcatttcagaatacctctgacagtgacagatatgcctgctccccacttccttcgtatctggagggttctggctgtgtgatagcggaggagcaaaactcacagacaccacttcgagatgtctgctttcaccttctaaaactctacagtgacagacattatgatctcaaccagctgctggagcctcgaagcataacagcagatcctttggactaccgcctaagctggcacttgtgggaagtgctgagggctcttaactacacccatctctcagcgcagtgtgaaggtgtgctacaggccagttacgctggccagcttgaaagtgaggggctctgggagtgggccatctttgtcctcctgcacattgacaactcaggcatacgtgagaaggctgttcgagagctgcttacccggcactgccagctgttggagacccctgaatcttgggctaaagagactttccttacccagaagctccgtgtacctgccaaatggatccacgaggccaaagctgtgcgagcacacatggaatctgacaagcacttagaggccctttgcttatttaaggctgagcactggaaccgctgccacaagctcatcatccgacacttagcttctgatgccatcattaatgagaactatgactacctgaaggggttcttggaagacctggcacctccagagcgcagcagcctaattcaggattgggaaacatctgggcttgtttacctggactatattagagtcattgaaatgctccgccatatacagcaggtggattgctcaggtaatgacctggagcagttacacatcaaagtgacttcactgtgcagtcggatagagcagattcagtgttacagtgctaaagatcgcctggctcagtcagacatggccaaacgtgtagccaacctgctgcgcgtggtgctgagtctgcatcatcctcctgatagaacctccgactcaacaccagaccctcagcgagtccctttgcgcctcttggctccccacattggccggcttcccatgcctgaggactatgccatggacgaactgcgcagccttacccagtcctatctgcgagaactggctgttgggagcctgtgagccccaggcactttgcatcacagtcacatgcccattcacaccacacagaggttccctgccttgtttggattggcactgtttgccattctctgggttggctgtggcatctaccctccctccctgctgccagaagcagcatcctccacttgttcagggcttttcttaatactgaacgtagcataagggcttctggaacccagaagaggagacagtttaccatcctcaagatcattcagtgtttttcctttaaaaaaatggtcaataaagctcctttggcagaatcccccaaagaaccagggtattctttttccatccctagccattctggatcttgtgaccctccatgccaaccagcttccctactcctaccctggcccttttatactaggactccttaggaggagtgagacaggtgataatggatccttaacagatgaactatccacagaaggaagagggatccgtctcttaagtaattggttagttaacactgaattttggaggcaaaggagggttggcctgagttaggaaacaaaatgggatctttctgacacacttagggcagaagtgaatgcctgtcacggagggattgatcttcagggctgtttttgttcctgcctttagagttccatgaacaccatacctttgctactactatgtgcaggaacccttggtcacatgtgacatgtctgtgggaagctcccagagtttggtttggtccctggttttcagtcttgctgagactctgtctggatttgcctgcagagtttggataaaaaatggcaggttgggtaaccctccctgttcatcccatgttagctccaaagcatttcccaccctccatctaccccttccagaagcaaaaacaaaccatgactgaggcaggcatggagttgggcgttaggggcaggcagagggcctttgctacactgctgacagctatagggagccccaggtaatggcatgagatagctggtgttagggctatctcaggcaatatggccacacctgggtctttatgcatgaagataatgtaaaggtttttattaaaaaatatatatatgtataaataaatgatctagatattttcctctttttctgaagctactttcttaaaaaataaataaaatgtttatagcattcctggtaaaaaaaa

SEQ ID NO: 1912 - protein, 1800 aa, Homo sapiens
MFNKSFGTPFGGGTGGFGTTSTFGQNTGFGTTSGGAFGTSAFGSSNNTGGLFGNSQTKPGGLFGTSSFSQPATSTSTGFGFGTSTGTANTLFGTASTGTSLFSSQNNAFAQNKPTGFGNFGTSTSSGGLFGTTNTTSNPFGSTSGSLFGPSSFTAAPTGTTIKFNPPTGTDTMVKAGVSTNISTKHQCITAMKEYESKSLEELRLEDYQANRKGPQNQVGAGTTTGLFGSSPATSSATGLFSSSTTNSGFAYGQNKTAFGTSTTGFGTNPGGLFGQQNQQTTSLFSKPFGQATTTQNTGFSFGNTSTIGQPSTNTMGLFGVTQASQPGGLFGTATNTSTGTAFGTGTGLFGQTNTGFGAVGSTLFGNNKLTTFGSSTTSAPSFGTTSGGLFGFGTNTSGNSIFGSKPAPGTLGTGLGAGFGTALGAGQASLFGNNQPKIGGPLGTGAFGAPGFNTTTATLGFGAPQAPVALTDPNASAAQQAVLQQHINSLTYSPFGDSPLFRNPMSDPKKKEERLKPTNPAAQKALTTPTHYKLTPRPATRVRPKALQTTGTAKSHLFDGLDDDEPSLANGAFMPKKSIKKLVLKNLNNSNLFSPVNRDSENLASPSEYPENGERFSFLSKPVDENHQQDGDEDSLVSHFYTNPIAKPIPQTPESAGNKHSNSNSVDDTIVALNMRAALRNGLEGSSEETSFHDESLQDDREEIENNSYHMHPAGIILTKVGYYTIPSMDDLAKITNEKGECIVSDFTIGRKGYGSIYFEGDVNLTNLNLDDIVHIRRKEVVVYLDDNQKPPVGEGLNRKAEVTLDGVWPTDKTSRCLIKSPDRLADINYEGRLEAVSRKQGAQFKEYRPETGSWVFKVSHFSKYGLQDSDEEEEEHPSKTSTKKLKTAPLPPASQTTPLQMALNGKPAPPPQSQSPEVEQLGRVVELDSDMVDITQEPVLDTMLEESMPEDQEPVSASTHIASSLGINPHVLQIMKASLLTDEEDVDMALDQRFSRLPSKADTSQEICSPRLPISASHSSKTRSLVGGLLQSKFTSGAFLSPSVSVQECRTPRAASLMNIPSTSSWSVPPPLTSVFTMPSPAPEVPLKTVGTRRQLGLVPREKSVTYGKGKLLMDMALFMGRSFRVGWGPNWTLANSGEQLNGSHELENHQIADSMEFGFLPNPVAVKPLTESPFKVHLEKLSLRQRKPDEDMKLYQTPLELKLKHSTVHVDELCPLIVPNLGVAVIHDYADWVKEASGDLPEAQIVKHWSLTWTLCEALWGHLKELDSQLNEPREYIQILERRRAFSRWLSCTATPQIEEEVSLTQKNSPVEAVFSYLTGKRISEACSLAQQSGDHRLALLLSQFVGSQSVRELLTMQLVDWHQLQADSFIQDERLRIFALLAGKPVWQLSEKKQINVCSQLDWKRSLAIHLWYLLPPTASISRALSMYEEAFQNTSDSDRYACSPLPSYLEGSGCVIAEEQNSQTPLRDVCFHLLKLYSDRHYDLNQLLEPRSITADPLDYRLSWHLWEVLRALNYTHLSAQCEGVLQASYAGQLESEGLWEWAIFVLLHIDNSGIREKAVRELLTRHCQLLETPESWAKETFLTQKLRVPAKWIHEAKAVRAHMESDKHLEALCLFKAEHWNRCHKLIIRHLASDAIINENYDYLKGFLEDLAPPERSSLIQDWETSGLVYLDYIRVIEMLRHIQQVDCSGNDLEQLHIKVTSLCSRIEQIQCYSAKDRLAQSDMAKRVANLLRVVLSLHHPPDRTSDSTPDPQRVPLRLLAPHIGRLPMPEDYAMDELRSLTQSYLRELAVGSL

SEQ ID NO: 1913 - DNA, 3664 bp, Homo sapiens
ggccctctgcgcgctgcgcccgaagcggcggtcggtggcaggggtggtagcggcggcggcgacggtttcgtgggggccgcgcgctgctctgtgagcggcgggtggcagcaggggactcctgacacttccccttccccaccgaaccgcgctttctgaaacaaagactcattttgaagatgtttaacaaatcatttggaacaccctttgggggtggcacaggtggctttggcacaacttcaacatttggacagaatactggctttggcactactagtggaggggcatttggaacatctgcatttggttctagcaacaatactggaggcctctttggaaattcacagactaaaccaggaggattgtttggaaccagttcatttagccagccagctacctccacaagcactggctttgggtttggtacgtcaacaggaacagcaaataccttgtttggaactgcaagcacagggaccagtctcttctcatcccaaaacaatgcctttgcacaaaataaaccaactggctttggcaattttggaaccagtactagcagtggaggactctttggaaccacaaataccacctctaatccttttggcagcacatctggctccctctttgggccaagtagttttacagctgctcctactgggactactattaaatttaaccctccaactggtacagatactatggtcaaagctggagttagcactaacataagtaccaagcaccagtgtattactgctatgaaagaatatgaaagcaagtcactagaggaacttcgtttagaggattatcaggctaacaggaagggcccacagaaccaggtgggagcaggtaccacaactggcttgtttgggtcttctccagccacttccagcgcaacaggactcttcagctcctccaccactaattcaggctttgcatatggtcagaacaaaactgcctttggaactagtacaactggatttggaacaaatccaggtggtctctttggccaacagaatcagcagactaccagcctcttcagcaaaccatttggccaggctacaaccacccagaacactggcttttcctttggtaataccagcaccataggacagccaagcaccaacaccatgggattatttggagtaacccaagcctcacagcctggaggtctttttgggacagctacaaacaccagcactgggacagcatttggaacaggaacaggtctctttgggcagaccaatactggatttggtgctgttggttcgaccctgtttggcaataacaagcttactacatttggaagcagcacaaccagtgcaccttcatttggtacaaccagtggcgggctctttggttttggcacaaataccagtgggaatagtatttttggaagtaaaccagcacctgggactcttggaactgggcttggtgcaggatttggaacagctcttggtgctggacaggcatctttgtttgggaacaaccaacctaagattggagggcctcttggtacaggagcctttggggcccctggatttaatactacgacagccactttgggctttggagccccccaggccccagtagctttgacagatccaaatgcttctgctgcccagcaggctgttctccagcagcacatcaatagtctaacatactcaccttttggagactctcctctcttccggaatccgatgtcagaccctaagaagaaggaagagagattgaaaccaacaaatccagcagcccagaaggctcttactacacctactcattataaactgacaccccgccctgccactagagtccggccaaaggctttacaaacaacaggcacagccaagtcacatctctttgatgggctggatgacgatgaaccatccctagccaatggagcattcatgcccaagaagagcattaagaagttggttttgaagaaccttaataatagcaatctcttttctcctgttaatcgtgattcagaaaatctagcttcaccatctgaatatccagaaaatggagagagatttagtttcctaagcaaacctgttgatgagaatcaccagcaggatggagatgaagattcccttgtttcacatttttatactaaccctattgccaaacctattcctcaaaccccagaaagtgctggaaataaacacagcaacagcaacagtgtggatgataccattgttgcattaaacatgcgtgctgctttgcgaaatgggctggaaggaagcagtgaagaaacgtcttttcatgatgagtcacttcaggatgaccgagaagaaatagaaaataattcttaccatatgcacccagcaggtattattctcactaaggttggttactatactattccatctatggatgaccttgctaaaattaccaatgaaaaaggagagtgcattgtctctgatttcactattggtcggaaaggttatggttcaatctattttgaaggagatgtgaatttgacaaatctaaatttggatgatattgtgcatatccggaggaaagaagtagttgtctacttagatgataaccaaaaaccacctgtgggtgaagggctaaataggaaggctgaagttacattggatggagtttggccaacagataaaacatctcgttgtttaataaagagcccagatcgccttgctgatatcaactatgaaggaagattggaagcagtttcaaggaaacagggagctcaattcaaagaataccggcctgaaactggttcttgggtgtttaaggtctcccatttttctaagtatggccttcaggattctgatgaagaggaggaggagcatccgtctaaaactagtacaaagaagttgaagactgctcctttgcctcctgcaagccagactacgcccttgcagatggctcttaatggcaaacctgcacctccacctcaggtagagaaaaaaggacagtgaatttgaatggaatccgtgataccgaagttgaaagcaagtcattcagctaatacaaagctgttttatgacccttggaactttgaagagtacaaacattggcaatcacgttgaaacaagtgcaagggagggcgtgaggtcttgcaggcatctgtctttttactggagagatttaaagaattctcttgctgtttggattattcctctacagattgtcattttttaaaccctttgttctctctcatttggacttgctgaattctctgctcagtgattaacttaagatttgctcatgtgggttcatgcacagtaaattctgcctttattgactacctgatgtgcagtttaatctttttctttacctccatggttttttaaaagttaaattagctttctgaaagggtttttaatctccatttttttaaagttgtttgcttatacttcgggtaaccttgatatttgtattttaatagtacataatctttatgaaaaatagtttgggaatgtaaatgaattattatttggcttggggagattagggcctacattgtttatcgcaattacttgtatcattgatacgggatttctttgtaaagcatcctctacctctcagctgctgaaagctagacctttggtattttccatgctataattcttatggctgctgaaatgtgtggtttttatgatttattaaataatctcttaggaggcatttctgaaaaaaaaaa

SEQ ID NO: 1914 - protein, 920 aa, Homo sapiens
MFNKSFGTPFGGGTGGFGTTSTFGQNTGFGTTSGGAFGTSAFGSSNNTGGLFGNSQTKPGGLFGTSSFSQPATSTSTGFGFGTSTGTANTLFGTASTGTSLFSSQNNAFAQNKPTGFGNFGTSTSSGGLFGTTNTTSNPFGSTSGSLFGPSSFTAAPTGTTIKFNPPTGTDTMVKAGVSTNISTKHQCITAMKEYESKSLEELRLEDYQANRKGPQNQVGAGTTTGLFGSSPATSSATGLFSSSTTNSGFAYGQNKTAFGTSTTGFGTNPGGLFGQQNQQTTSLFSKPFGQATTTQNTGFSFGNTSTIGQPSTNTMGLFGVTQASQPGGLFGTATNTSTGTAFGTGTGLFGQTNTGFGAVGSTLFGNNKLTTFGSSTTSAPSFGTTSGGLFGFGTNTSGNSIFGSKPAPGTLGTGLGAGFGTALGAGQASLFGNNQPKIGGPLGTGAFGAPGFNTTTATLGFGAPQAPVALTDPNASAAQQAVLQQHINSLTYSPFGDSPLFRNPMSDPKKKEERLKPTNPAAQKALTTPTHYKLTPRPATRVRPKALQTTGTAKSHLFDGLDDDEPSLANGAFMPKKSIKKLVLKNLNNSNLFSPVNRDSENLASPSEYPENGERFSFLSKPVDENHQQDGDEDSLVSHFYTNPIAKPIPQTPESAGNKHSNSNSVDDTIVALNMRAALRNGLEGSSEETSFHDESLQDDREEIENNSYHMHPAGIILTKVGYYTIPSMDDLAKITNEKGECIVSDFTIGRKGYGSIYFEGDVNLTNLNLDDIVHIRRKEVVVYLDDNQKPPVGEGLNRKAEVTLDGVWPTDKTSRCLIKSPDRLADINYEGRLEAVSRKQGAQFKEYRPETGSWVFKVSHFSKYGLQDSDEEEEEHPSKTSTKKLKTAPLPPASQTTPLQMALNGKPAPPPQVEKKGQ

SEQ ID NO: 1915 - DNA, 6533 bp, Homo sapiens
ggccctctgcgcgctgcgcccgaagcggcggtcggtggcaggggtggtagcggcggcggcgacggtttcgtgggggccgcgcgctgctctgtgagcggcgggtggcagcaggggactcctgacacttccccttccccaccgaaccgcgctttctgaaacaaagactcattttgaagatgtttaacaaatcatttggaacaccctttgggggtggcacaggtggctttggcacaacttcaacatttggacagaatactggctttggcactactagtggaggggcatttggaacatctgcatttggttctagcaacaatactggaggcctctttggaaattcacagactaaaccaggaggattgtttggaaccagttcatttagccagccagctacctccacaagcactggctttgggtttggtacgtcaacaggaacagcaaataccttgtttggaactgcaagcacagggaccagtctcttctcatcccaaaacaatgcctttgcacaaaataaaccaactggctttggcaattttggaaccagtactagcagtggaggactctttggaaccacaaataccacctctaatccttttggcagcacatctggctccctctttgggccaagtagttttacagctgctcctactgggactactattaaatttaaccctccaactggtacagatactatggtcaaagctggagttagcactaacataagtaccaagcaccagtgtattactgctatgaaagaatatgaaagcaagtcactagaggaacttcgtttagaggattatcaggctaacaggaagggcccacagaaccaggtgggagcaggtaccacaactggcttgtttgggtcttctccagccacttccagcgcaacaggactcttcagctcctccaccactaattcaggctttgcatatggtcagaacaaaactgcctttggaactagtacaactggatttggaacaaatccaggtggtctctttggccaacagaatcagcagactaccagcctcttcagcaaaccatttggccaggctacaaccacccagaacactggcttttcctttggtaataccagcaccataggacagccaagcaccaacaccatgggattatttggagtaacccaagcctcacagcctggaggtctttttgggacagctacaaacaccagcactgggacagcatttggaacaggaacaggtctctttgggcagaccaatactggatttggtgctgttggttcgaccctgtttggcaataacaagcttactacatttggaagcagcacaaccagtgcaccttcatttggtacaaccagtggcgggctctttggttttggcacaaataccagtgggaatagtatttttggaagtaaaccagcacctgggactcttggaactgggcttggtgcaggatttggaacagctcttggtgctggacaggcatctttgtttgggaacaaccaacctaagattggagggcctcttggtacaggagcctttggggcccctggatttaatactacgacagccactttgggctttggagccccccaggccccagtagctttgacagatccaaatgcttctgctgcccagcaggctgttctccagcagcacatcaatagtctaacatactcaccttttggagactctcctctcttccggaatccgatgtcagaccctaagaagaaggaagagagattgaaaccaacaaatccagcagcccagaaggctcttactacacctactcattataaactgacaccccgccctgccactagagtccggccaaaggctttacaaacaacaggcacagccaagtcacatctctttgatgggctggatgacgatgaaccatccctagccaatggagcattcatgcccaagaagagcattaagaagttggttttgaagaaccttaataatagcaatctcttttctcctgttaatcgtgattcagaaaatctagcttcaccatctgaatatccagaaaatggagagagatttagtttcctaagcaaacctgttgatgagaatcaccagcaggatggagatgaagattcccttgtttcacatttttatactaaccctattgccaaacctattcctcaaaccccagaaagtgctggaaataaacacagcaacagcaacagtgtggatgataccattgttgcattaaacatgcgtgctgctttgcgaaatgggctggaaggaagcagtgaagaaacgtcttttcatgatgagtcacttcaggatgaccgagaagaaatagaaaataattcttaccatatgcacccagcaggtattattctcactaaggttggttactatactattccatctatggatgaccttgctaaaattaccaatgaaaaaggagagtgcattgtctctgatttcactattggtcggaaaggttatggttcaatctattttgaaggagatgtgaatttgacaaatctaaatttggatgatattgtgcatatccggaggaaagaagtagttgtctacttagatgataaccaaaaaccacctgtgggtgaagggctaaataggaaggctgaagttacattggatggagtttggccaacagataaaacatctcgttgtttaataaagagcccagatcgccttgctgatatcaactatgaaggaagattggaagcagtttcaaggaaacagggagctcaattcaaagaataccggcctgaaactggttcttgggtgtttaaggtctcccatttttctaagtatggccttcaggattctgatgaagaggaggaggagcatccgtctaaaactagtacaaagaagttgaagactgctcctttgcctcctgcaagccagactacgcccttgcagatggctcttaatggcaaacctgcacctccacctcagagccagagcccagaggtggagcagttagggagggttgtggaactggacagtgacatggtagatatcacccaggagccagttttggataccatgttagaagagagcatgcctgaggatcaggaacctgtgtctgcctcaacacatattgcatcttcactgggaattaatccacatgtcttacagatcatgaaagcatcattgcttactgatgaagaagatgtagatatggcactggatcaacgcttcagtcgcctgccttccaaagcagatacttctcaagaaatctgttctcccagactccccatttcagcatcccactcgtcgaaaactcgttcactagttggtgggttactacaatcaaaatttacaagtggagcttttctttcaccaagtgtctctgtgcaagaatgtcgtactcccagagcagcatctttaatgaatatcccatccacatcctcttggtctgtccctccacccctgacttctgtgttcacaatgcccagcccagcccctgaggttccgttgaaaacagtgggtacacgtaggcaactaggcctagtccctcgtgaaaagtctgtcacctatggcaagggaaaactcttgatggacatggccctattcatgggacgctcatttcgtgttggttggggccccaactggactcttgctaatagtggagaacagctgaatggctctcatgaactagaaaatcatcagattgccgattccatggagtttggattcctgcccaatccagtagctgttaaacccctaactgagtccccattcaaagttcacttagaaaaactcagtttgagacaaagaaagccagatgaagacatgaaattatatcagacacctctggagctcaaattaaaacacagcactgtccatgtggatgaactgtgtcctctcattgtccccaatctgggagttgctgtcattcatgactatgcagattgggttaaagaagcatcaggagacttaccagaagcacaaattgtgaagcactggagcctgacatggacactatgtgaagccctatggggccacctgaaggagcttgacagccagctaaatgaaccccgtgaatacattcaaattctggagcgaagaagagctttctcccgctggctatcctgtactgccacacctcagattgaagaggaagtctccttaacccaaaaaaacagccctgtggaggctgtattcagctacctcacaggcaaaaggatcagtgaggcctgctctctggcccagcagtcaggggatcatcgtcttgctcttcttttatctcagtttgtgggtagccagtcagtccgggagctgctcaccatgcagttggtggactggcatcagctccaagcagactccttcatccaggatgagagactgcgcatctttgctctgttggctggaaaaccggtgtggcagctctcagaaaagaagcaaataaacgtgtgctcccagttggattggaaacgctccctggctatccatctttggtatttgcttccaccaacagcctccatttctagggcgctcagcatgtatgaagaagcatttcagaatacctctgacagtgacagatatgcctgctccccacttccttcgtatctggagggttctggctgtgtgatagcggaggagcaaaactcacagacaccacttcgagatgtctgctttcaccttctaaaactctacagtgacagcatacgtgagaaggctgttcgagagctgcttacccggcactgccagctgttggagacccctgaatcttgggctaaagagactttccttacccagaagctccgtgtacctgccaaatggatccacgaggccaaagctgtgcgagcacacatggaatctgacaagcacttagaggccctttgcttatttaaggctgagcactggaaccgctgccacaagctcatcatccgacacttagcttctgatgccatcattaatgagaactatgactacctgaaggggttcttggaagacctggcacctccagagcgcagcagcctaattcaggattgggaaacatctgggcttgtttacctggactatattagagtcattgaaatgctccgccatatacagcaggtggagcatttcaatgactctaatatagtccaggtaatgacctggagcagttacacatcaaagtgacttcactgtgcagtcggatagagcagattcagtgttacagtgctaaagatcgcctggctcagtcagacatggccaaacgtgtagccaacctgctgcgcgtggtgctgagtctgcatcatcctcctgatagaacctccgactcaacaccagaccctcagcgagtccctttgcgcctcttggctccccacattggccggcttcccatgcctgaggactatgccatggacgaactgcgcagccttacccagtcctatctgcgagaactggctgttgggagcctgtgagccccaggcactttgcatcacagtcacatgcccattcacaccacacagaggttccctgccttgtttggattggcactgtttgccattctctgggttggctgtggcatctaccctccctccctgctgccagaagcagcatcctccacttgttcagggcttttcttaatactgaacgtagcataagggcttctggaacccagaagaggagacagtttaccatcctcaagatcattcagtgtttttcctttaaaaaaatggtcaataaagctcctttggcagaatcccccaaagaaccagggtattctttttccatccctagccattctggatcttgtgaccctccatgccaaccagcttccctactcctaccctggcccttttatactaggactccttaggaggagtgagacaggtgataatggatccttaacagatgaactatccacagaaggaagagggatccgtctcttaagtaattggttagttaacactgaattttggaggcaaaggagggttggcctgagttaggaaacaaaatgggatctttctgacacacttagggcagaagtgaatgcctgtcacggagggattgatcttcagggctgtttttgttcctgcctttagagttccatgaacaccatacctttgctactactatgtgcaggaacccttggtcacatgtgacatgtctgtgggaagctcccagagtttggtttggtccctggttttcagtcttgctgagactctgtctggatttgcctgcagagtttggataaaaaatggcaggttgggtaaccctccctgttcatcccatgttagctccaaagcatttcccaccctccatctaccccttccagaagcaaaaacaaaccatgactgaggcaggcatggagttgggcgttaggggcaggcagagggcctttgctacactgctgacagctatagggagccccaggtaatggcatgagatagctggtgttagggctatctcaggcaatatggccacacctgggtctttatgcatgaagataatgtaaaggtttttattaaaaaatatatatatgtataaataaatgatctagatattttcctctttttctgaagctactttcttaaaaaataaataaaatgtttatagcattcctggtaaaaaaaa

SEQ ID NO: 1916 - protein, 1638 aa, Homo sapiens
MFNKSFGTPFGGGTGGFGTTSTFGQNTGFGTTSGGAFGTSAFGSSNNTGGLFGNSQTKPGGLFGTSSFSQPATSTSTGFGFGTSTGTANTLFGTASTGTSLFSSQNNAFAQNKPTGFGNFGTSTSSGGLFGTTNTTSNPFGSTSGSLFGPSSFTAAPTGTTIKFNPPTGTDTMVKAGVSTNISTKHQCITAMKEYESKSLEELRLEDYQANRKGPQNQVGAGTTTGLFGSSPATSSATGLFSSSTTNSGFAYGQNKTAFGTSTTGFGTNPGGLFGQQNQQTTSLFSKPFGQATTTQNTGFSFGNTSTIGQPSTNTMGLFGVTQASQPGGLFGTATNTSTGTAFGTGTGLFGQTNTGFGAVGSTLFGNNKLTTFGSSTTSAPSFGTTSGGLFGFGTNTSGNSIFGSKPAPGTLGTGLGAGFGTALGAGQASLFGNNQPKIGGPLGTGAFGAPGFNTTTATLGFGAPQAPVALTDPNASAAQQAVLQQHINSLTYSPFGDSPLFRNPMSDPKKKEERLKPTNPAAQKALTTPTHYKLTPRPATRVRPKALQTTGTAKSHLFDGLDDDEPSLANGAFMPKKSIKKLVLKNLNNSNLFSPVNRDSENLASPSEYPENGERFSFLSKPVDENHQQDGDEDSLVSHFYTNPIAKPIPQTPESAGNKHSNSNSVDDTIVALNMRAALRNGLEGSSEETSFHDESLQDDREEIENNSYHMHPAGIILTKVGYYTIPSMDDLAKITNEKGECIVSDFTIGRKGYGSIYFEGDVNLTNLNLDDIVHIRRKEVVVYLDDNQKPPVGEGLNRKAEVTLDGVWPTDKTSRCLIKSPDRLADINYEGRLEAVSRKQGAQFKEYRPETGSWVFKVSHFSKYGLQDSDEEEEEHPSKTSTKKLKTAPLPPASQTTPLQMALNGKPAPPPQSQSPEVEQLGRVVELDSDMVDITQEPVLDTMLEESMPEDQEPVSASTHIASSLGINPHVLQIMKASLLTDEEDVDMALDQRFSRLPSKADTSQEICSPRLPISASHSSKTRSLVGGLLQSKFTSGAFLSPSVSVQECRTPRAASLMNIPSTSSWSVPPPLTSVFTMPSPAPEVPLKTVGTRRQLGLVPREKSVTYGKGKLLMDMALFMGRSFRVGWGPNWTLANSGEQLNGSHELENHQIADSMEFGFLPNPVAVKPLTESPFKVHLEKLSLRQRKPDEDMKLYQTPLELKLKHSTVHVDELCPLIVPNLGVAVIHDYADWVKEASGDLPEAQIVKHWSLTWTLCEALWGHLKELDSQLNEPREYIQILERRRAFSRWLSCTATPQIEEEVSLTQKNSPVEAVFSYLTGKRISEACSLAQQSGDHRLALLLSQFVGSQSVRELLTMQLVDWHQLQADSFIQDERLRIFALLAGKPVWQLSEKKQINVCSQLDWKRSLAIHLWYLLPPTASISRALSMYEEAFQNTSDSDRYACSPLPSYLEGSGCVIAEEQNSQTPLRDVCFHLLKLYSDSIREKAVRELLTRHCQLLETPESWAKETFLTQKLRVPAKWIHEAKAVRAHMESDKHLEALCLFKAEHWNRCHKLIIRHLASDAIINENYDYLKGFLEDLAPPERSSLIQDWETSGLVYLDYIRVIEMLRHIQQVEHFNDSNIVQVMTWSSYTSK

SEQ ID NO: 1917 - DNA, 487 bp, Homo sapiens
  misc_feature (22)..(22): n is a, c, g, or t
ccgtgatgtggcgcctgcacantcctttccctttcggattcccgacgctgtggttgctgtaaggggtcctccctgcgccacacggccgtcgccatggtgaagctgagcaaagaggccaagcagagactacagcagctcttcaaggggagccagtttgccattcgctggggctttatccctcttgtgatttacctgggatttaagaggggtgcagatcccggaatgcctgaaccaactgttttgagcctactttggggataaaggattatttggtcttctggatttggaggcaatcagcggacagcatggaagatgtgtgctctggctcggataagagatgggacatcattcagtcactagttggatggcacaaggctcttcacagacgcatctgtagcagagtggaacttgtactaacttatgatagaatgtatcagaataaatgtttttaacagtgtaaaaaaaaaaaaaaaaaaaaaaaaaaaaa

SEQ ID NO: 1918 - protein, 55 aa, Homo sapiens
MVKLSKEAKQRLQQLFKGSQFAIRWGFIPLVIYLGFKRGADPGMPEPTVLSLLWG

SEQ ID NO: 1919 - DNA, 770 bp, Homo sapiens
cggagcagctctacccctcacgacgcagacatggcagcgcagaaggaccagcagaaagatgccgaggcggaagggctgagcggcacgaccctgctgccgaagctgattccctccggtgcaggccgggagtggctggagcggcgccgcgcgaccatccggccctggagcaccttcgtggaccagcagcgcttctcacggccccgcaacctgggagagctgtgccagcgcctcgtacgcaacgtggagtactaccagagcaactatgtgttcgtgttcctgggcctcatcctgtactgtgtggtgacgtcccctatgttgctggtggctctggctgtctttttcggcgcctgttacattctctatctgcgcaccttggagtccaagcttgtgctctttggccgagaggtgagcccagagcatcagtatgctctggctggaggcatctccttccccttcttctggctggctggtgcgggctcggccgtcttctgggtgctgggagccaccctggtggtcatcggctcccacgctgccttccaccagattgaggctgtggacggggaggagctgcagatggaacccgtgtgaggtgtcttctgggacctgccggcctcccgggccagctgccccacccctgcccatgcctgtcctgcacggctctgctgctcgggcccacagcgccgtcccatcacaagcccggggagggatcccgcctttgaaaataaagctgttatgggtgtcattcaggaaaaaaaaaaaaaaaaaaaaaa

SEQ ID NO: 1920 - protein, 185 aa, Homo sapiens
MAAQKDQQKDAEAEGLSGTTLLPKLIPSGAGREWLERRRATIRPWSTFVDQQRFSRPRNLGELCQRLVRNVEYYQSNYVFVFLGLILYCVVTSPMLLVALAVFFGACYILYLRTLESKLVLFGREVSPEHQYALAGGISFPFFWLAGAGSAVFWVLGATLVVIGSHAAFHQIEAVDGEELQMEPV

SEQ ID NO: 1921 - DNA, 1791 bp, Homo sapiens
gagcccggctgcggatctgggaagcgcctcttcacggcactgggatccgcatctgcctgggatcatcaagccctagaagctgggtttctttaaattagggctgccgttttctgtttctccctgggctgcggaaagccagaagattttatctagcttatacaaggctgctggtgttccctctttttttccacgagggtgtttttggctgcaattgcatgaaatcccaatggtgtagaccagtggcgatggatctaggagtttaccaactgagacatttttcaatttctttcttgtcatccttgctggggactgaaaacgcttctgtgagacttgataatagctcctctggtgcaagtgtggtagctattgacaacaaaatcgagcaagctatggatctagtgaaaagccatttgatgtatgcggtcagagaagaagtggaggtcctcaaagagcaaatcaaagaactaatagagaaaaattcccagctggagcaggagaacaatctgctgaagacactggccagtcctgagcagcttgcccagtttcaggcccagctgcagactggctccccccctgccaccacccagccacagggcaccacacagccccccgcccagccagcatcgcagggctcaggaccaaccgcatagctgcctatgcccccgcagaactggctgctgcgtgtgaactgaacagacggagaagatgtgctagggagaatctgcctccacagtcacccatttcattgctcgctgcgaaagagacgtgagactgacatatgccattatctcttttccagtattaaacactcatatgcttatggcttggagaaatttcttagttgggtgaattaaaggttaatccgagaattagcatggatataccgggacctcatgcagcttggcagatatctgagaaatggtttaattcatgctcaggagctgtgtgcctttccatcccttccggctccctacccctcacttccaagggttctctctcctgcttgcgcttagtgtcctacatggggttgtgaagcgatggagctcctcactggactcgcctctctcctctcctccccccaggaggaacttgaaaggagggtaaaaagactaaaatgagggggaacagagttcactgtacaaatttgacaactgtcaccaaaattcataaaaaacaatagtactgtgcctctttcttctcaaacaatggatgacacaaaactatgagagtgacaaaatggtgacaggtagctgggacctaggctatcttaccatgaaggttgttttgcttattgtatatttgtgtatgtagtgtaactattttgtacaatagaggactgtaactactatttaggttgtacagattgaaatttagttgtttcattggctgtctgaggaggtgtggacttttatatatagatctacataaaaactgctacatgacaaaaaccacacctaaagaaattttaagaatttggcacagttactcactttgtgtaatctgaaatctagctgctgaatacgctgaagtaaatccttgttcactgaagtctttcaattgagctggttgaatactttgaaaaatgctcagttctaactaatgaaatggatttcccagtaggggtttctgcatatcacctgtatagtagttatatgcatatgtttctgtgcatgttctctacacaattgtaaggtgtcactgtatttaactgttgcacttgtcaactttcaataaagcatataaatgttgataaaaaaaaaaaaaaaaaaaaaaaaaaaaaaaaaaaaaaaa

SEQ ID NO: 1922 - protein, 144 aa, Homo sapiens
MKSQWCRPVAMDLGVYQLRHFSISFLSSLLGTENASVRLDNSSSGASVVAIDNKIEQAMDLVKSHLMYAVREEVEVLKEQIKELIEKNSQLEQENNLLKTLASPEQLAQFQAQLQTGSPPATTQPQGTTQPPAQPASQGSGPTA

SEQ ID NO: 1923 - DNA, 8838 bp, Homo sapiens
cgccctcgagtggaggacgagaaggaaagcaccatgacgtccatccatttcgtggttcacccgctgccgggcaccgaggaccagctcaatgacaggttacgagaagtttctgagaagctgaacaaatataatttaaacagccacccccctttgaatgtattggaacaggctactattaaacagtgtgtggtgggaccaaatcatgctgcctttcttcttgaggatggtagagtttgcaggattggtttttcagtacagccagacagattggaattgggtaaacctgataataatgatgggtcaaagttgaacagcaactcgggggcagggaggacgtcaaggcctggtaggacaagcgactctccatggtttctctcaggttctgagactctaggcaggctggcaggcaacaccttaggaagccgctggagttctggagtgggtggaagtggtggaggatcctctggtaggtcatcagctggagctcgagattcccgccggcagactcgagttattcggacaggacgggatcgagggtctgggcttttgggcagtcagccccagccagttattccagcatctgtcattccagaggagctgatttcacaggcccaagttgttttacaaggcaaatccagaagtgtcattattcgagaacttcagagaacaaatcttgatgtgaaccttgctgtaaataatttacttagccgggatgatgaagatggagatgatggggatgatacagccagcgaatcttatttgcctggagaggatcttatgtctctccttgatgccgacattcattctgcccacccaagtgtcattattgatgcagatgccatgttttctgaagacattagctattttggttacccttcttttcgtcgttcatcactttccaggctaggctcatctcgagttctccttcttcccttagagagagactctgagctgttgcgtgaacgtgaatccgttttacgtttacgtgaacgaaggtggcttgatggagcctcatttgataatgaaaggggttctaccagcaaggaaggagagccaaacttggataagaagaatacacctgttcaaagtccagtatctctaggagaagatttgcagtggtggcctgataaggatggaacaaaattcatctgtattggggctctgtattctgaacttctggctgtcagcagtaaaggagaactttatcagtggaaatggagtgaatctgagccttacagaaatgcccagaatccttcattacatcatccacgagcaacatttttggggttaaccaatgaaaagatagtcctcctgtctgcaaatagcataagagcaactgtagctacagaaaataacaaggttgctacatgggtggatgaaactttaagttctgtggcttctaaattagagcacactgctcagacttactctgaacttcaaggagagcggatagtttctttacattgctgtgccctttacacctgcgctcagctggaaaacagtttatattggtggggtgtagttccttttagtcaaaggaagaaaatgttagagaaagctagagcaaaaaataaaaagcctaaatccagtgctggtatttcttcaatgccgaacatcactgttggtacccaggtatgcttgagaaataatcctctttatcatgctggagcagttgcattttcaattagtgctgggattcctaaagttggtgtcttaatggagtcagtttggaatatgaatgacagctgtagatttcaacttagatctcctgaaagcttgaaaaacatggaaaaagctagcaaaactactgaagctaagcctgaaagtaagcaggagccagtgaaaacagaaatgggtcctccaccatctccagcatccacgtgtagtgatgcatcctcaattgccagcagtgcatcaatgccatacaaacgacgacggtcaacccctgcaccaaaagaagaggaaaaggtgaatgaagagcagtggtctcttcgggaagtggtttttgtggaagatgtcaagaatgttcctgttggcaaggtgctaaaagtagatggtgcctatgttgctgtaaaatttccaggaacctccagtaatactaactgtcagaacagctctggtccagatgctgacccttcttctctcctgcaggattgtaggttacttagaattgatgaattgcaggttgtcaaaactggtggaacaccgaaggttcccgactgtttccaaaggactcctaaaaagctttgtatacctgaaaaaacagaaatattagcagtgaatgtagattccaaaggtgttcatgctgttctgaagactggaaattgggtgcgatactgtatctttgatcttgctacaggaaaagcagaacaggaaaataattttcctacaagcagcattgctttccttggtcagaatgagaggaatgtagccattttcactgctggacaggaatctcccattattcttcgagatggaaatggtaccatctacccaatggccaaagattgcatgggaggaataagggatcccgattggctggatcttccacctattagtagtcttggaatgggtgtgcattctttaataaatcttcctgccaattcaacaatcaaaaagaaagctgctgttatcatcatggctgtagagaaacaaaccttaatgcaacacattctgcgctgtgactatgaggcctgtcgacaatatctaatgaatcttgagcaagcggttgttttagagcagaatctacagatgctgcagacattcatcagccacagatgtgatggaaatcgaaatattttgcatgcttgtgtatcagtttgctttccaaccagcaataaagaaactaaagaagaagaggaagcggagcgttctgaaagaaatacatttgcagaaaggctttctgctgttgaggccattgcaaatgcaatatcagttgtttcaagtaatggcccaggtaatcgggctggatcatcaagtagccgaagtttgagattacgggaaatgatgagacgttcgttgagagcagctggtttgggtagacatgaagctggagcttcatccagtgaccaccaggatccagtttcaccccccatagctccccctagttgggttcctgaccctcctgcgatggatcctgatggtgacattgattttatcctggcccccgctgtgggatctcttaccacagcagcaaccggtactggtcaaggaccaagcacctccactattccaggtccttccacagagccatctgtagtagaatccaaggatcgaaaggcgaatgctcattttatattgaaattgttatgtgacagtgtggttctccagccctatctacgagaacttctttctgccaaggatgcaagagggatgaccccatttatgtcagctgtaagtggccgagcttatcctgctgcaattaccatcttagaaactgctcagaaaattgcaaaagctgaaatatcctcaagtgaaaaagaggaagatgtattcatgggaatggtttgcccatcaggtaccaaccctgatgactctcctttatatgttttatgttgtaatgacacttgcagttttacatggactggagcagagcacattaaccaggatatttttgagtgtcgaacttgtggcttgctggagtcactgtgttgttgtacggaatgtgcaagggtttgtcataaaggtcatgattgcaaactcaaacggacatcaccaacagcctactgtgattgttgggagaaatgtaaatgtaaaactcttattgctggacagaaatctgctcgtcttgatctactttatcgcctgctcactgctactaatctggttactctgccaaacagcaggggagagcacctcttactattcttagtacagacagtcgcaaggcagacggtggagcattgtcaatacaggccacctcgaatcagggaagatcgtaaccgaaaaacagccagtcctgaagattcagatatgccagatcatgatttagagcctccaagatttgcccagcttgcattggagcgtgttctacaggactggaatgccttgaaatctatgattatgtttgggtcgcaggagaataaagaccctcttagtgccagcagtagaataggccatcttttgccagaagagcaagtatacctcaatcagcaaagtggcacaattcggctggactgtttcactcattgccttatagttaagtgtacagcagatattttgcttttagatactctactaggtacactagtgaaagaactccaaaacaaatatacacctggacgtagagaagaagctattgctgtgacaatgaggtttctacgttcagtggcaagagtttttgttattctgagtgtggaaatggcttcatccaaaaagaaaaacaactttattccacagccaattggaaaatgcaagcgtgtattccaagcattgctaccttacgctgtggaagaattgtgcaacgtagcagagtcactgattgttcctgtcagaatggggattgctcgtccaactgcaccatttaccctggctagtactagcatagatgccatgcagggcagtgaagaattattttcagtggaaccactaccaccacgaccatcatctgatcagtctagcagctccagtcagtctcagtcatcctacatcatcaggaatccacagcagaggcgcatcagccagtcacagcccgttcggggcagagatgaagaacaggatgatattgtttcagcagatgtggaagaggttgaggtggtggagggtgtggctggagaagaggatcatcatgatgaacaggaagaacacggggaagaaaatgctgaggcagagggacaacatgatgagcatgatgaagacgggagtgatatggagctggacttgttagcagcagctgaaacagaaagtgatagtgaaagtaaccacagcaaccaagataatgctagtgggcgcagaagcgttgtcactgcagcaactgctggttcagaagcaggagcaagcagtgttcctgccttcttttctgaagatgattctcaatcgaatgactcaagtgattctgatagcagtagtagtcagagtgacgacatagaacaggagacctttatgcttgatgagccattagaaagaaccacaaatagctcccatgccaatggtgctgcccaagctccccgttcaatgcagtgggctgtccgcaacacccagcatcagcgagcagccagtacagccccttccagtacatctacaccagcagcaagttcagcgggtttgatttatattgatccttcaaacttacgccggagtggtaccatcagtacaagtgctgcagctgcagcagctgctttggaagctagcaacgccagcagttacctaacatctgcaagcagtttagccagggcttacagcattgtcattagacaaatctcggacttgatgggccttattcctaagtataatcacctagtatactctcagattccagcagctgtgaaattgacttaccaagatgcagtaaacttacagaactatgtagaagaaaagcttattcccacttggaactggatggtcagtattatggattctactgaagctcaattacgttatggttctgcattagcatctgctggtgatcctggacatccaaatcatcctcttcacgcttctcagaattcagcgagaagagagaggatgactgcgcgagaagaagctagcttacgaacacttgaaggcagacgacgtgccaccttgcttagcgcccgtcaaggaatgatgtctgcacgaggagacttcctaaattatgctctgtctctaatgcggtctcataatgatgagcattctgatgttcttccagttttggatgtttgctcattgaagcatgtggcatatgtttttcaagcacttatatactggattaaggcaatgaatcagcagacaacattggatacacctcaactagaacgcaaaaggacgcgagaactcttggaactgggtattgataatgaagattcagaacatgaaaatgatgatgacaccaatcaaagtgctactttgaatgataaggatgatgactctcttcctgcagaaactggccaaaaccatccatttttccgacgttcagactccatgacattccttgggtgtatacccccaaatccatttgaagtgcctctggctgaagccatccccttggctgatcagccacatctgttgcagccaaatgctagaaaggaggatctttttggccgtccaagtcagggtctttattcttcatctgccagtagtgggaaatgtttaatggaggttacagtggatagaaactgcctagaggttcttccaacaaaaatgtcttatgctgccaatctgaaaaatgtaatgaacatgcaaaaccggcaaaaaaaagaaggggaagaacagcccgtgctgccagaagaaactgagagttcaaaaccagggccatctgctcatgatcttgctgcacaattaaaaagtagcttactagcagaaataggacttactgaaagtgaagggccacctctcacatctttcaggccacagtgtagctttatgggaatggttatttcccatgatatgctgctaggacgttggcgcctttctttagaactgttcggcagggtattcatggaagatgttggagcagaacctggatcaatcctaactgaattgggtggttttgaggtaaaagaatcaaaattccgcagagaaatggaaaaactgagaaaccagcagtcaagagatttgtcactagaggttgatcgggatcgagatcttctcattcagcagactatgaggcagcttaacaatcactttggtcgaagatgtgctactacaccaatggctgtacacagagtaaaagtcacatttaaggatgagccaggagagggcagtggtgtagcacgaagtttttatacagccattgcacaagcatttttatcaaatgaaaaattgccaaatctagagtgtatccaaaatgccaacaaaggcacccacacaagtttaatgcagagattaaggaaccgaggagagagagaccgggaaagggagagagaaagggaaatgaggaggagtagtggtttgcgagcaggttctcggagggaccgggatagagactttagaagacagctttccatcgacactaggccctttagaccagcctctgaagggaatcctagcgatgatcctgagcctttgccagcacatcggcaggcacttggagagaggctttatcctcgtgtacaagcaatgcaaccagcatttgcaagtaaaatcactggcatgttgttggaattatccccagctcagctgcttctccttctagcaagtgaggattctctgagagcaagagtggatgaggccatggaactcattattgcacatggacgggaaaatggagctgatagtatcctggatcttggattagtagactcctcagaaaaggtacagcaggaaaaccgaaagcgccatggctctagtcgaagtgtagtagatatggatttagatgatacagatgatggtgatgacaatgcccctttgttttaccaacctgggaaaagaggattttatactccaaggcctggcaagaacacagaagcaaggttgaattgtttcagaaacattggcaggattcttggactatgtctgttacagaatgaactctgtcctatcacattgaatagacatgtaattaaagtattgcttggtagaaaagtcaattggcatgattttgctttttttgatcctgtaatgtatgagagtttgcggcaactaatcctcgcgtctcagagttcagatgctgatgctgttttctcagcaatggatttggcatttgcaattgacctgtgtaaagaagaaggtggaggacaggttgaactcattcctaatggtgtaaatataccagtcactccacagaatgtatatgagtatgtgcggaaatacgcagaacacagaatgttggtagttgcagaacagcccttacatgcaatgaggaaaggtctactagatgtgcttccaaaaaattcattagaagatttaacggcagaagattttaggcttttggtaaatggctgcggtgaagtcaatgtgcaaatgctgatcagttttacctctttcaatgatgaatcaggagaaaatgctgagaagcttctgcagttcaagcgttggttctggtcaatagtagagaagatgagcatgacagaacgacaagatcttgtttacttttggacatcaagcccatcactgccagccagtgaagaaggattccagcctatgccctcaatcacaataagaccaccagatgaccaacatcttcctactgcaaatacttgcatttctcgactttacgtcccactctattcctctaaacagattctcaaacagaaattgttactcgccattaagaccaagaattttggttttgtgtagagtataaaaagtgtgtattgctgtgtaatattactagcaaattttgtagatttttttccatttgtctataaaagttaaagtttatggaagttaatgctgtcatacccccctggtggtaccttaaagagataaaatgcagacattccttgctgagtttatagcttaaaggcctaaggagcactagcaacatttggctatattggtttgctagtcaccaacttctgggtctaaccccagccaaagatgacagcagaacaacataatttacactgtgatttatctttttgctgaggggaaaaaaatgtaaatgttctgaaaattcactgctgcctttgtggaaactgtttcagcaaaggttcttgtatagagggaatagggaatttcaaaataaaaaattaagtatgt

SEQ ID NO: 1924 - protein, 2799 aa, Homo sapiens
MTSIHFVVHPLPGTEDQLNDRLREVSEKLNKYNLNSHPPLNVLEQATIKQCVVGPNHAAFLLEDGRVCRIGFSVQPDRLELGKPDNNDGSKLNSNSGAGRTSRPGRTSDSPWFLSGSETLGRLAGNTLGSRWSSGVGGSGGGSSGRSSAGARDSRRQTRVIRTGRDRGSGLLGSQPQPVIPASVIPEELISQAQVVLQGKSRSVIIRELQRTNLDVNLAVNNLLSRDDEDGDDGDDTASESYLPGEDLMSLLDADIHSAHPSVIIDADAMFSEDISYFGYPSFRRSSLSRLGSSRVLLLPLERDSELLRERESVLRLRERRWLDGASFDNERGSTSKEGEPNLDKKNTPVQSPVSLGEDLQWWPDKDGTKFICIGALYSELLAVSSKGELYQWKWSESEPYRNAQNPSLHHPRATFLGLTNEKIVLLSANSIRATVATENNKVATWVDETLSSVASKLEHTAQTYSELQGERIVSLHCCALYTCAQLENSLYWWGVVPFSQRKKMLEKARAKNKKPKSSAGISSMPNITVGTQVCLRNNPLYHAGAVAFSISAGIPKVGVLMESVWNMNDSCRFQLRSPESLKNMEKASKTTEAKPESKQEPVKTEMGPPPSPASTCSDASSIASSASMPYKRRRSTPAPKEEEKVNEEQWSLREVVFVEDVKNVPVGKVLKVDGAYVAVKFPGTSSNTNCQNSSGPDADPSSLLQDCRLLRIDELQVVKTGGTPKVPDCFQRTPKKLCIPEKTEILAVNVDSKGVHAVLKTGNWVRYCIFDLATGKAEQENNFPTSSIAFLGQNERNVAIFTAGQESPIILRDGNGTIYPMAKDCMGGIRDPDWLDLPPISSLGMGVHSLINLPANSTIKKKAAVIIMAVEKQTLMQHILRCDYEACRQYLMNLEQAVVLEQNLQMLQTFISHRCDGNRNILHACVSVCFPTSNKETKEEEEAERSERNTFAERLSAVEAIANAISVVSSNGPGNRAGSSSSRSLRLREMMRRSLRAAGLGRHEAGASSSDHQDPVSPPIAPPSWVPDPPAMDPDGDIDFILAPAVGSLTTAATGTGQGPSTSTIPGPSTEPSVVESKDRKANAHFILKLLCDSVVLQPYLRELLSAKDARGMTPFMSAVSGRAYPAAITILETAQKIAKAEISSSEKEEDVFMGMVCPSGTNPDDSPLYVLCCNDTCSFTWTGAEHINQDIFECRTCGLLESLCCCTECARVCHKGHDCKLKRTSPTAYCDCWEKCKCKTLIAGQKSARLDLLYRLLTATNLVTLPNSRGEHLLLFLVQTVARQTVEHCQYRPPRIREDRNRKTASPEDSDMPDHDLEPPRFAQLALERVLQDWNALKSMIMFGSQENKDPLSASSRIGHLLPEEQVYLNQQSGTIRLDCFTHCLIVKCTADILLLDTLLGTLVKELQNKYTPGRREEAIAVTMRFLRSVARVFVILSVEMASSKKKNNFIPQPIGKCKRVFQALLPYAVEELCNVAESLIVPVRMGIARPTAPFTLASTSIDAMQGSEELFSVEPLPPRPSSDQSSSSSQSQSSYIIRNPQQRRISQSQPVRGRDEEQDDIVSADVEEVEVVEGVAGEEDHHDEQEEHGEENAEAEGQHDEHDEDGSDMELDLLAAAETESDSESNHSNQDNASGRRSVVTAATAGSEAGASSVPAFFSEDDSQSNDSSDSDSSSSQSDDIEQETFMLDEPLERTTNSSHANGAAQAPRSMQWAVRNTQHQRAASTAPSSTSTPAASSAGLIYIDPSNLRRSGTISTSAAAAAAALEASNASSYLTSASSLARAYSIVIRQISDLMGLIPKYNHLVYSQIPAAVKLTYQDAVNLQNYVEEKLIPTWNWMVSIMDSTEAQLRYGSALASAGDPGHPNHPLHASQNSARRERMTAREEASLRTLEGRRRATLLSARQGMMSARGDFLNYALSLMRSHNDEHSDVLPVLDVCSLKHVAYVFQALIYWIKAMNQQTTLDTPQLERKRTRELLELGIDNEDSEHENDDDTNQSATLNDKDDDSLPAETGQNHPFFRRSDSMTFLGCIPPNPFEVPLAEAIPLADQPHLLQPNARKEDLFGRPSQGLYSSSASSGKCLMEVTVDRNCLEVLPTKMSYAANLKNVMNMQNRQKKEGEEQPVLPEETESSKPGPSAHDLAAQLKSSLLAEIGLTESEGPPLTSFRPQCSFMGMVISHDMLLGRWRLSLELFGRVFMEDVGAEPGSILTELGGFEVKESKFRREMEKLRNQQSRDLSLEVDRDRDLLIQQTMRQLNNHFGRRCATTPMAVHRVKVTFKDEPGEGSGVARSFYTAIAQAFLSNEKLPNLECIQNANKGTHTSLMQRLRNRGERDREREREREMRRSSGLRAGSRRDRDRDFRRQLSIDTRPFRPASEGNPSDDPEPLPAHRQALGERLYPRVQAMQPAFASKITGMLLELSPAQLLLLLASEDSLRARVDEAMELIIAHGRENGADSILDLGLVDSSEKVQQENRKRHGSSRSVVDMDLDDTDDGDDNAPLFYQPGKRGFYTPRPGKNTEARLNCFRNIGRILGLCLLQNELCPITLNRHVIKVLLGRKVNWHDFAFFDPVMYESLRQLILASQSSDADAVFSAMDLAFAIDLCKEEGGGQVELIPNGVNIPVTPQNVYEYVRKYAEHRMLVVAEQPLHAMRKGLLDVLPKNSLEDLTAEDFRLLVNGCGEVNVQMLISFTSFNDESGENAEKLLQFKRWFWSIVEKMSMTERQDLVYFWTSSPSLPASEEGFQPMPSITIRPPDDQHLPTANTCISRLYVPLYSSKQILKQKLLLAIKTKNFGFV

SEQ ID NO: 1925 - DNA, 9390 bp, Homo sapiens
ggcaatttcttttcctttctaactgtggcccgcgttgtgctgttgctgggcaggcgttgggcgccggcggtcttcgagcgtgggggcccgctggctttcccttctcagaaactgcgccgggggcgctcgcttgccccggattcggacgcggcgctccccgggctcgtctgaagtgcagatcgccgcagaggccccagtgcccggatgtccatcaggattagcgcgagccaatacgggccgagcccggggctgcgccgaggacgcccggggctcgagagcaggtagtcccgtaacatcggggcgccgcgccgggacgcgtccccgcccggctccgccaaatggtgagcgcggcgctggcagcagggcccgcggggtgaaggcgctcatggacggaagacccctggctctataagctgaattatggcagcccagtcaagtttgtacaatgacgacagaaacctgcttcgaattagagagaaggaaagacgcaaccaggaagcccaccaagagaaagaggcatttcctgaaaagattcccctttttggagagccctacaagacagcaaaaggtgatgagctgtctagtcgaatacagaacatgttgggaaactacgaagaagtgaaggagttccttagtactaagtctcacactcatcgcctggatgcttctgaaaataggttgggaaagccgaaatatcctttaattcctgacaaagggagcagcattccatccagctccttccacactagtgtccaccaccagtccattcacactcctgcgtctggaccactttctgttggcaacattagccacaatccaaagatggcgcagccaagaactgaaccaatgccaagtctccatgccaaaagctgcggcccaccggacagccagcacctgacccaggatcgccttggtcaggaggggttcggctctagtcatcacaagaaaggtgaccgaagagctgacggagaccactgtgcttcggtgacagattcggctccagagagggagctttctcccttaatctctttgccttccccagttccccctttgtcacctatacattccaaccagcaaactcttccccggacgcaaggaagcagcaaggttcatggcagcagcaataacagtaaaggctattgcccagccaaatctcccaaggacctagcagtgaaagtccatgataaagagacccctcaagacagtttggtggcccctgcccagccgccttctcagacatttccacctccctccctcccctcaaaaagtgttgcaatgcagcagaagcccacggcttatgtccggcccatggatggtcaagatcaggcccctagtgaatcccctgaactgaaaccactgccggaggactatcgacagcagacctttgaaaaaacagacttgaaagtgcctgccaaagccaagctcaccaaactgaagatgccttctcagtcagttgagcagacctactccaatgaagtccattgtgttgaagagattctgaaggaaatgacccattcatggccgcctcctttgacagcaatacatacgcctagtacagctgagccatccaagtttcctttccctacaaaggactctcagcatgtcagttctgtaacccaaaaccaaaaacaatatgatacatcttcaaaaactcactcaaattctcagcaaggaacgtcatccatgctcgaagacgaccttcagctcagtgacagtgaggacagtgacagtgaacaaaccccagagaagcctccctcctcatctgcacctccaagtgctccacagtcccttccagaaccagtggcatcagcacattccagcagtgcagagtcagaaagcaccagtgactcagacagttcctcagactcagagagcgagagcagttcaagtgacagcgaagaaaatgagcccctagaaaccccagctccggagcctgagcctccaacaacaaacaaatggcagctggacaactggctgaccaaagtcagccagccagctgcgccaccagagggccccaggagcacagagcccccacggcggcacccagagagtaagggcagcagcgacagtgccacgagtcaggagcattctgaatccaaagatcctccccctaaaagctccagcaaagccccccgggccccacccgaagccccccaccccggaaagaggagctgtcagaagtctccggcacagcaggagcccccacaaaggcaaaccgttggaaccaaacaacccaaaaaacctgtcaaggcctctgcccgggcaggttcacggaccagcctgcagggggaaagggagccagggcttcttccctatggctcccgagaccagacttccaaagacaagcccaaggtgaagacgaaaggacggccccgggccgcagcaagcaacgaacccaagccagcagtgcccccctccagtgagaagaagaagcacaagagctccctccctgccccctctaaggctctctcaggcccagaacccgcgaaggacaatgtggaggacaggacccctgagcactttgctcttgttcccctgactgagagccagggcccaccccacagtggcagcggcagcaggactagtggctgccgccaagccgtggtggtccaggaggacagccgcaaagacagactcccattgcctttgagagacaccaagctgctctcaccgctcagggacactcctcccccacaaagcttgatggtgaagatcaccctagacctgctctctcggataccccagcctcccgggaaggggagccgccagaggaaagcagaagataaacagccgcccgcagggaagaagcacagctctgagaagaggagctcagacagctcaagcaagttggccaaaaagagaaagggtgaagcagaaagagactgtgataacaagaaaatcagactggagaaggaaatcaaatcacagtcatcttcatcttcatcctcccacaaagaatcttctaaaacaaagccctccaggccctcctcacagtcctcaaagaaggaaatgctccccccgccacccgtgtcctcgtcctcccagaagccagccaagcctgcacttaagaggtcaaggcgggaagcagacacctgtggccaggaccctcccaaaagtgccagcagtaccaagagcaaccacaaagactcttccattcccaagcagagaagagtagaggggaagggctccagaagctcctcggagcacaagggttcttccggagatactgcaaatccttttccagtgccttctttgccaaatggtaactctaaaccagggaagcctcaagtgaagtttgacaaacaacaagcagaccttcacatgagggaggcaaaaaagatgaagcagaaagcagagttaatgacggacagggttggaaaggcttttaagtacctggaagccgtcttgtccttcattgagtgcggaattgccacagagtctgaaagccagtcatccaagtcagcttactctgtctactcagaaactgtagatctcattaaattcataatgtcattaaaatccttctcagatgccacagcgccaacacaagagaaaatatttgctgttttatgcatgcgttgccagtccattttgaacatggcgatgtttcgttgtaaaaaagacatagcaataaagtattctcgtactcttaataaacacttcgagagttcttccaaagtcgcccaggcaccttctccatgcattgcaagcacaggcacaccatcccctctttccccaatgccttctcctgccagctccgtagggtcccagtcaagtgctggcagtgtggggagcagtggggtggctgccactatcagcaccccagtcaccatccagaatatgacatcttcctatgtcaccatcacatcccatgttcttaccgcctttgacctttgggaacaggccgaggccctcacgaggaagaataaagaattctttgctcggctcagcacaaatgtgtgcaccttggccctcaacagcagtttggtggacctggtgcactatacacgacagggttttcagcagctacaagaattaaccaaaacaccttaatggagccccaggttgattcaatgccttgggaactatttttgcacattggaagcctcaaaaacagtccagacgtttgtttcatcaggacaccaaactctaaaaaagaagcaccacgagatggccaggacatttgtccacttaaactctcaacaacagtgtgatcattggttggacactgtggttatgcagaagcagagatgaggaggctggccccagagatgatcttgcccttcctaactaaaggacagaagtgcaatttagcttaaatgggtgtatgaatggtctagaaacatttctattttttttttaaaccagcaggatacaagttgcaaatgaaatgaggagaaacagtttcaactctgaaagtgaatttcacgtcatctcagtagccacgctagtccattcccagaaggaaatttttttttttaacaatgacttttggtaaagggttttgtggatgattttttttcttttgagttttgggagaaatatttgtttaataacttctaatggccatctgtaaaccataagtaatgaaggactccactgtgccccactttctgccaatgaacagtggcttgataataccaagtattgttgtaatttataaaattgaaggcaacccccgctcctgccgcccccaatctccccattgcctagagcgctgcacattgaccccagctctgacttctcattactgtgctgaaagtcagcccacgtcggagcggtgaggaggagccacagcacatggggtgccacctcgaggtctgcacaggaggacttggcgctgccatttcctacccctgccatttcccacccctgcttcagcgaaagggactctctaacagggcagtcactgttgactctattctgaatttcctcccttggggaagaagggaaccaacatttatacctgaccagatggctaaagtgcttttaaagttttgtttaagtagagctggaatttgaggtgctgatctgtggtctacagttatgtggtaactcatgttgtccagccaactcagagtttcgtcagtgaacaagaaacatgaaatctgcttcttagagaggctatatttttctgctacaaatattttatatttatagcaaaactagactttcagagtccttgattgtctaggggaagttaactccctgagaggatgtagagatttggggtggttgattagacttttgaaaaactcatcaccacatgccttcactccagagtgttctcagctagatttgatttggttgaggaggaactgtggccctccgtaagttattgccatagtgtatgcattaaaccaagtccattttgaatgacctaaaatgaagtaacacaatcagaaatcccatgtgcccataagcacagatttttctttttcattgaaactttaaaggttattattggaaacattactttgagtgcagtgtttttaaaagccaattcttttttatcccttttagaagtagaatttgcacacttactacaattgaggagtgtcatctctataactttttctccgcctttgtcccattctgcccctggacatgtttcctaccaagcatgtttcacattttcctattagtggaggagggagaaccatatttatttataatgaagacatctaagatccctatgatgaatgcaggaactctcttggtagtttgtaaatacacaaagggatgtgtcgagggatgggagcgatgcttatctctcacagtgtgagtggtctgtgtgaggctgttccttcagttcttctccagactgttctttggttgtcacttaagtcagaggtctggtccctcatgtttaggtgaaagccagagaatgacagctgtagtcatatctgagcataagaccttgatgtgtgattcctgatgaccggtttcatttattcatgtaataaagcaaaggccctggtcctttttaaactactagttttaaaaacctgtgttaaatgaacagtaattgcctggtaggtttggtgtgtgtgtagcattgtgtgtccatctgttatatgtaaaggacaaggcaccagaatcaggctttatttcgatattgaagatgttatttaacatctttcttttttccttactcccttagccatcccctccccttttgtcctatcattccctagaacaagccacctgtcaattgtgaagggttgtgttctttatggcaggttctatgcagattgtgccagagcatgtgcgtgttctgttggcaagccacagtgctcccttgactgaagacatttccaggtagatttctcagccagctctaaaacagattgctttttcagtggccttactctttgtgggtttttttttttctctgaacttgatataaagattttatttgtcccttgaaaaagtaacaaatgtgcatagatcaatttgtactactttggtcattggatatttctgatccttattgcattgtacctaaaggagagtaactaatggtaacctttttaatagagtatgtgaaaggtagtggctgatgaatccttaacgttcatagggtctttttgctgttacggttgtatatagaggtctgaaggatttttaaaatgatttgcactttttcactgcatgcttacaattcccaaaggcaaaatctgtactgaggtagatcatttgaaagggctagattataaaattaagccttagagtatggaaagttcttataacaataatagtacacacttcagagtaagacaaatgcaaagcatcttaaggagtgaaaatagagtctaaatcttgcctttggcactacaaggtgtgtgtgtgtgtgtgtgttgtgtgtctttagtaggaaatggaagaacactgttttattttttaaagtgtttaatgtttctgtcctttctgtgaattattgaatttaagagccctgctaaataatgaaaaaacactttactaaaatttatcaaattatactgggttcggattgtgaaaacattggccacctagtagcagtggtgaggagtgggagggcccagcaagcatttatcagaaatagaatcacaataggaggagaatttggctgtctgatattatgatttgattacaatactgaatgggaaaagtatctaatattttgtaacaaaaagaccttcatattatctgttttgaccaaaatatgtagctatttcccttacacagattggaccgcacttatctcccttgtcctgtatcctttaatttcaggtctcaggatgtttagaaagctaaaaccccctacccctttctggctgaaaacttgccttatttggtatcttacacattaatgttactagcatcaggagcttactgttttattatgattcatcttcagtaatttttagaagcaagaagaaagccattgtgtcctctacaattaacaaaacttatctctgatatacaaagggatataaatatatacacttaaatagagaaaaagaggttgattgaattgtgcctttgagtgaacccagtttttaaataccgctgtgtttgtttcgccatggcttcagggatgctacatggctcttgcaccttttactcctctgctttatgaagtttgagttgtatttgtgcatcttaaagtaggttgaggcttgaggctgggctttcgggtttttttgttttttgttttgttttgttttgttttgttttcttgtacttaaacctgcttgcttcctaccacagattctttattttcccaaacactacaaaaaaacttttaaaactttgccatttcatctgtttacactctttgccactgattagcagtatttaaatcttgcaagaatattttgtgctttctttagaaacacaagagtatagatttttctcactgaaaagtgagagttacgcattgcagccatgaagggatgctaggatcaattatggcagtaccttttttcccctcctgttcttgagccagttgtctcttttgttttgggtcccacttaggattaacggatgtaaggtattttcctgtgcctttattttgtgtcattctattggaaggaggtgtaacggcagaatagcatcgtgttgggggttttccttcaaacactgcaagtgatattgccaccatgtgaacctcaaatatgcaatccagttgtgttggtttctcggtgacttggagtgttcatctcttcatgaattgtgagcactgaccatgttcttcagttcttaattatggtgagttgacaaataccaactactgcttttctttaggtggctataaatttcttactgtcaggaggaaatgacattatattctgttccactgaacgtcagagatcagcaggcactgtactgggtagagaagtgcctatacttctctacctaagagggcaggagggaaaccctacagctccttgtgagcctatatattagtatatcggcctggagaggacaagggaataagaccactcatagtgaggctggccaagctgcactggtcggaccaggcagtggctgacctaaggaaggcaacttgctttgcttaaaagtagattttttaagcaatgcttaacacaggcagcattcacctttgttcaggccatcgacatgtattgttaaaattactgcatatccccctcagatatcaagtatacactgttcatgttggggttgtgtgtgtgtatgtgtgtatgtacgcacgcatgtgtcccaaatcttgttttaattttttttttctgaatgtgatcatgttttggataatacctgagcagggttgccttttttttatttattaccattatatattatattatattatatattttttgctttcttataactttggaggaaagtcaaatcttggtattattaaaattgttttaaaaaggagtaaattttccagttgataaatgaaaatcactggcctatgtttaataagtttttctttaattactgtggaataacgtgccagctatcatcaacacaatgattttgtacatagggtagggaagcagtgatgctctcaatgggaagatgtgcaacacaaattaaggggaactccatgtattttacctacttcagcaatggaactgcaacttggggctttgtgaataaaatttagctgccttgtatagtcgtttgaaagaatatgtgatctgtgagagaattatagtttttttttagaagaaaaatctgcaaaagatctttccaaagacaatgtgccacagatcttttgttctctgtaatgaggattaattgctgtttaaacaaaaatgtaattgttcatctttaaattctttccttttcataagaggatcaagctgtaaaaaaacaaaaaaattaataaaaatttcgagaaatcaaaaaaaaaaa

SEQ ID NO: 1926 - protein, 1210 aa, Homo sapiens
MAAQSSLYNDDRNLLRIREKERRNQEAHQEKEAFPEKIPLFGEPYKTAKGDELSSRIQNMLGNYEEVKEFLSTKSHTHRLDASENRLGKPKYPLIPDKGSSIPSSSFHTSVHHQSIHTPASGPLSVGNISHNPKMAQPRTEPMPSLHAKSCGPPDSQHLTQDRLGQEGFGSSHHKKGDRRADGDHCASVTDSAPERELSPLISLPSPVPPLSPIHSNQQTLPRTQGSSKVHGSSNNSKGYCPAKSPKDLAVKVHDKETPQDSLVAPAQPPSQTFPPPSLPSKSVAMQQKPTAYVRPMDGQDQAPSESPELKPLPEDYRQQTFEKTDLKVPAKAKLTKLKMPSQSVEQTYSNEVHCVEEILKEMTHSWPPPLTAIHTPSTAEPSKFPFPTKDSQHVSSVTQNQKQYDTSSKTHSNSQQGTSSMLEDDLQLSDSEDSDSEQTPEKPPSSSAPPSAPQSLPEPVASAHSSSAESESTSDSDSSSDSESESSSSDSEENEPLETPAPEPEPPTTNKWQLDNWLTKVSQPAAPPEGPRSTEPPRRHPESKGSSDSATSQEHSESKDPPPKSSSKAPRAPPEAPHPGKRSCQKSPAQQEPPQRQTVGTKQPKKPVKASARAGSRTSLQGEREPGLLPYGSRDQTSKDKPKVKTKGRPRAAASNEPKPAVPPSSEKKKHKSSLPAPSKALSGPEPAKDNVEDRTPEHFALVPLTESQGPPHSGSGSRTSGCRQAVVVQEDSRKDRLPLPLRDTKLLSPLRDTPPPQSLMVKITLDLLSRIPQPPGKGSRQRKAEDKQPPAGKKHSSEKRSSDSSSKLAKKRKGEAERDCDNKKIRLEKEIKSQSSSSSSSHKESSKTKPSRPSSQSSKKEMLPPPPVSSSSQKPAKPALKRSRREADTCGQDPPKSASSTKSNHKDSSIPKQRRVEGKGSRSSSEHKGSSGDTANPFPVPSLPNGNSKPGKPQVKFDKQQADLHMREAKKMKQKAELMTDRVGKAFKYLEAVLSFIECGIATESESQSSKSAYSVYSETVDLIKFIMSLKSFSDATAPTQEKIFAVLCMRCQSILNMAMFRCKKDIAIKYSRTLNKHFESSSKVAQAPSPCIASTGTPSPLSPMPSPASSVGSQSSAGSVGSSGVAATISTPVTIQNMTSSYVTITSHVLTAFDLWEQAEALTRKNKEFFARLSTNVCTLALNSSLVDLVHYTRQGFQQLQELTKTP

SEQ ID NO: 1927 - DNA, 2583 bp, Homo sapiens
cgagtgacctcgcgatctggcccggctcccgctcgtcgcaacagcgtgactacagggtatggcggggtccgggcactgtgcggctggacccccagttctggggccacgccgcggaaccgcttactgctgcagcttttggggtcgcccggccgccgctattacagtcttcccccgcatcagaaggttccattgccttctctttcccccacaatgcaggcaggcaccatagcccgttggaaaaaaaaagagggggacaaaatcaatgaaggtgacctaattgcagaggttgaaactgataaagccactgttggatttgagagcctggaggagtgttatatggcaaagatacttgttgctgaaggtaccagggatgttcccatcggagcgatcatctgtatcacagttggcaagcctgaggatattgaggcctttaaaaattatacactggattcctcagcagcacctaccccacaagcggccccagcaccaacccctgctgccactgcttcgccacctacaccttctgctcaggctcctggtagctcatatccccctcacatgcaggtacttcttcctgccctctctcccaccatgaccatgggcacagttcagagatgggaaaaaaaagtgggtgagaagctaagtgaaggagacttactggcagagatagaaactgacaaagccactataggttttgaagtacaggaagaaggttatctggcaaaaatcctggtccctgaaggcacaagagatgtccctctaggaaccccactctgtatcattgtagaaaaagaggcagatatatcagcatttgctgactataggccaaccgaagtaacagatttaaaaccacaagtgccaccacctaccccacccccggtggccgctgttcctccaactccccagcctttagctcctacaccttcagcaccctgcccagctactcctgctggaccaaagggaagggtgtttgttagccctcttgcaaagaagttggcagtagagaaagggattgatcttacacaagtaaaagggacaggaccagatggtagaatcaccaagaaggatatcgactcttttgtgcctagtaaagttgctcctgctccggcagctgttgtgcctcccacaggtcctggaatggcaccagttcctacaggtgtcttcacagatatcccaatcagcaacattcgtcgggttattgcacagcgattaatgcaatcaaagcaaaccatacctcattattacctttctatcgatgtaaatatgggagaagttttgttggtacggaaagaacttaataagatattagaagggagaagcaaaatttctgtcaatgacttcatcataaaagcttcagctttggcatgtttaaaagttcccgaagcaaattcttcttggatggacacagttataagacaaaatcatgttgttgatgtcagtgttgcggtcagtactcctgcaggactcatcacacctattgtgtttaatgcacatataaaaggagtggaaaccattgctaatgatgttgtttctttagcaaccaaagcaagagagggtaaactacagccacatgaattccagggtggcacttttacgatctccaatttaggaatgtttggaattaagaatttctctgctattattaacccacctcaagcatgtattttggcaattggtgcttcagaggataaactggtccctgcagataatgaaaaagggtttgatgtggctagcatgatgtctgttacactcagttgtgatcaccgggtggtggatggagcagttggagcccagtggcttgctgagtttagaaagtaccttgaaaaacctatcactatgttgttgtaactaactcaagaatttctaaactctcccaggtcacactgattcattcttaacaagatatttatatgttattaaacaggtggttgctttttattttaaccagttatttttattattgagtctgctcagataagttatttataatgggcattactgaatttttaaaatgccgattacacccaaatattgtgcacatttaataatcagacaccagatttttagctctgtactcctaattaagggacatgtatgtggccttgcctagccctttggtgataagtacttcctctaggaaatgtacgataggtagaattgtggttccctaaagacaagtacataaaggtgaccctgatgaaaccttgaagttctgaaatttaactgcctaaaatgttctccttagatgtgagagaaagagaaatcagaaaaattaattctcttgggggaagggcttgaattgaagctttactttagaatttagccctggtttgaaattttccattacatgatcttggtttatcatcgatgggaagggtagaaaacttcaaggaaaataagtgaaattttaaaagtcagcattttcttagacctcttcagctgattgtttatttttctatgaattctgtactcaaaattacacatttgtttaaataaatatccacacaaattctcagttacatcaagtagctggtttatatttagattatctcaagtaggggggaataaccatgtgtaggaatt

SEQ ID NO: 1928 - protein, 615 aa, Homo sapiens
RVTSRSGPAPARRNSVTTGYGGVRALCGWTPSSGATPRNRLLLQLLGSPGRRYYSLPPHQKVPLPSLSPTMQAGTIARWKKKEGDKINEGDLIAEVETDKATVGFESLEECYMAKILVAEGTRDVPIGAIICITVGKPEDIEAFKNYTLDSSAAPTPQAAPAPTPAATASPPTPSAQAPGSSYPPHMQVLLPALSPTMTMGTVQRWEKKVGEKLSEGDLLAEIETDKATIGFEVQEEGYLAKILVPEGTRDVPLGTPLCIIVEKEADISAFADYRPTEVTDLKPQVPPPTPPPVAAVPPTPQPLAPTPSAPCPATPAGPKGRVFVSPLAKKLAVEKGIDLTQVKGTGPDGRITKKDIDSFVPSKVAPAPAAVVPPTGPGMAPVPTGVFTDIPISNIRRVIAQRLMQSKQTIPHYYLSIDVNMGEVLLVRKELNKILEGRSKISVNDFIIKASALACLKVPEANSSWMDTVIRQNHVVDVSVAVSTPAGLITPIVFNAHIKGVETIANDVVSLATKAREGKLQPHEFQGGTFTISNLGMFGIKNFSAIINPPQACILAIGASEDKLVPADNEKGFDVASMMSVTLSCDHRVVDGAVGAQWLAEFRKYLEKPITMLL

SEQ ID NO: 1929 - DNA, 1520 bp, Homo sapiens
ggctgctgctccggcgcggagcccagagccggttcggcgcgtcgactgcccagagtccgcggccggggcgcgggaggagccaagccgccatggcctaccacagcttcctggtggagcccatcagctgccacgcctggaacaaggaccgcacccagattgccatctgccccaacaaccatgaggtgcatatctatgaaaagagcggtgccaaatggaccaaggtgcacgagctcaaggagcacaacgggcaggtgacaggcatcgactgggcccccgagagtaaccgtattgtgacctgcggcacagaccgcaacgcctacgtgtggacgctgaagggccgcacatggaagcccacgctggtcatcctgcggatcaaccgggctgcccgctgcgtgcgctgggcccccaacgagaacaagtttgctgtgggcagcggctctcgtgtgatctccatctgttatttcgagcaggagaatgactggtgggtttgcaagcacatcaagaagcccatccgctccaccgtcctcagcctggactggcaccccaacaatgtgctgctggctgccggctcctgtgacttcaagtgtcggatcttttcagcctacatcaaggaggtggaggaacggccggcacccaccccgtggggctccaagatgccctttggggaactgatgttcgaatccagcagtagctgcggctgggtacatggcgtctgtttctcagccagcgggagccgcgtggcctgggtaagccacgacagcaccgtctgcctggctgatgccgacaagaagatggccgtcgcgactctggcctctgaaacactaccactgctggcgctgaccttcatcacagacaacagcctggtggcagcgggccacgactgcttcccggtgctgttcacctatgacgccgccgcggggatgctgagcttcggcgggcggctggacgttcctaagcagagctcgcagcgtggcttgacggcccgcgagcgcttccagaacctggacaagaaggcgagctccgagggtggcacggctgcgggcgcgggcctagactcgctgcacaagaacagcgtcagccagatctcggtgctcagcggcggcaaggccaagtgctcgcagttctgcaccactggcatggatggcggcatgagtatctgggatgtgaagagcttggagtcagccttgaaggacctcaagatcaaatgacctgtgaggaatatgttgccttcatcctagctgctggggaagcggggagaggggtcagggaggctaatggttgctttgctgaatgtttctggggtaccaatacgagttcccataggggctgctccctcaaaaagggaggggacagatggggagcttttcttacctattcaaggaatacgtgcctttttcttaaatgctttcatttattgaaaaaaaaaaaaaatgcccccaaagcactatgctggtcatgaactgcttcaaaatgtggaggtaataaaatgcaactgtgtaaaaaaaaaaaaaaaaaaaaaa

SEQ ID NO: 1930 - protein, 372 aa, Homo sapiens
MAYHSFLVEPISCHAWNKDRTQIAICPNNHEVHIYEKSGAKWTKVHELKEHNGQVTGIDWAPESNRIVTCGTDRNAYVWTLKGRTWKPTLVILRINRAARCVRWAPNENKFAVGSGSRVISICYFEQENDWWVCKHIKKPIRSTVLSLDWHPNNVLLAAGSCDFKCRIFSAYIKEVEERPAPTPWGSKMPFGELMFESSSSCGWVHGVCFSASGSRVAWVSHDSTVCLADADKKMAVATLASETLPLLALTFITDNSLVAAGHDCFPVLFTYDAAAGMLSFGGRLDVPKQSSQRGLTARERFQNLDKKASSEGGTAAGAGLDSLHKNSVSQISVLSGGKAKCSQFCTTGMDGGMSIWDVKSLESALKDLKIK

SEQ ID NO: 1931 - DNA, 3776 bp, Homo sapiens
gcgcaagatggcgactgcggccgaaacctcggcttcagaacccgaggctgagtccaaggctgggcccaaggctgacggagaggaggatgaggttaaggcggctaggacaaggagaaaggtgttatcgcgggctgtggccgctgcgacatacaagaccatggggccagcgtgggatcagcaggaggaaggcgtgagcgagagcgatggggatgagtacgccatggcttcctccgcggagagctcccccggggagtacgagtgggaatatgacgaagaggaggagaaaaaccagctggagattgagagactggaggagcagttgtctatcaacgtctatgactacaactgccatgtggacttgatcagactgctcaggctggaaggggagcttaccaaggtgaggatggcccgccagaagatgagtgaaatctttcccttgactgaagagctctggctggagtggctgcatgacgagatcagcatggcccaggatggcctggacagagagcacgtgtatgacctctttgagaaagccgtgaaggattacatttgtcctaacatttggctagagtatggccagtactcagttggtgggattggtcagaaaggtggccttgagaaagttcgctccgtgtttgaaagggctctctcgtctgttggtttacatatgaccaaaggactcgccctctgggaggcttaccgagagtttgaaagtgcgattgtggaagctgctcggcttgagaaagtccacagtcttttccggcgacagttggcgatcccactctatgatatggaggccacatttgcagagtatgaagaatggtcagaagacccaataccagagtcagtaattcagaactataacaaagcactacagcagctggagaaatataaaccctatgaagaagcactgttgcaggcagaggcaccaaggctggcagaatatcaagcatatatcgattttgagatgaaaattggcgatcctgctcgcattcagttgatctttgagcgcgccctggtcgagaactgccttgtcccagacttatggatccgttacagtcagtacctagatcgacaactgaaagtaaaggatttggttttatctgtacataaccgcgctattagaaactgcccctggacagttgccttatggagtcggtacctcttggccatggagagacatggagttgatcatcaagtaatttctgtaaccttcgagaaagctttgaatgccggcttcatccaggccactgattatgtggagatttggcaggcataccttgattacctgaggagaagggttgatttcaaacaagactccagtaaagagctggaggagttgagggccgcctttactcgtgccttggagtatctgaagcaggaggtggaagagcgtttcaatgagagtggtgatccaagctgcgtgattatgcagaactgggctaggattgaggctcgactgtgcaataacatgcagaaagctcgggaactctgggatagcatcatgaccagaggaaatgccaagtacgccaacatgtggctagagtattacaacctggaaagagctcatggtgacacccagcactgccggaaggctctgcaccgggccgtccagtgcaccagtgactacccagagcacgtctgcgaagtgttactcaccatggagaggacagaaggttctttagaagattgggatatagctgttcagaaaactgaaacccgattagctcgtgtcaatgagcagagaatgaaggctgcagagaaggaagcagcccttgtgcagcaagaagaagaaaaggctgaacaacggaaaagagctcgggctgagaagaaagcgttaaaaaagaagaaaaagatcagaggcccagagaagcgcggagcagatgaggacgatgagaaagagtggggcgatgatgaagaagagcagccttccaaacgcagaagggtcgagaacagcatccctgcagctggagaaacacaaaatgtagaagtagcagcagggcccgctgggaaatgtgctgccgtagatgtggagcccccttcgaagcagaaggagaaggcagcctccctgaagagggacatgcccaaggtgctgcacgacagcagcaaggacagcatcaccgtctttgtcagcaacctgccctacagcatgcaggagccggacacgaagctcaggccactcttcgaggcctgtggggaggtggtccagatccgacccatcttcagcaaccgtggggatttccgaggttactgctacgtggagtttaaagaagagaaatcagcccttcaggcactggagatggaccggaaaagtgtagaagggaggccaatgtttgtttccccctgtgtggataagagcaaaaaccccgattttaaggtgttcaggtacagcacttccctagagaaacacaagctgttcatctcaggcctgcctttctcctgtactaaagaggaactagaagaaatctgtaaggctcatggcaccgtgaaggacctcaggctggtcaccaaccgggctggcaaaccaaagggcctggcctacgtggagtatgaaaatgaatcccaggcgtcgcaggctgtgatgaagatggacggcatgactatcaaagagaacatcatcaaagtggcaatcagcaaccctcctcagaggaaagttccagagaagccagagaccaggaaggcaccaggtggccccatgcttttgccgcagacatacggagcgagggggaagggaaggacgcagctgtctctactgcctcgtgccctgcagcgcccaagtgctgcagctcctcaggctgagaacggccctgccgcggctcctgcagttgccgccccagcagccaccgaggcacccaagatgtccaatgccgattttgccaagctgtttctgagaaagtgaacgggacgctgggagacaggaaatgccttacttcactctggcccggcggacctcccaccacccagcagtgcactggggatggacaggcctggtgtgctgcgtgctcgcaaccacagatggctcctcggctttagacagaaaggggaaggggttctaagtcaagagcctttcagtgctccctcatattgagggcagtggcagaaaagtgaccactctgcaggctgggcccaggatgtggtgtcctgagatagttttgtatcttaaagactgaggcacagaagcgaaacgagaacacactgtttttgagacacagttgtccaaatgtttctggccagctccggcccctttttgtatgacacttctcttccaccctgcacagcacatgtgcccgtcattcttttaattttaaaagatgaaatggcagatgctagtaattcacagaatggcctcttgtgggggtgggtctgagggaagtcagctataaaacatttgctggagttttgttcaatggggctgtgcatttttatattatgtgtttgtaaatgacatgtcagcccttgtttcatgtttcctaaaagcagaatatttgcaacatttgttttgtataggaattatttgtgccacctgctgtggactgttttctttgcctagtgactagtgacctgtgttgtctaaacatgagtttcagccctttggttttgtttaataccatgtcaaatgcaaacttcaattctccccatttagctttattaaactgacgttctcttcaaaacttcttgctgaatggtactcagatgtgcattcacatacagatgtgttttgaagtgggtgtaccttgctttacctaatagatgtgtaaatagaacttttgtaagtc

SEQ ID NO: 1932 - protein, 963 aa, Homo sapiens
MATAAETSASEPEAESKAGPKADGEEDEVKAARTRRKVLSRAVAAATYKTMGPAWDQQEEGVSESDGDEYAMASSAESSPGEYEWEYDEEEEKNQLEIERLEEQLSINVYDYNCHVDLIRLLRLEGELTKVRMARQKMSEIFPLTEELWLEWLHDEISMAQDGLDREHVYDLFEKAVKDYICPNIWLEYGQYSVGGIGQKGGLEKVRSVFERALSSVGLHMTKGLALWEAYREFESAIVEAARLEKVHSLFRRQLAIPLYDMEATFAEYEEWSEDPIPESVIQNYNKALQQLEKYKPYEEALLQAEAPRLAEYQAYIDFEMKIGDPARIQLIFERALVENCLVPDLWIRYSQYLDRQLKVKDLVLSVHNRAIRNCPWTVALWSRYLLAMERHGVDHQVISVTFEKALNAGFIQATDYVEIWQAYLDYLRRRVDFKQDSSKELEELRAAFTRALEYLKQEVEERFNESGDPSCVIMQNWARIEARLCNNMQKARELWDSIMTRGNAKYANMWLEYYNLERAHGDTQHCRKALHRAVQCTSDYPEHVCEVLLTMERTEGSLEDWDIAVQKTETRLARVNEQRMKAAEKEAALVQQEEEKAEQRKRARAEKKALKKKKKIRGPEKRGADEDDEKEWGDDEEEQPSKRRRVENSIPAAGETQNVEVAAGPAGKCAAVDVEPPSKQKEKAASLKRDMPKVLHDSSKDSITVFVSNLPYSMQEPDTKLRPLFEACGEVVQIRPIFSNRGDFRGYCYVEFKEEKSALQALEMDRKSVEGRPMFVSPCVDKSKNPDFKVFRYSTSLEKHKLFISGLPFSCTKEELEEICKAHGTVKDLRLVTNRAGKPKGLAYVEYENESQASQAVMKMDGMTIKENIIKVAISNPPQRKVPEKPETRKAPGGPMLLPQTYGARGKGRTQLSLLPRALQRPSAAAPQAENGPAAAPAVAAPAATEAPKMSNADFAKLFLRK

SEQ ID NO: 1933 - DNA, 2344 bp, Homo sapiens
gtctcaggggctgaagtttgtgaggtgtagtattgagtcctgtttgagctattgttctctttttcctgaaaaatggcactgtcaaagagggagctggatgagctgaaaccatggatagagaagacagtgaagagggtcctgggtttctcagagcctacggtggtcacagcagcattgaactgtgtggggaagggcatggacaagaagaaggcagccgatcatctgaaaccttttcttgatgattctactctccgatttgtggacaaactgtttgaggctgtggaggaaggccgaagctctaggcattccaagtctagcagtgacaggagcagaaaacgagagctaaaggaggtgtttggtgatgactctgagatctctaaagaatcatcaggagtaaagaagcgacgaataccccgttttgaggaggtggaagaagagccagaggtgatccctgggcctccatcagagagccctggcatgctgactaagctccagatcaaacagatgatggaggcagcaacacgacaaatcgaggagaggaaaaaacagctgagcttcattagcccccctacacctcagccaaagactccttcttcctcccaaccagaacgacttcctattggcaacactattcagccctcccaggctgccactttcatgaatgatgccattgagaaggcaaggaaagcagctgaactgcaagctcgaatccaagcccagctggcactgaagccaggactcatcggcaatgccaacatggtgggcctggctaatctccatgccatgggcattgctcccccgaaggtggagttaaaagaccaaacgaaacctacaccactgatcctggatgagcaagggcgcactgtagatgcaacaggcaaggagattgagctgacacaccgcatgcctactctgaaagccaatattcgtgctgtgaagagggaacaattcaagcaacaactaaaggaaaagccatcagaagacatggaatccaataccttttttgacccccgagtctccattgccccttcccagcgccagagacgcacttttaaattccatgacaagggcaaatttgagaagattgctcagcgattacggacaaaggctcaactggagaagctacaggcagagatttcacaagcagctcgaaaaacaggcatccatacttcgactaggcttgccctcattgctcctaagaaggagctaaaggaaggagatattcctgaaattgagtggtgggactcttacataatccccaatggctttgatcttacagaggaaaatcccaagagagaagattattttggaatcacaaatcttgttgaacatccagcccagctcaatcctccagttgacaatgacacaccagttactctgggagtatatcttaccaagaaggaacagaaaaaacttcggagacaaacaaggagggaagcacagaaggaactacaagaaaaagtcaggctgggcctgatgcctcctccagaacccaaagtgagaatttctaatttgatgcgagtattaggaacagaagctgttcaagaccccacgaaggtagaagcccacgtcagagctcagatggcaaaaagacagaaagcgcatgaagaggccaacgctgcccgaaaactcacagcagaacagagaaaggtcaagaaaattaaaaagcttaaagaagacatttcacagggggtacacatatctgtatatagagttcgaaatttgagcaacccagccaagaagttcaagattgaagccaatgctgggcaactgtacctgacaggggtggtggtactgcacaaggatgtcaacgtggtagtagtggaagggggccccaaggcccagaagaaatttaagcgtcttatgctgcatcggataaagtgggatgaacagacatctaacacaaagggagatgatgatgaggagtctgatgaggaagctgtgaagaaaaccaacaaatgtgtactagtctgggagggtacagccaaagaccggagctttggagagatgaagtttaaacagtgtcctacagagaacatggctcgtgagcatttcaaaaagcatggggctgaacactactgggaccttgcgctgagtgaatctgtgttagagtccactgattgagactactgcaagcccttgcctctcctcccttgcctttgtctcttcagtcctctcacttattctatttcccaaccccctcccacttgtttgtgtgatctcagaactgtgccaagcagacactgggacaaagggagaatatcttgctcccctcctgagtcagcctggtgttgccctttattccccttatgtgcatatgattaaagagttatttttaaaaaaa

SEQ ID NO: 1934 - protein, 683 aa, Homo sapiens
MALSKRELDELKPWIEKTVKRVLGFSEPTVVTAALNCVGKGMDKKKAADHLKPFLDDSTLRFVDKLFEAVEEGRSSRHSKSSSDRSRKRELKEVFGDDSEISKESSGVKKRRIPRFEEVEEEPEVIPGPPSESPGMLTKLQIKQMMEAATRQIEERKKQLSFISPPTPQPKTPSSSQPERLPIGNTIQPSQAATFMNDAIEKARKAAELQARIQAQLALKPGLIGNANMVGLANLHAMGIAPPKVELKDQTKPTPLILDEQGRTVDATGKEIELTHRMPTLKANIRAVKREQFKQQLKEKPSEDMESNTFFDPRVSIAPSQRQRRTFKFHDKGKFEKIAQRLRTKAQLEKLQAEISQAARKTGIHTSTRLALIAPKKELKEGDIPEIEWWDSYIIPNGFDLTEENPKREDYFGITNLVEHPAQLNPPVDNDTPVTLGVYLTKKEQKKLRRQTRREAQKELQEKVRLGLMPPPEPKVRISNLMRVLGTEAVQDPTKVEAHVRAQMAKRQKAHEEANAARKLTAEQRKVKKIKKLKEDISQGVHISVYRVRNLSNPAKKFKIEANAGQLYLTGVVVLHKDVNVVVVEGGPKAQKKFKRLMLHRIKWDEQTSNTKGDDDEESDEEAVKKTNKCVLVWEGTAKDRSFGEMKFKQCPTENMAREHFKKHGAEHYWDLALSESVLESTD

SEQ ID NO: 1935 - DNA, 2597 bp, Homo sapiens
gagcagcgcgcgcaagcaggccaggggaaggtgggcgcaggtgaggggccgaggtgtgcgcaggactttagccggttgagaaggatcaagcaggcatttggagcacaggtgtctagaaacttttaaggggccggttcaagaaggaaaagttcccttctgctgtgaaactatttggcaagaggctggagggcccaatggctgcaaaattgcaacccaacattcccaaagccaagagtctagatggcgtcaccaatgacagaaccgcatctcaagggcagtggggccgtgcctgggaggtggactggttttcactggcgagcgtcatcttcctactgctgttcgcccccttcatcgtctactacttcatcatggcttgtgaccagtacagctgcgccctgaccggccctgtggtggacatcgtcaccggacatgctcggctctcggacatctgggccaagactccacctataacgaggaaagccgcccagctctataccttgtgggtcaccttccaggtgcttctgtacacgtctctccctgacttctgccataagtttctacccggctacgtaggaggcatccaggagggggccgtgactcctgcaggggttgtgaacaagtatcagatcaacggcctgcaagcctggctcctcacgcacctgctctggtttgcaaacgctcatctcctgtcctggttctcgcccaccatcatcttcgacaactggatcccactgctgtggtgcgccaacatccttggctatgccgtctccaccttcgccatggtcaagggctacttcttccccaccagcgccagagactgcaaattcacaggcaatttcttttacaactacatgatgggcatcgagtttaaccctcggatcgggaagtggtttgacttcaagctgttcttcaatgggcgccccgggatcgtcgcctggaccctcatcaacctgtccttcgcagcgaagcagcgggagctccacagccatgtgaccaatgccatggtcctggtcaacgtcctgcaggccatctacgtgattgacttcttctggaacgaaacctggtacctgaagaccattgacatctgccatgaccacttcgggtggtacctgggctggggcgactgtgtctggctgccttatctttacacgctgcagggtctgtacttggtgtaccaccccgtgcagctgtccaccccgcacgccgtgggcgtcctgctgctgggcctggtgggctactacatcttccgggtggccaaccaccagaaggacctgttccgccgcacggatgggcgctgcctcatctggggcaggaagcccaaggtcatcgagtgctcctacacatccgccgacgggcagaggcaccacagcaagctgctggtgtcgggcttctggggcgtggcccgccacttcaactacgtcggcgacctgatgggcagcctggcctactgcctggcctgtggcggtggccacctgctgccctacttctacatcatctacatggccatcctgctgacccaccgctgcctccgggacgagcaccgctgcgccagcaagtacggccgggactgggagcgctacaccgccgcagtgccttaccgcctgctgcctggaatcttctaagggcacgccctagggagaagccctgtggggctgtcaagagcgtgttctgccaggtccatgggggctggcatcccagctccaactcgaggagcctcagtttcctcatctgtaaactggagagagcccagcacttggcaggtgtccagtacctaatcacgctctgttccttgcttttgccttcaagggaattccgagtgtccagcactgccgtattgccagcacagacggattttctctaatcagtgtccctgggcaggaggatgacccagtcacctttactagtcctttggagacaatttacctgtattaggagcccaggccacgctacactctgcccacactggtgagcaggaggtcttcccacgccctgtcattaggctgcatttactcttgctaaataaaagtgggagtggggcgtgcgcgttatccatgtattgcctttcagctctagatccccctcccctgcctgctctgcagtcgtgggtggggcccgtgcgccgtttctccttggtagcgtgcacggtgttgaactgggacactggggagaaaggggctttcatgtcgtttccttcctgctcctgctgcacagctgccaggagtgctctgcctggagtctgcagacctcagagaggtcccagcactggctgtggctttcaggtgtaggcaggtgggctctgcttcccgattccctgtgagcgcccaccctctcgaaagaattttctgtcttgccctgtgactgtgcagactctggctcgagcaacccggggaacttcaccctcaggggcctctccacaccttctccagcgaggaggtctcagtcccagcctcgggagggcacctccttttctgtgctttcttccctgaggcattcttcctcatccctagggtgttgtgtagaactctttttaaactctatgctccgagtagagttcatctttatattaaacttcccctgttcaaaaaaaaaaaaaaaaa

SEQ ID NO: 1936 - protein, 475 aa, Homo sapiens
MAAKLQPNIPKAKSLDGVTNDRTASQGQWGRAWEVDWFSLASVIFLLLFAPFIVYYFIMACDQYSCALTGPVVDIVTGHARLSDIWAKTPPITRKAAQLYTLWVTFQVLLYTSLPDFCHKFLPGYVGGIQEGAVTPAGVVNKYQINGLQAWLLTHLLWFANAHLLSWFSPTIIFDNWIPLLWCANILGYAVSTFAMVKGYFFPTSARDCKFTGNFFYNYMMGIEFNPRIGKWFDFKLFFNGRPGIVAWTLINLSFAAKQRELHSHVTNAMVLVNVLQAIYVIDFFWNETWYLKTIDICHDHFGWYLGWGDCVWLPYLYTLQGLYLVYHPVQLSTPHAVGVLLLGLVGYYIFRVANHQKDLFRRTDGRCLIWGRKPKVIECSYTSADGQRHHSKLLVSGFWGVARHFNYVGDLMGSLAYCLACGGGHLLPYFYIIYMAILLTHRCLRDEHRCASKYGRDWERYTAAVPYRLLPGIF

SEQ ID NO: 1937 - DNA, 832 bp, Homo sapiens
cgccgctgcagctggggccatttgaggggagcccatggggcctgaaaggcatctgtcaggcgcccctgcccggatggcaacagtagttctaggaggagacaccatgggccctgagcgtatcttccccaatcagactgaggaactgggacatcagggcccttcagaaggcactggggattggagcagtgaggagcctgaggaagagcaggaggaaacggggtcgggcccagctggctactcctaccagcccctgaaccaagatcctgaacaagaggaggtggaactggcaccagtgggggatggagatgtagttgctgacatccaggatcgaatccaggccctggggcttcatttgccagacccaccattagagagtgaagatgaagatgaggagggagctacagcgttgaacaaccacagctctattcccatggacccagaacatgtagagctggtgaaaaggacaatggctggagtaagcctgcctgcgccaggggttcctgcctgggctcgggagatatctgatgcccagtgggaagatgtggtacagaaagccctccaagcccggcaggcatcccctgcctggaagtgaccacagtgagagctgccttatattcctacattccaggccagaaccagcacaggactgaacacatccctggttgtaatgtccatttccatcttccccgtctccctttccacatcaaggcacatcagacttctcagagacccactttattcagttctgtacatatggggacatcggtccaagcccaaccaccttagcatgtatcactctgtggagaataaagcacctatgtactgagccaaa

SEQ ID NO: 1938 - protein, 185 aa, Homo sapiens
MGPERHLSGAPARMATVVLGGDTMGPERIFPNQTEELGHQGPSEGTGDWSSEEPEEEQEETGSGPAGYSYQPLNQDPEQEEVELAPVGDGDVVADIQDRIQALGLHLPDPPLESEDEDEEGATALNNHSSIPMDPEHVELVKRTMAGVSLPAPGVPAWAREISDAQWEDVVQKALQARQASPAWK

SEQ ID NO: 1939 - DNA, 1024 bp, Homo sapiens
gaaggacttcctcctctgtgtcactgaagtcataggggtgtatgaatccccatcttggcatctggctggcgagtcttccttctcttcctcttctgctcctggtcctcttggcttttctcctcttcatcttctgtctctgattcatcctcacttcgcttcttacgtttcttctccttctccagaaccttcttaaagtaagcatactggaccaactccacagcttccttcgatcctgcaggtccacagtcttgctcatgcgggccttcgcatgggctgtggccagtcgaatcagagtttccagtgttcgggctgtaactggagatggaattccggatcaagaagatcatgcagacggacgaagagattgggaaggtggcggcggcggtgcctgtcatcatctcccgggcgctcgagctcttcctagagtcgctgttgaagaaggcctgccaggtgacccagtcgcggaacgcgaagaccatgaccacatcccacctgaagcagtgcatcgagctggagcagcagtttgacttcttgaaggacctggtggcatctgttcccgacatgcagggggacggggaagacaaccacatggatggggacaagggcgcccgcaggggccggaagccaggcagcggcggccggaagaacggtgggatgggaacgaaaagcaaggacaagaagctgtccgggacagactcggagcaggaggatgaatctgaggacacagatactgatggggaagaggagacatcacaacccccaccccaggccagccacccctctgcccactttcagagccccccgacacccttcctgcccttcgcctctactctgcctttgcccccagcgcccccgggcccctcagcacctgatgaagaggacgaagaagattacgactcctagcgccttctgccccccagaccatagccccttttagttggtttttcattcccgttgttatggagggccacatctgccagagcctggagtctgcgaaggccgggaccggttccccggcccacag

SEQ ID NO: 1940 - protein, 193 aa, Homo sapiens
MEFRIKKIMQTDEEIGKVAAAVPVIISRALELFLESLLKKACQVTQSRNAKTMTTSHLKQCIELEQQFDFLKDLVASVPDMQGDGEDNHMDGDKGARRGRKPGSGGRKNGGMGTKSKDKKLSGTDSEQEDESEDTDTDGEEETSQPPPQASHPSAHFQSPPTPFLPFASTLPLPPAPPGPSAPDEEDEEDYDS

SEQ ID NO: 1941 - DNA, 3149 bp, Homo sapiens
attctttggaatactactgctagaagtctgacttaagacccagcttatgggccacatggcacccagctgcttctgcagagaaggcaggccactgatgggtacagcaaagtgtggtgctgctggccaagccaaagacccgtgtaggatgactgggcctctgccccttgtgggtgttgccactgtgcttgagtgcctggtgaagaatgtgatgggatcactagcatgtctgcggagagcggccctgggacgagattgagaaatctgccagtaatgggggatggactagaaacttcccaaatgtctacaacacaggcccaggcccaaccccagccagccaacgcagccagcaccaaccccccgcccccagagacctccaaccctaacaagcccaagaggcagaccaaccaactgcaatacctgctcagagtggtgctcaagacactatggaaacaccagtttgcatggcctttccagcagcctgtggatgccgtcaagctgaacctccctgattactataagatcattaaaacgcctatggatatgggaacaataaagaagcgcttggaaaacaactattactggaatgctcaggaatgtatccaggacttcaacactatgtttacaaattgttacatctacaacaagcctggagatgacatagtcttaatggcagaagctctggaaaagctcttcttgcaaaaaataaatgagctacccacagaagaaaccgagatcatgatagtccaggcaaaaggaagaggacgtgggaggaaagaaacagggacagcaaaacctggcgtttccacggtaccaaacacaactcaagcatcgactcctccgcagacccagacccctcagccgaatcctcctcctgtgcaggccacgcctcaccccttccctgccgtcaccccggacctcatcgtccagacccctgtcatgacagtggtgcctccccagccactgcagacgcccccgccagtgcccccccagccacaacccccacccgctccagctccccagcccgtacagagccacccacccatcatcgcggccaccccacagcctgtgaagacaaagaagggagtgaagaggaaagcagacaccaccacccccaccaccattgaccccattcacgagccaccctcgctgcccccggagcccaagaccaccaagctgggccagcggcgggagagcagccggcctgtgaaacctccaaagaaggacgtgcccgactctcagcagcacccagcaccagagaagagcagcaaggtctcggagcagctcaagtgctgcagcggcatcctcaaggagatgtttgccaagaagcacgccgcctacgcctggcccttctacaagcctgtggacgtggaggcactgggcctacacgactactgtgacatcatcaagcaccccatggacatgagcacaatcaagtctaaactggaggcccgtgagtaccgtgatgctcaggagtttggtgctgacgtccgattgatgttctccaactgctataagtacaaccctcctgaccatgaggtggtggccatggcccgcaagctccaggatgtgttcgaaatgcgctttgccaagatgccggacgagcctgaggagccagtggtggccgtgtcctccccggcagtgccccctcccaccaaggttgtggccccgccctcatccagcgacagcagcagcgatagctcctcggacagtgacagttcgactgatgactctgaggaggagcgagcccagcggctggctgagctccaggagcagctcaaagccgtgcacgagcagcttgcagccctctctcagccccagcagaacaaaccaaagaaaaaggagaaagacaagaaggaaaagaaaaaagaaaagcacaaaagaaaagaggaagtggaagagaataaaaaaagcaaagccaaggaacctcctcctaaaaagacgaagaaaaataatagcagcaacagcaatgtgagcaagaaggagccagcgcccatgaagagcaagccccctcccacgtatgagtcggaggaagaggacaagtgcaagcctatgtcctatgaggagaagcggcagctcagcttggacatcaacaagctccccggcgagaagctgggccgcgtggtgcacatcatccagtcacgggagccctccctgaagaattccaaccccgacgagattgaaatcgactttgagaccctgaagccgtccacactgcgtgagctggagcgctatgtcacctcctgtttgcggaagaaaaggaaacctcaagctgagaaagttgatgtgattgccggctcctccaagatgaagggcttctcgtcctcagagtcggagagctccagtgagtccagctcctctgacagcgaagactccgaaacaggtcctgcctaatcattggacacggactcttaataaaacggtcttcagttccagattccttcccagcaagctatagcttaagtccattttcttccgtgaaagggacaggactccatcaagttatggaattcctcagagccctgggcctgtcccccggggtggattagtcatgtccagcagcacacgcctagtcccgccttcgggaaggctgcctgcctggccagccgcccaggcctctctgtgtaaagactgcctggctgtcctgcccagccttcctggttctctggggtcctctgggtgggtggcatctcctggagggtgatgacaatccccaacacatgcattcatgtggtgctactctgtgtgcaaagccagaccccaagtatgttttctctctttgtcccatccctctttttctgggactttggaccctaactacttccctcctgaaccttgcagtgacatcagtccaggagagctctcgttcagtgtgcggaagaacactctgacctctagagctgtcctagataaggagtgggagctttagaggcaaggcctctagaccctggaaggctcagtgaggctcttcccacagcatgcttctcactggtgccctgtaagctcgagccaccgctgactctgagcctttttggagtctttcctccttcgtctccattgttccgtgcatttccaaagcttaagttgctggtgggcatttccccagtttctatgggctccgtcttctcaagtcacatagggaaagtaccttc

SEQ ID NO: 1942 - protein, 722 aa, Homo sapiens
MSAESGPGTRLRNLPVMGDGLETSQMSTTQAQAQPQPANAASTNPPPPETSNPNKPKRQTNQLQYLLRVVLKTLWKHQFAWPFQQPVDAVKLNLPDYYKIIKTPMDMGTIKKRLENNYYWNAQECIQDFNTMFTNCYIYNKPGDDIVLMAEALEKLFLQKINELPTEETEIMIVQAKGRGRGRKETGTAKPGVSTVPNTTQASTPPQTQTPQPNPPPVQATPHPFPAVTPDLIVQTPVMTVVPPQPLQTPPPVPPQPQPPPAPAPQPVQSHPPIIAATPQPVKTKKGVKRKADTTTPTTIDPIHEPPSLPPEPKTTKLGQRRESSRPVKPPKKDVPDSQQHPAPEKSSKVSEQLKCCSGILKEMFAKKHAAYAWPFYKPVDVEALGLHDYCDIIKHPMDMSTIKSKLEAREYRDAQEFGADVRLMFSNCYKYNPPDHEVVAMARKLQDVFEMRFAKMPDEPEEPVVAVSSPAVPPPTKVVAPPSSSDSSSDSSSDSDSSTDDSEEERAQRLAELQEQLKAVHEQLAALSQPQQNKPKKKEKDKKEKKKEKHKRKEEVEENKKSKAKEPPPKKTKKNNSSNSNVSKKEPAPMKSKPPPTYESEEEDKCKPMSYEEKRQLSLDINKLPGEKLGRVVHIIQSREPSLKNSNPDEIEIDFETLKPSTLRELERYVTSCLRKKRKPQAEKVDVIAGSSKMKGFSSSESESSSESSSSDSEDSETGPA

SEQ ID NO: 1943 - DNA, 5198 bp, Homo sapiens
attctttggaatactactgctagaagtctgacttaagacccagcttatgggccacatggcacccagctgcttctgcagagaaggcaggccactgatgggtacagcaaagtgtggtgctgctggccaagccaaagacccgtgtaggatgactgggcctctgccccttgtgggtgttgccactgtgcttgagtgcctggtgaagaatgtgatgggatcactagcatgtctgcggagagcggccctgggacgagattgagaaatctgccagtaatgggggatggactagaaacttcccaaatgtctacaacacaggcccaggcccaaccccagccagccaacgcagccagcaccaaccccccgcccccagagacctccaaccctaacaagcccaagaggcagaccaaccaactgcaatacctgctcagagtggtgctcaagacactatggaaacaccagtttgcatggcctttccagcagcctgtggatgccgtcaagctgaacctccctgattactataagatcattaaaacgcctatggatatgggaacaataaagaagcgcttggaaaacaactattactggaatgctcaggaatgtatccaggacttcaacactatgtttacaaattgttacatctacaacaagcctggagatgacatagtcttaatggcagaagctctggaaaagctcttcttgcaaaaaataaatgagctacccacagaagaaaccgagatcatgatagtccaggcaaaaggaagaggacgtgggaggaaagaaacagggacagcaaaacctggcgtttccacggtaccaaacacaactcaagcatcgactcctccgcagacccagacccctcagccgaatcctcctcctgtgcaggccacgcctcaccccttccctgccgtcaccccggacctcatcgtccagacccctgtcatgacagtggtgcctccccagccactgcagacgcccccgccagtgcccccccagccacaacccccacccgctccagctccccagcccgtacagagccacccacccatcatcgcggccaccccacagcctgtgaagacaaagaagggagtgaagaggaaagcagacaccaccacccccaccaccattgaccccattcacgagccaccctcgctgcccccggagcccaagaccaccaagctgggccagcggcgggagagcagccggcctgtgaaacctccaaagaaggacgtgcccgactctcagcagcacccagcaccagagaagagcagcaaggtctcggagcagctcaagtgctgcagcggcatcctcaaggagatgtttgccaagaagcacgccgcctacgcctggcccttctacaagcctgtggacgtggaggcactgggcctacacgactactgtgacatcatcaagcaccccatggacatgagcacaatcaagtctaaactggaggcccgtgagtaccgtgatgctcaggagtttggtgctgacgtccgattgatgttctccaactgctataagtacaaccctcctgaccatgaggtggtggccatggcccgcaagctccaggatgtgttcgaaatgcgctttgccaagatgccggacgagcctgaggagccagtggtggccgtgtcctccccggcagtgccccctcccaccaaggttgtggccccgccctcatccagcgacagcagcagcgatagctcctcggacagtgacagttcgactgatgactctgaggaggagcgagcccagcggctggctgagctccaggagcagctcaaagccgtgcacgagcagcttgcagccctctctcagccccagcagaacaaaccaaagaaaaaggagaaagacaagaaggaaaagaaaaaagaaaagcacaaaagaaaagaggaagtggaagagaataaaaaaagcaaagccaaggaacctcctcctaaaaagacgaagaaaaataatagcagcaacagcaatgtgagcaagaaggagccagcgcccatgaagagcaagccccctcccacgtatgagtcggaggaagaggacaagtgcaagcctatgtcctatgaggagaagcggcagctcagcttggacatcaacaagctccccggcgagaagctgggccgcgtggtgcacatcatccagtcacgggagccctccctgaagaattccaaccccgacgagattgaaatcgactttgagaccctgaagccgtccacactgcgtgagctggagcgctatgtcacctcctgtttgcggaagaaaaggaaacctcaagctgagaaagttgatgtgattgccggctcctccaagatgaagggcttctcgtcctcagagtcggagagctccagtgagtccagctcctctgacagcgaagactccgaaacagagatggctccgaagtcaaaaaagaaggggcaccccgggagggagcagaagaagcaccatcatcaccaccatcagcagatgcagcaggccccggctcctgtgccccagcagccgcccccgcctccccagcagcccccaccgcctccacctccgcagcagcaacagcagccgccacccccgcctcccccaccctccatgccgcagcaggcagccccggcgatgaagtcctcgcccccacccttcattgccacccaggtgcccgtcctggagccccagctcccaggcagcgtctttgaccccatcggccacttcacccagcccatcctgcacctgccgcagcctgagctgccccctcacctgccccagccgcctgagcacagcactccaccccatctcaaccagcacgcagtggtctctcctccagctttgcacaacgcactaccccagcagccatcacggcccagcaaccgagccgctgccctgcctcccaagcccgcccggcccccagccgtgtcaccagccttgacccaaacacccctgctcccacagccccccatggcccaacccccccaagtgctgctggaggatgaagagccacctgccccacccctcacctccatgcagatgcagctgtacctgcagcagctgcagaaggtgcagccccctacgccgctactcccttccgtgaaggtgcagtcccagcccccaccccccctgccgcccccaccccacccctctgtgcagcagcagctgcagcagcagccgccaccacccccaccaccccagccccagcctccaccccagcagcagcatcagccccctccacggcccgtgcacttgcagcccatgcagttttccacccacatccaacagcccccgccaccccagggccagcagcccccccatccgcccccaggccagcagccacccccgccgcagcctgccaagcctcagcaagtcatccagcaccaccattcaccccggcaccacaagtcggacccctactcaaccggtcacctccgcgaagccccctccccgcttatgatacattccccccagatgtcacagttccagagcctgacccaccagtctccaccccagcaaaacgtccagcctaagaaacaggagctgcgtgctgcctccgtggtccagccccagcccctcgtggtggtgaaggaggagaagatccactcacccatcatccgcagcgagcccttcagcccctcgctgcggccggagccccccaagcacccggagagcatcaaggcccccgtccacctgccccagcggccggaaatgaagcctgtggatgtcgggaggcctgtgatccggcccccagagcagaacgcaccgccaccaggggcccctgacaaggacaaacagaaacaggagccgaagactccagttgcgcccaaaaaggacctgaaaatcaagaacatgggctcctgggccagcctagtgcagaagcatccgaccaccccctcctccacagccaagtcatccagcgacagcttcgagcagttccgccgcgccgctcgggagaaagaggagcgtgagaaggccctgaaggctcaggccgagcacgctgagaaggagaaggagcggctgcggcaggagcgcatgaggagccgagaggacgaggatgcgctggagcaggcccggcgggcccatgaggaggcacgtcggcgccaggagcagcagcagcagcagcgccaggagcaacagcagcagcagcaacagcaagcagctgcggtggctgccgccgccaccccacaggcccagagctcccagccccagtccatgctggaccagcagagggagttggcccggaagcgggagcaggagcgaagacgccgggaagccatggcagctaccattgacatgaatttccagagtgatctattgtcaatatttgaagaaaatcttttctgagcgcacctaggtggcttctgactttgattttctggcaaaacattgactttccatagtgttaggggcggtggtggaggtgggatcagcggccaggggatgcctcagggcctggccctcctgcatgctatgcccggggcaggcctgacgggcagctgaggattgcagagcctgtctgccttacggccagtcggacagacgtcccgccacccaccacccctcacaggacgtccgctcagcacacgccttgttacgagcaagtgccggctggacccaagccctgcatccccacatgcggggcagaggcccttctctccgccaaatgtctacacagtatacacaggacatcgttgctgccgccgtgactggttttctgtccccaagaacgtgacgttcgtgatgtcctgcccgccgggagtctttccccacaccccagccatcgccgcccgctcccaggaggccagggcaggcctgcgtgggctggaggcgggcgaggccggcccaccccctcgctggcactgactttgccttgaacagaccccccgaccctcccccacaagcctttaattgagagccgctctctgtaagtgtttgcttgtgcaaaagggaatagtgccgtggaggtgtgtgtgtccatggcatccggagcgaggcgactgtcctgcgtgggtagccctcggccggggagtgaggccaccaaccaaagtcagttccttcccacctgtgtttctgtttcgtttttttttttcttttttttctatatatattttttgttgaattctattttatttttaattctctcttctcctccagacacaatggcactgcttatctccgaaatggtgtgatcgtctcctcattgagcagcggctgccaccgcgctgtgggta

SEQ ID NO: 1944 - protein, 1362 aa, Homo sapiens
MSAESGPGTRLRNLPVMGDGLETSQMSTTQAQAQPQPANAASTNPPPPETSNPNKPKRQTNQLQYLLRVVLKTLWKHQFAWPFQQPVDAVKLNLPDYYKIIKTPMDMGTIKKRLENNYYWNAQECIQDFNTMFTNCYIYNKPGDDIVLMAEALEKLFLQKINELPTEETEIMIVQAKGRGRGRKETGTAKPGVSTVPNTTQASTPPQTQTPQPNPPPVQATPHPFPAVTPDLIVQTPVMTVVPPQPLQTPPPVPPQPQPPPAPAPQPVQSHPPIIAATPQPVKTKKGVKRKADTTTPTTIDPIHEPPSLPPEPKTTKLGQRRESSRPVKPPKKDVPDSQQHPAPEKSSKVSEQLKCCSGILKEMFAKKHAAYAWPFYKPVDVEALGLHDYCDIIKHPMDMSTIKSKLEAREYRDAQEFGADVRLMFSNCYKYNPPDHEVVAMARKLQDVFEMRFAKMPDEPEEPVVAVSSPAVPPPTKVVAPPSSSDSSSDSSSDSDSSTDDSEEERAQRLAELQEQLKAVHEQLAALSQPQQNKPKKKEKDKKEKKKEKHKRKEEVEENKKSKAKEPPPKKTKKNNSSNSNVSKKEPAPMKSKPPPTYESEEEDKCKPMSYEEKRQLSLDINKLPGEKLGRVVHIIQSREPSLKNSNPDEIEIDFETLKPSTLRELERYVTSCLRKKRKPQAEKVDVIAGSSKMKGFSSSESESSSESSSSDSEDSETEMAPKSKKKGHPGREQKKHHHHHHQQMQQAPAPVPQQPPPPPQQPPPPPPPQQQQQPPPPPPPPSMPQQAAPAMKSSPPPFIATQVPVLEPQLPGSVFDPIGHFTQPILHLPQPELPPHLPQPPEHSTPPHLNQHAVVSPPALHNALPQQPSRPSNRAAALPPKPARPPAVSPALTQTPLLPQPPMAQPPQVLLEDEEPPAPPLTSMQMQLYLQQLQKVQPPTPLLPSVKVQSQPPPPLPPPPHPSVQQQLQQQPPPPPPPQPQPPPQQQHQPPPRPVHLQPMQFSTHIQQPPPPQGQQPPHPPPGQQPPPPQPAKPQQVIQHHHSPRHHKSDPYSTGHLREAPSPLMIHSPQMSQFQSLTHQSPPQQNVQPKKQELRAASVVQPQPLVVVKEEKIHSPIIRSEPFSPSLRPEPPKHPESIKAPVHLPQRPEMKPVDVGRPVIRPPEQNAPPPGAPDKDKQKQEPKTPVAPKKDLKIKNMGSWASLVQKHPTTPSSTAKSSSDSFEQFRRAAREKEEREKALKAQAEHAEKEKERLRQERMRSREDEDALEQARRAHEEARRRQEQQQQQRQEQQQQQQQQAAAVAAAATPQAQSSQPQSMLDQQRELARKREQERRRREAMAATIDMNFQSDLLSIFEENLF

SEQ ID NO: 1945 - DNA, 8292 bp, Homo sapiens
ggagcctggaggactagcgaggaggagttgagagaacggagcggacgccatggcgaccaacatcgagcagatttttaggtctttcgtggtcagtaaattccgggaaattcaacaggagctttccagtggaaggaatgaaggccagctgaatggtgaaacaaatacacccattgaaggaaaccaggcgggtgatgcagctgcctctgccaggagtctaccaaatgaagaaatagtgcagaagatagaggaagtactttctggggtcttagatacagaactacgatataagccagacttgaaagagggctccagaaaaagtagatgcgtatctgtacaaacagatcctactgatgaaattcccactaaaaagtcaaagaagcataaaaagcacaaaaacaaaaagaagaaaaagaagaaagaaaaggaaaaaaaatataaaagacagccagaagaatctgagtcaaagacgaaatctcatgatgatgggaacatagatttagaatctgattcctttttaaagtttgattctgaaccttcagctgtggcgctggagcttcctacaagagcatttggcccatctgagaccaatgaatcccctgcagttgtgctagaacctcctgtagtatcaatggaggtatcagagccacacatcttagaaactctgaagccagctacaaaaactgcagaactgtcagttgtatctacatcagtaatctcagagcagtcagagcagtctgtggcagtaatgccagaaccatccatgacaaagattctggattcctttgcagcagcaccagtgcctactacaacactggtgttgaagtcatctgagccagttgtaacaatgtcagtggagtatcagatgaagtctgtgctgaaatctgtggagagcacatctccagagccatcaaagatcatgttggtagagcccccagtagcaaaagtgttagagccttcagaaacccttgtggtatcatcagagacacctactgaggtgtaccctgagccaagcacatcaacaacaatggattttccagagtcatctgcaattgaagcgctaagattgccagagcagcctgtagacgtaccatcggagattgcagattcatccatgacaagaccgcaggagttgccggagctgcctaagaccacagcgttggagctgcaggagtcgtcggtggcctcagcgatggagttgccggggccacctgcgacctccatgccggagttgcaggggccccctgtgactccagtgctggagttacctgggccctctgctaccccggtgccagagttgccagggcccctttctaccccagtgcctgagttgccagggccccctgcgacagcagtgcctgagttgccagggccctctgtgacaccagtgccacagttgtcgcaggaattgccagggcttccagcaccatccatggggttggagccaccacaggaggtaccagagccacctgtgatggcacaggagttgccagggctgcctttggtgacagcagcagtagagttgccagagcagcctgcggtaacagtagcaatggagttgaccgaacaacctgtgacgacgacagagttggagcagcctgtggggatgacaacggtggaacatcctgggcatcctgaggtgacaacggcaacagggttgctggggcagcctgaggcaacgatggtgctggagttgccaggacagccagtggcaacgacagcgctggagttgccggggcagccttcggtgactggggtgccagagttgccagggctgccttcggcaactagggcactggagttgtcggggcagcctgtggcaactggggcactagagttgcctgggccgctcatggcagctggggcactggagttctcggggcagtctggggcagctggagcactggagcttttggggcagcctctggcaacaggggtgctggagttgccagggcagcctggggcgccagagttgcctgggcagcctgtggcaactgtggcgctggagatctctgttcagtctgtggtgacaacatcggagctgtcaacgatgaccgtgtcgcagtccctggaggtgccctcgacgacagcgctggaatcctataatacggtagcacaggagctgcctactacattagtgggggagacttctgtaacagtaggagtggatcccttgatggccccagaatcccatatattagcttctaacaccatggagacccatatattagcatccaacaccatggactcccaaatgctagcgtccaacaccatggactcccagatgttagcaactagcactatggactcccagatgttagcaaccagttccatggactcccagatgttagcaaccagctccatggactcccagatgttagcaaccagctccatggactcccagatgttagcaaccagctccatggactcccagatgttagcaaccagcaccatggattctcagatgttagcaaccagcaccatggactcccagatgttagcaactagctcaatggattcccagatgttagcatctggcactatggactctcaaatgttagcttctggcaccatggatgctcagatgttagcgtctggtaccatggatgcccagatgttagcgtctagtacccaagattctgctatgttgggttcaaaatctcctgatccctataggttagctcaggatccttacaggttagctcaggatccctataggttgggccatgacccctatagattaggtcatgatgcttacaggttaggacaagacccttatagattaggccatgatccctacagactaactcctgatccctataggatgtcacctagaccctacaggatagcacccaggtcctatagaatagcacccaggccatataggttagcacctagacccctgatgttagcatctagacgttctatgatgatgtcctatgctgcagaacgttccatgatgtcatcttacgaacgctctatgatgtcttatgagcggtctatgatgtcccctatggctgaacgctctatgatgtcagcctacgagcgctctatgatgtcagcctacgagcgctctatgatgtcccctatggctgagcgctctatgatgtcagcttatgaacgctccatgatgtcagcttatgaacgctccatgatgtccccaatggctgatcgatctatgatgtccatgggtgctgaccggtctatgatgtcgtcatactctgctgctgaccggtctatgatgtcatcgtactctgcagctgaccgatctatgatgtcatcttatactgctgatcgttcaatgatgtctatggctgctgattcttacaccgattcttacactgacacatatacagaggcatatatggtgccacctttgcctcctgaagagcccccaacaatgccaccgttgccacctgaggagccaccaatgacaccaccattgcctcctgaggaaccaccagagggtccagcattgcccactgagcagtcagcattaacagctgaaaatacttggcctacagaggtgccatcatcaccatctgaagagtctgtatcgcagcctgagcctcctgtgagtcaaagtgagatttcggagccttcagcagtgcctactgattattcagtgtcagcatcagatccctcagttttagtatcagaggctgctgtgactgttccagaaccaccaccagagccagaatcttcaattacgttaacacctgtagagtctgcagtagtagcagaagaacatgaagttgttccagagagaccagtgacttgtatggtatctgaaactcccgccatgtcagctgaaccaactgtgttagcatcagagcctcctgttatgtcagagacagcagaaacatttgattccatgagagcctcaggacatgttgcctcagaagtatctacatccttgttggttccagcagtaactactccagtgctggcagagagcattctggagccgccagccatggctgccccagagtcttcagctatggctgtcctggagtcttcggctgtgaccgtcctggagtcttcgactgtgactgtcctggagtcttcgactgtaactgtcctggagccttcggttgtgactgtcccggagcctcctgttgtggctgagccagactatgttaccattcctgtgccagttgtttctgcgctggagccttctgtgcctgttctggaaccagcggtgtcagtccttcaaccttctatgattgtttcagaaccatctgtttctgtccaggaatcgactgtgacagtttcagagcctgctgtcacagtctcagagcagactcaagtaataccaactgaggtggctatagagtccacaccaatgatactggaatctagtatcatgtcatcacatgttatgaaaggaattaatctatcctctggtgatcaaaatcttgctccagagattggcatgcaggagattgcattgcattcaggtgaagaaccacatgctgaggaacacctgaaaggtgacttttacgaaagtgaacatggtataaatatagaccttaatataaataatcatttaattgctaaagagatggaacataatacagtgtgtgctgctggtactagtcctgttggggaaattggtgaagagaaaattttgcccaccagtgagactaaacagcgcacagtattggatacctaccctggtgttagtgaagctgatgcaggagaaactctatcttctactggtccttttgctctggaacctgatgcaacaggaactagtaagggtattgaatttaccacagcatctactctcagtttagttaataaatatgatgttgatttatctttaactactcaagatactgaacatgacatggtaatttccaccagtcctagtggtggtagtgaagctgacattgaagggcctttgcctgctaaagatattcatcttgatttaccatctaataataaccttgttagtaaggatacagaagaaccattacctgtaaaagagagtgaccagacattagcagctctgctcagccctaaagaaagtagtggaggagaaaaagaagtacctccccctcctaaagagacactgcctgattcaggattttctgccaatattgaggatattaatgaagcagatttagtgagaccgttacttcctaaggacatggaacgtcttacaagccttagagctggcattgaaggacctttacttgcaagtgatgttggacgtgacagatctgctgccagcccggttgtaagtagtatgccagaaagagcttcagagtcttcttcagaggaaaaagatgattatgaaatttttgtaaaagttaaggacactcacgaaaaaagcaagaaaaataagaaccgtgataagggggagaaagagaagaaaagagactcttcattaagatctcgaagtaagcgttccaaatcttctgaacacaaatcacgcaagcgtaccagtgaatctcgttctagggcaagaaagagatcatctaagtccaagtctcatcgctctcagacacgttcacggtcacgttcaagacgcaggaggagaagcagcagatcaagatcaaagtctagaggaagaagatctgtatcaaaagagaagcgcaaaagatctccaaagcacagatccaagtctagggaaagaaaaagaaaaagatcaagctccagggataaccgaaagacagttagagctcgaagtcgaaccccaagtcgtcggagtcggagtcatactccaagtcgtcgacgaaggtctagatctgtgggtagaagaaggagctttagcatttccccaagccgccgcagccgcacccccagccgccgcagccgcacccccagccgccgcagccgcacccccagccgccgcagccgcacccccagccgccggagccgcacccctagccgtcggagccgcaccccaagccgccggagaagatcaaggtctgtggtaagaagacgaagcttcagtatctcaccagtcagattaaggcgatcaagaacacccttaagaagaaggtttagcagatctcccatccgtcgtaaaagatccaggtcttctgaacgaggcagatcacccaaacgtctgacagatttggataaggctcaattacttgaaatagccaaagctaatgcagctgccatgtgtgctaaggctggtgtccctttaccaccaaacctaaagcctgcacctccacctactatagaagagaaagttgctaaaaagtcaggaggagctactatagaagaactaactgagaaatgtaaacagatcgcacagagtaaagaagatgatgatgtaatagtgaataaacctcatgtttcggatgaagaggaagaagaacctcctttttatcatcatccctttaaactcagtgaacccaaacctatttttttcaatctgaatattgctgcagcaaaaccaactccaccaaaaagccaggtaacattaacaaaagaattccctgtatcatctggatctcaacatcggaaaaaagaagcggatagtgtttatggagaatgggttcctgtggagaaaaatggtgaagaaaacaaagatgatgataatgttttcagcagcaatttgccctcagagcctgtggacatctctacagcaatgagtgaacgggcacttgctcagaaaagactcagtgagaatgcatttgatcttgaagccatgagcatgttaaatagagctcaggaaaggattgatgcctgggctcagctgaactctattcctggccagttcacaggaagtacaggagtacaggttttgacacaagaacagttggccaatactggtgcccaagcctggattaaaaaggatcagttcttaagagcagccccggtaactggaggaatgggagccgttttgatgagaaaaatgggctggagagaaggagaaggattaggaaaaaacaaagaaggcaataaggaacccatcctagttgattttaagacagaccgaaaaggtcttgttgcagtaggagaaagagcacaaaagaggtctgggaacttctctgctgcaatgaaagatctgtcaggcaaacatcctgtgtctgctttgatggagatctgtaataaaagaaggtggcaaccacctgaatttctattggtccatgatagtggccctgatcatcgcaaacattttctctttagggtattgagaaatggagcccttaccagacccaattgtatgtttttcttgaataggtattgataaatggaagcgcttaccagcccagctttgccagccctaataagaagcatgctaaagccacagcagctactgtggttcttcaagcaatgggccttgtaccaaaggacctcatggctaatgccacttgcttcaggagtgcctcacgtagatagattgaggttttataataatcatttcagaattttactctgcatcacaatgtatttcctctttaatgttgtaaatatttggcaatttaagacattgtgtaaaaagcaatctgtaaaaacatctccaggctttgatttttgtaccatggaaattgtatttaaccatacagggttttggtatgtttatattgtttaccttagtgatgtatttgtttaagtggctaacatccaaacgactgtttgaaggcatcagagtaatcttcagtgtggaatgttaaataacgcttttatactgtattttgtactatgatgtaactccccttccttatggctaggctactgtaacacttgcctgtaatcagtgaagggctgtgcaccttgtactatttcacaatgggttctgctggacagataatgggccagtgttattgaggtgatcaagatctgttccacagggctaatgccaccatctcccctcaaaattttgtagaggttctaaaaagaaagtggtatgttgtgtgatgatcagcactaagtcctgcattcctgttaaagccacttgggtcataagaagggagtaaaaaatgaagtctgactagaattctattgcagaggccagtacatttagtatggcattgagttgtgatatagttttactttgatgtgcattttgaatttcagctacacctagatagacgtaaaatgataattaaaatgctgtaaccaacttatctaataaaattggcaaccagccactattttgttgactatgagaaagttaaaagtttatgttaatttttagggtctgatagaatatttcatgtgtattacagtggtattcatatgctatgtctctaaactttattttcaaaagcttaaggcccaaatacaaacttctctggaataaacgtggtgttttattttctgggttat

SEQ ID NO: 1946 - protein, 2386 aa, Homo sapiens
MATNIEQIFRSFVVSKFREIQQELSSGRNEGQLNGETNTPIEGNQAGDAAASARSLPNEEIVQKIEEVLSGVLDTELRYKPDLKEGSRKSRCVSVQTDPTDEIPTKKSKKHKKHKNKKKKKKKEKEKKYKRQPEESESKTKSHDDGNIDLESDSFLKFDSEPSAVALELPTRAFGPSETNESPAVVLEPPVVSMEVSEPHILETLKPATKTAELSVVSTSVISEQSEQSVAVMPEPSMTKILDSFAAAPVPTTTLVLKSSEPVVTMSVEYQMKSVLKSVESTSPEPSKIMLVEPPVAKVLEPSETLVVSSETPTEVYPEPSTSTTMDFPESSAIEALRLPEQPVDVPSEIADSSMTRPQELPELPKTTALELQESSVASAMELPGPPATSMPELQGPPVTPVLELPGPSATPVPELPGPLSTPVPELPGPPATAVPELPGPSVTPVPQLSQELPGLPAPSMGLEPPQEVPEPPVMAQELPGLPLVTAAVELPEQPAVTVAMELTEQPVTTTELEQPVGMTTVEHPGHPEVTTATGLLGQPEATMVLELPGQPVATTALELPGQPSVTGVPELPGLPSATRALELSGQPVATGALELPGPLMAAGALEFSGQSGAAGALELLGQPLATGVLELPGQPGAPELPGQPVATVALEISVQSVVTTSELSTMTVSQSLEVPSTTALESYNTVAQELPTTLVGETSVTVGVDPLMAPESHILASNTMETHILASNTMDSQMLASNTMDSQMLATSTMDSQMLATSSMDSQMLATSSMDSQMLATSSMDSQMLATSSMDSQMLATSTMDSQMLATSTMDSQMLATSSMDSQMLASGTMDSQMLASGTMDAQMLASGTMDAQMLASSTQDSAMLGSKSPDPYRLAQDPYRLAQDPYRLGHDPYRLGHDAYRLGQDPYRLGHDPYRLTPDPYRMSPRPYRIAPRSYRIAPRPYRLAPRPLMLASRRSMMMSYAAERSMMSSYERSMMSYERSMMSPMAERSMMSAYERSMMSAYERSMMSPMAERSMMSAYERSMMSAYERSMMSPMADRSMMSMGADRSMMSSYSAADRSMMSSYSAADRSMMSSYTADRSMMSMAADSYTDSYTDTYTEAYMVPPLPPEEPPTMPPLPPEEPPMTPPLPPEEPPEGPALPTEQSALTAENTWPTEVPSLPSEESVSQPEPPVSQSEISEPSAVPTDYSVSASDPSVLVSEAAVTVPEPPPEPESSITLTPVESAVVAEEHEVVPERPVTCMVSETPAMSAEPTVLASEPPVMSETAETFDSMRASGHVASEVSTSLLVPAVTTPVLAESILEPPAMAAPESSAMAVLESSAVTVLESSTVTVLESSTVTVLEPSVVTVPEPPVVAEPDYVTIPVPVVSALEPSVPVLEPAVSVLQPSMIVSEPSVSVQESTVTVSEPAVTVSEQTQVIPTEVAIESTPMILESSIMSSHVMKGINLSSGDQNLAPEIGMQEIALHSGEEPHAEEHLKGDFYESEHGINIDLNINNHLIAKEMEHNTVCAAGTSPVGEIGEEKILPTSETKQCTVLDTYPGVSEADAGETLSSTGPFALEPDATGTSKGIEFTTASTLSLVNKYDVDLSLTTQDTEHDMVISTSPSGGSEADIEGPLPAKDIHLDLPSNNNLVSKDTEEPLPVKESDQTLAALLSPKESSGGEKEVPPPPKETLPDSGFSANIEDINEADLVRPLLPKDMERLTSLRAGIEGPLLASDVGRDRSAASPVVSSMPERASESSSEEKDDYEIFVKVKDTHEKSKKNKNRDKGEKEKKRDSSLRSRSKRSKSSEHKSRKRTSESRSRARKRSSKSKSHRSQTRSRSRSRRRRRSSRSRSKSRGRRSVSKEKRKRSPKHRSKSRERKRKRSSSRDNRKTVRARSRTPSRRSRSHTPSRRRRSRSVGRRRSFSISPSRRSRTPSRRSRTPSRRSRTPSRRSRTPSRRSRTPSRRSRTPSRRRRSRSVVRRRSFSISPVRLRRSRTPLRRRFSRSPIRRKRSRSSERGRSPKRLTDLDKAQLLEIAKANAAAMCAKAGVPLPPNLKPAPPPTIVEKVAKKSGGATIEELTEKCKQIAQSKEDDDVIVNKPHVSDEEEEEPPFYHHPFKLSEFKPIFFNLNIAAAKPTPPKSQVTLTKEFPVSSGSQHRKKEADSVYGEWVPVEKNGEENKDDDNVFSSNLPSEPVDISTAMSERALAQKRLSENAFDLEAMSMLNRAQERIDAWAQLNSIPGQFTGSTGVQVLTQEQLANTGAQAWIKKDQFLRAAPVTGGMGAVLMRKMGWREGEGLGKNKEGNKEPILVDFKTDRKGLVAVGERAQKRSGNFSAAMKDLSGKHPVSALMEICNKRRWQPPEFLLVHDSGPDHRKHFLFRVLRNGSPYQPNCMFFLNRY

SEQ ID NO: 1947 - DNA, 7497 bp, Homo sapiens
ggagcctggaggactagcgaggaggagttgagagaacggagcggacgccatggcgaccaacatcgagcagatttttaggtctttcgtggtcagtaaattccgggaaattcaacaggagctttccagtggaaggaatgaaggccagctgaatggtgaaacaaatacacccattgaaggaaaccaggcgggtgatgcagctgcctctgccaggagtctaccaaatgaagaaatagtgcagaagatagaggaagtactttctggggtcttagatacagaactacgatataagccagacttgaaagagggctccagaaaaagtagatgcgtatctgtacaaacagatcctactgatgaaattcccactaaaaagtcaaagaagcataaaaagcacaaaaacaaaaagaagaaaaagaagaaagaaaaggaaaaaaaatataaaagacagccagaagaatctgagtcaaagacgaaatctcatgatgatgggaacatagatttagaatctgattcctttttaaagtttgattctgaaccttcagctgtggcgctggagcttcctacaagagcatttggcccatctgagaccaatgaatcccctgcagttgtgctagaacctcctgtagtatcaatggaggtatcagagccacacatcttagaaactctgaagccagctacaaaaactgcagaactgtcagttgtatctacatcagtaatctcagagcagtcagagcagtctgtggcagtaatgccagaaccatccatgacaaagattctggattcctttgcagcagcaccagtgcctactacaacactggtgttgaagtcatctgagccagttgtaacaatgtcagtggagtatcagatgaagtctgtgctgaaatctgtggagagcacatctccagagccatcaaagatcatgttggtagagcccccagtagcaaaagtgttagagccttcagaaacccttgtggtatcatcagagacacctactgaggtgtaccctgagccaagcacatcaacaacaatggattttccagagtcatctgcaattgaagcgctaagattgccagagcagcctgtagacgtaccatcggagattgcagattcatccatgacaagaccgcaggagttgccggagctgcctaagaccacagcgttggagctgcaggagtcgtcggtggcctcagcgatggagttgccggggccacctgcgacctccatgccggagttgcaggggccccctgtgactccagtgctggagttacctgggccctctgctaccccggtgccagagttgccagggcccctttctaccccagtgcctgagttgccagggccccctgcgacagcagtgcctgagttgccagggccctctgtgacaccagtgccacagttgtcgcaggaattgccagggcttccagcaccatccatggggttggagccaccacaggaggtaccagagccacctgtgatggcacaggagttgccagggctgcctttggtgacagcagcagtagagttgccagagcagcctgcggtaacagtagcaatggagttgaccgaacaacctgtgacgacgacagagttggagcagcctgtggggatgacaacggtggaacatcctgggcatcctgaggtgacaacggcaacagggttgctggggcagcctgaggcaacgatggtgctggagttgccaggacagccagtggcaacgacagcgctggagttgccggggcagccttcggtgactggggtgccagagttgccagggctgccttcggcaactagggcactggagttgtcggggcagcctgtggcaactggggcactagagttgcctgggccgctcatggcagctggggcactggagttctcggggcagtctggggcagctggagcactggagcttttggggcagcctctggcaacaggggtgctggagttgccagggcagcctggggcgccagagttgcctgggcagcctgtggcaactgtggcgctggagatctctgttcagtctgtggtgacaacatcggagctgtcaacgatgaccgtgtcgcagtccctggaggtgccctcgacgacagcgctggaatcctataatacggtagcacaggagctgcctactacattagtgggggagacttctgtaacagtaggagtggatcccttgatggccccagaatcccatatattagcttctaacaccatggagacccatatattagcatccaacaccatggactcccaaatgctagcgtccaacaccatggactcccagatgctagcatccaacaccatggactcccagatgttagcgtctagcaccatggactcccagatgttagcaactagctccatggactcccagatgttagcaactagctccatggactcccagatgttagcaactagcactatggactcccagatgttagcaaccagttccatggactcccagatgttagcaaccagctccatggactcccagatgttagcaaccagctccatggactcccagatgttagcaaccagctccatggactcccagatgttagcaaccagcaccatggattctcagatgttagcaaccagcaccatggactcccagatgttagcaactagctcaatggattcccagatgttagcatctggcactatggactctcaaatgttagcttctggcaccatggatgctcagatgttagcgtctggtaccatggatgcccagatgttagcgtctagtacccaagattctgctatgttgggttcaaaatctcctgatccctataggttagctcaggatccttacaggttagctcaggatccctataggttgggccatgacccctatagattaggtcatgatgcttacaggttaggacaagacccttatagattaggccatgatccctacagactaactcctgatccctataggatgtcacctagaccctacaggatagcacccaggtcctatagaatagcacccaggccatataggttagcacctagacccctgatgttagcatctagacgttctatgatgatgtcctatgctgcagaacgttccatgatgtcatcttacgaacgctctatgatgtcttatgagcggtctatgatgtcccctatggctgaacgctctatgatgtcagcctacgagcgctctatgatgtcagcctacgagcgctctatgatgtcccctatggctgagcgctctatgatgtcagcttatgaacgctccatgatgtcagcttatgaacgctccatgatgtccccaatggctgatcgatctatgatgtccatgggtgctgaccggtctatgatgtcgtcatactctgctgctgaccggtctatgatgtcatcgtactctgcagctgaccgatctatgatgtcatcttatactgctgatcgttcaatgatgtctatggctgctgattcttacaccgattcttacactgacacatatacagaggcatatatggtgccacctttgcctcctgaagagcccccaacaatgccaccgttgccacctgaggagccaccaatgacaccaccattgcctcctgaggaaccaccagagggtccagcattgcccactgagcagtcagcattaacagctgaaaatacttggcctacagaggtgccatcatcaccatctgaagagtctgtatcgcagcctgagcctcctgtgagtcaaagtgagatttcggagccttcagcagtgcctactgattattcagtgtcagcatcagatccctcagttttagtatcagaggctgctgtgactgttccagaaccaccaccagagccagaatcttcaattacgttaacacctgtagagtctgcagtagtagcagaagaacatgaagttgttccagagagaccagtgacttgtatggtatctgaaactcccgccatgtcagctgaaccaactgtgttagcatcagagcctcctgttatgtcagagacagcagaaacatttgattccatgagagcctcaggacatgttgcctcagaagtatctacatccttgttggttccagcagtaactactccagtgctggcagagagcattctggagccgccagccatggctgccccagagtcttcagctatggctgtcctggagtcttcggctgtgaccgtcctggagtcttcgactgtgactgtcctggagtcttcgactgtaactgtcctggagccttcggttgtgactgtcccggagcctcctgttgtggctgagccagactatgttaccattcctgtgccagttgtttctgcgctggagccttctgtgcctgttctggaaccagcggtgtcagtccttcaaccttctatgattgtttcagaaccatctgtttctgtccaggaatcgactgtgacagtttcagagcctgctgtcacagtctcagagcagactcaagtaataccaactgaggtggctatagagtccacaccaatgatactggaatctagtatcatgtcatcacatgttatgaaaggaattaatctatcctctggtgatcaaaatcttgctccagagattggcatgcaggagattgcattgcattcaggtgaagaaccacatgctgaggaacacctgaaaggtgacttttacgaaagtgaacatggtataaatatagaccttaatataaataatcatttaattgctaaagagatggaacataatacagtgtgtgctgctggtactagtcctgttggggaaattggtgaagagaaaattttgcccaccagtgagactaaacagcgcacagtattggatacctaccctggtgttagtgaagctgatgcaggagaaactctatcttctactggtccttttgctctggaacctgatgcaacaggaactagtaagggtattgaatttaccacagcatctactctcagtttagttaataaatatgatgttgatttatctttaactactcaagatactgaacatgacatggtaatttccaccagtcctagtggtggtagtgaagctgacattgaagggcctttgcctgctaaagatattcatcttgatttaccatctaataataaccttgttagtaaggatacagaagaaccattacctgtaaaagagagtgaccagacattagcagctctgctcagccctaaagaaagtagtggaggagaaaaagaagtacctccccctcctaaagagacactgcctgattcaggattttctgccaatattgaggatattaatgaagcagatttagtgagaccgttacttcctaaggacatggaacgtcttacaagccttagagctggcattgaaggacctttacttgcaagtgatgttggacgtgacagatctgctgccagcccggttgtaagtagtatgccagaaagagcttcagagtcttcttcagaggaaaaagatgattatgaaatttttgtaaaagttaaggacactcacgaaaaaagcaagaaaaataagaaccgtgataagggggagaaagagaagaaaagagactcttcattaagatctcgaagtaagcgttccaaatcttctgaacacaaatcacgcaagcgtaccagtgaatctcgttctagggcaagaaagagatcatctaagtccaagtctcatcgctctcagacacgttcacggtcacgttcaagacgcaggaggagaagcagcagatcaagatcaaagtctagaggaagaagatctgtatcaaaagagaagcgcaaaagatctccaaagcacagatccaagtctagggaaagaaaaagaaaaagatcaagctccagggataaccgaaagacagttagagctcgaagtcgaaccccaagtcgtcggagtcggagtcatactccaagtcgtcgacgaaggtctagatctgtgggtagaagaaggagctttagcatttccccaagccgccgcagccgcacccccagccgccgcagccgcacccccagccgccgcagccgcacccccagccgccgcagccgcacccccagccgccggagccgcacccctagccgtcggagccgcaccccaagccgccggagaagatcaaggtctgtggtaagaagacgaagcttcagtatctcaccagtcagattaaggcgatcaagaacacccttaagaagaaggtttagcagatctcccatccgtcgtaaaagatccaggtcttctgaacgaggcagatcacccaaacgtctgacagatttggataaggctcaattacttgaaatagccaaagctaatgcagctgccatgtgtgctaaggctggtgtccctttaccaccaaacctaaagcctgcacctccacctactatagaagagaaagttgctaaaaagtcaggaggagctactatagaagaactaactgagaaatgtaaacagatcgcacagagtaaagaagatgatgatgtaatagtgaataaacctcatgtttcggatgaagaggaagaagaacctcctttttatcatcatccctttaaactcagtgaacccaaacctatttttttcaatctgaatattgctgcagcaaaaccaactccaccaaaaagccaggtaacattaacaaaagaattccctgtatcatctggatctcaacatcggaaaaaagaagcggatagtgtttatggagaatgggttcctgtggagaaaaatggtgaagaaaacaaagatgatgataatgttttcagcagcaatttgccctcagagggccgggttaaacggcagggccgggttagacgacagatgaaacaacccgcagcttctcatttgacagtaactcgatgcaattcactttgtggaaccaagccacaaagtgaaaagcatcgaattgcagagaacagtgttatcacatccctacccaacattgggccctccctgcacttgtgggaaggtagtccaaggtacaactatttagcttcccgatttgcttcaaggctctatagctctagattttggtggtagcaaatttatcgggtggagggattgatcggagagggcagatcctcaggttcaacacaagaactggattggaaaaggtcattgtaggttgatgtgagcatcttgggtacatagcccattgcccttaatgatggtttcttactgtttctctgggttgtttgtcagatagcctttaattttaattatttttccttccctttgctaccttggcccttttaaattcttgtgtttaacctaatgctcagccttggtactccattcccttctccttcccctctttgctactattaaaagtcggagaagtggaattcaaacgttgaaatttccacggggctatagttgtatcttaataatgccaagtgtcaaaacaaccccattaaaatgccgcctgattaaataatgtgctgctaaatatagtgcacatgaaaacagcaagactgtatatatatgtaaatatatatatatatctgtatctttgtatgtatctctgtatctgtacctttgctgtatcttttaataaacagtttacttttatttaa

SEQ ID NO: 1948 - protein, 2303 aa, Homo sapiens
MATNIEQIFRSFVVSKFREIQQELSSGRNEGQLNGETNTPIEGNQAGDAAASARSLPNEEIVQKIEEVLSGVLDTELRYKPDLKEGSRKSRCVSVQTDPTDEIPTKKSKKHKKHKNKKKKKKKEKEKKYKRQPEESESKTKSHDDGNIDLESDSFLKFDSEPSAVALELPTRAFGPSETNESPAVVLEPPVVSMEVSEPHILETLKPATKTAELSVVSTSVISEQSEQSVAVMPEPSMTKILDSFAAAPVPTTTLVLKSSEPVVTMSVEYQMKSVLKSVESTSPEPSKIMLVEPPVAKVLEPSETLVVSSETPTEVYPEPSTSTTMDFPESSAIEALRLPEQPVDVPSEIADSSMTRPQELPELPKTTALELQESSVASAMELPGPPATSMPELQGPPVTPVLELPGPSATPVPELPGPLSTPVPELPGPPATAVPELPGPSVTPVPQLSQELPGLPAPSMGLEPPQEVPEPPVMAQELPGLPLVTAAVELPEQPAVTVAMELTEQPVTTTELEQPVGMTTVEHPGHPEVTTATGLLGQPEATMVLELPGQPVATTALELPGQPSVTGVPELPGLPSATRALELSGQPVATGALELPGPLMAAGALEFSGQSGAAGALELLGQPLATGVLELPGQPGAPELPGQPVATVALEISVQSVVTTSELSTMTVSQSLEVPSTTALESYNTVAQELPTTLVGETSVTVGVDPLMAPESHILASNTMETHILASNTMDSQMLASNTMDSQMLASNTMDSQMLASSTMDSQMLATSSMDSQMLATSSMDSQMLATSTMDSQMLATSSMDSQMLATSSMDSQMLATSSMDSQMLATSSMDSQMLATSTMDSQMLATSTMDSQMLATSSMDSQMLASGTMDSQMLASGTMDAQMLASGTMDAQMLASSTQDSAMLGSKSPDPYRLAQDPYRLAQDPYRLGHDPYRLGHDAYRLGQDPYRLGHDPYRLTPDPYRMSPRPYRIAPRSYRIAPRPYRLAPRPLMLASRRSMMMSYAAERSMMSSYERSMMSYERSMMSPMAERSMMSAYERSMMSAYERSMMSPMAERSMMSAYERSMMSAYERSMMSPMADRSMMSMGADRSMMSSYSAADRSMMSSYSAADRSMMSSYTADRSMMSMAADSYTDSYTDTYTEAYMVPPLPPEEPPTMPPLPPEEPPMTPPLPPEEPPEGPALPTEQSALTAENTWPTEVPSSPSEESVSQPEPPVSQSEISEPSAVPTDYSVSASDPSVLVSEAAVTVPEPPPEPESSITLTPVESAVVAEEHEVVPERPVTCMVSETPAMSAEPTVLASEPPVMSETAETFDSMRASGHVASEVSTSLLVPAVTTPVLAESILEPPAMAAPESSAMAVLESSAVTVLESSTVTVLESSTVTVLEPSVVTVPEPPVVAEPDYVTIPVPVVSALEPSVPVLEPAVSVLQPSMIVSEPSVSVQESTVTVSEPAVTVSEQTQVIPTEVAIESTPMILESSIMSSHVMKGINLSSGDQNLAPEIGMQEIALHSGEEPHAEEHLKGDFYESEHGINIDLNINNHLIAKEMEHNTVCAAGTSPVGEIGEEKILPTSETKQRTVLDTYPGVSEADAGETLSSTGPFALEPDATGTSKGIEFTTASTLSLVNKYDVDLSLTTQDTEHDMVISTSPSGGSEADIEGPLPAKDIHLDLPSNNNLVSKDTEEPLPVKESDQTLAALLSPKESSGGEKEVPPPPKETLPDSGFSANIEDINEADLVRPLLPKDMERLTSLRAGIEGPLLASDVGRDRSAASPVVSSMPERASESSSEEKDDYEIFVKVKDTHEKSKKNKNRDKGEKEKKRDSSLRSRSKRSKSSEHKSRKRTSESRSRARKRSSKSKSHRSQTRSRSRSRRRRRSSRSRSKSRGRRSVSKEKRKRSPKHRSKSRERKRKRSSSRDNRKTVRARSRTPSRRSRSHTPSRRRRSRSVGRRRSFSISPSRRSRTPSRRSRTPSRRSRTPSRRSRTPSRRSRTPSRRSRTPSRRRRSRSVVRRRSFSISPVRLRRSRTPLRRRFSRSPIRRKRSRSSERGRSPKRLTDLDKAQLLEIAKANAAAMCAKAGVPLPPNLKPAPPPTIEEKVAKKSGGATIEELTEKCKQIAQSKEDDDVIVNKPHVSDEEEEEPPFYHHPFKLSEPKPIFFNLNIAAAKPTPPKSQVTLTKEFPVSSGSQHRKKEADSVYGEWVPVEKNGEENKDDDNVFSSNLPSEGRVKRQGRVRRQMKQPAASHLTVTRCNSLCGTKPQSEKHRIAENSVITSLPNIGPSLHLWEGSPRYNYLASRFASRLYSSRFWW

SEQ ID NO: 1949 - DNA, 8482 bp, Homo sapiens
ggagcctggaggactagcgaggaggagttgagagaacggagcggacgccatggcgaccaacatcgagcagatttttaggtctttcgtggtcagtaaattccgggaaattcaacaggagctttccagtggaaggaatgaaggccagctgaatggtgaaacaaatacacccattgaaggaaaccaggcgggtgatgcagctgcctctgccaggagtctaccaaatgaagaaatagtgcagaagatagaggaagtactttctggggtcttagatacagaactacgatataagccagacttgaaagagggctccagaaaaagtagatgcgtatctgtacaaacagatcctactgatgaaattcccactaaaaagtcaaagaagcataaaaagcacaaaaacaaaaagaagaaaaagaagaaagaaaaggaaaaaaaatataaaagacagccagaagaatctgagtcaaagacgaaatctcatgatgatgggaacatagatttagaatctgattcctttttaaagtttgattctgaaccttcagctgtggcgctggagcttcctacaagagcatttggcccatctgagaccaatgaatcccctgcagttgtgctagaacctcctgtagtatcaatggaggtatcagagccacacatcttagaaactctgaagccagctacaaaaactgcagaactgtcagttgtatctacatcagtaatctcagagcagtcagagcagtctgtggcagtaatgccagaaccatccatgacaaagattctggattcctttgcagcagcaccagtgcctactacaacactggtgttgaagtcatctgagccagttgtaacaatgtcagtggagtatcagatgaagtctgtgctgaaatctgtggagagcacatctccagagccatcaaagatcatgttggtagagcccccagtagcaaaagtgttagagccttcagaaacccttgtggtatcatcagagacacctactgaggtgtaccctgagccaagcacatcaacaacaatggattttccagagtcatctgcaattgaagcgctaagattgccagagcagcctgtagacgtaccatcggagattgcagattcatccatgacaagaccgcaggagttgccggagctgcctaagaccacagcgttggagctgcaggagtcgtcggtggcctcagcgatggagttgccggggccacctgcgacctccatgccggagttgcaggggccccctgtgactccagtgctggagttacctgggccctctgctaccccggtgccagagttgccagggcccctttctaccccagtgcctgagttgccagggccccctgcgacagcagtgcctgagttgccagggccctctgtgacaccagtgccacagttgtcgcaggaattgccagggcttccagcaccatccatggggttggagccaccacaggaggtaccagagccacctgtgatggcacaggagttgccagggctgcctttggtgacagcagcagtagagttgccagagcagcctgcggtaacagtagcaatggagttgaccgaacaacctgtgacgacgacagagttggagcagcctgtggggatgacaacggtggaacatcctgggcatcctgaggtgacaacggcaacagggttgctggggcagcctgaggcaacgatggtgctggagttgccaggacagccagtggcaacgacagcgctggagttgccggggcagccttcggtgactggggtgccagagttgccagggctgccttcggcaactagggcactggagttgtcggggcagcctgtggcaactggggcactagagttgcctgggccgctcatggcagctggggcactggagttctcggggcagtctggggcagctggagcactggagcttttggggcagcctctggcaacaggggtgctggagttgccagggcagcctggggcgccagagttgcctgggcagcctgtggcaactgtggcgctggagatctctgttcagtctgtggtgacaacatcggagctgtcaacgatgaccgtgtcgcagtccctggaggtgccctcgacgacagcgctggaatcctataatacggtagcacaggagctgcctactacattagtgggggagacttctgtaacagtaggagtggatcccttgatggccccagaatcccatatattagcttctaacaccatggagacccatatattagcatccaacaccatggactcccaaatgctagcgtccaacaccatggactcccagatgctagcatccaacaccatggactcccagatgttagcgtctagcaccatggactcccagatgttagcaactagctccatggactcccagatgttagcaactagctccatggactcccagatgttagcaactagcactatggactcccagatgttagcaaccagttccatggactcccagatgttagcaaccagctccatggactcccagatgttagcaaccagctccatggactcccagatgttagcaaccagctccatggactcccagatgttagcaaccagcaccatggattctcagatgttagcaaccagcaccatggactcccagatgttagcaactagctcaatggattcccagatgttagcatctggcactatggactctcaaatgttagcttctggcaccatggatgctcagatgttagcgtctggtaccatggatgcccagatgttagcgtctagtacccaagattctgctatgttgggttcaaaatctcctgatccctataggttagctcaggatccttacaggttagctcaggatccctataggttgggccatgacccctatagattaggtcatgatgcttacaggttaggacaagacccttatagattaggccatgatccctacagactaactcctgatccctataggatgtcacctagaccctacaggatagcacccaggtcctatagaatagcacccaggccatataggttagcacctagacccctgatgttagcatctagacgttctatgatgatgtcctatgctgcagaacgttccatgatgtcatcttacgaacgctctatgatgtcttatgagcggtctatgatgtcccctatggctgaacgctctatgatgtcagcctacgagcgctctatgatgtcagcctacgagcgctctatgatgtcccctatggctgagcgctctatgatgtcagcttatgaacgctccatgatgtcagcttatgaacgctccatgatgtccccaatggctgatcgatctatgatgtccatgggtgctgaccggtctatgatgtcgtcatactctgctgctgaccggtctatgatgtcatcgtactctgcagctgaccgatctatgatgtcatcttatactgctgatcgttcaatgatgtctatggctgctgattcttacaccgattcttacactgacacatatacagaggcatatatggtgccacctttgcctcctgaagagcccccaacaatgccaccgttgccacctgaggagccaccaatgacaccaccattgcctcctgaggaaccaccagagggtccagcattgcccactgagcagtcagcattaacagctgaaaatacttggcctacagaggtgccatcatcaccatctgaagagtctgtatcgcagcctgagcctcctgtgagtcaaagtgagatttcggagccttcagcagtgcctactgattattcagtgtcagcatcagatccctcagttttagtatcagaggctgctgtgactgttccagaaccaccaccagagccagaatcttcaattacgttaacacctgtagagtctgcagtagtagcagaagaacatgaagttgttccagagagaccagtgacttgtatggtatctgaaactcccgccatgtcagctgaaccaactgtgttagcatcagagcctcctgttatgtcagagacagcagaaacatttgattccatgagagcctcaggacatgttgcctcagaagtatctacatccttgttggttccagcagtaactactccagtgctggcagagagcattctggagccgccagccatggctgccccagagtcttcagctatggctgtcctggagtcttcggctgtgaccgtcctggagtcttcgactgtgactgtcctggagtcttcgactgtaactgtcctggagccttcggttgtgactgtcccggagcctcctgttgtggctgagccagactatgttaccattcctgtgccagttgtttctgcgctggagccttctgtgcctgttctggaaccagcggtgtcagtccttcaaccttctatgattgtttcagaaccatctgtttctgtccaggaatcgactgtgacagtttcagagcctgctgtcacagtctcagagcagactcaagtaataccaactgaggtggctatagagtccacaccaatgatactggaatctagtatcatgtcatcacatgttatgaaaggaattaatctatcctctggtgatcaaaatcttgctccagagattggcatgcaggagattgcattgcattcaggtgaagaaccacatgctgaggaacacctgaaaggtgacttttacgaaagtgaacatggtataaatatagaccttaatataaataatcatttaattgctaaagagatggaacataatacagtgtgtgctgctggtactagtcctgttggggaaattggtgaagagaaaattttgcccaccagtgagactaaacagcgcacagtattggatacctaccctggtgttagtgaagctgatgcaggagaaactctatcttctactggtccttttgctctggaacctgatgcaacaggaactagtaagggtattgaatttaccacagcatctactctcagtttagttaataaatatgatgttgatttatctttaactactcaagatactgaacatgacatggtaatttccaccagtcctagtggtggtagtgaagctgacattgaagggcctttgcctgctaaagatattcatcttgatttaccatctaataataaccttgttagtaaggatacagaagaaccattacctgtaaaagagagtgaccagacattagcagctctgctcagccctaaagaaagtagtggaggagaaaaagaagtacctccccctcctaaagagacactgcctgattcaggattttctgccaatattgaggatattaatgaagcagatttagtgagaccgttacttcctaaggacatggaacgtcttacaagccttagagctggcattgaaggacctttacttgcaagtgatgttggacgtgacagatctgctgccagcccggttgtaagtagtatgccagaaagagcttcagagtcttcttcagaggaaaaagatgattatgaaatttttgtaaaagttaaggacactcacgaaaaaagcaagaaaaataagaaccgtgataagggggagaaagagaagaaaagagactcttcattaagatctcgaagtaagcgttccaaatcttctgaacacaaatcacgcaagcgtaccagtgaatctcgttctagggcaagaaagagatcatctaagtccaagtctcatcgctctcagacacgttcacggtcacgttcaagacgcaggaggagaagcagcagatcaagatcaaagtctagaggaagaagatctgtatcaaaagagaagcgcaaaagatctccaaagcacagatccaagtctagggaaagaaaaagaaaaagatcaagctccagggataaccgaaagacagttagagctcgaagtcgaaccccaagtcgtcggagtcggagtcatactccaagtcgtcgacgaaggtctagatctgtgggtagaagaaggagctttagcatttccccaagccgccgcagccgcacccccagccgccgcagccgcacccccagccgccgcagccgcacccccagccgccgcagccgcacccccagccgccggagccgcacccctagccgtcggagccgcaccccaagccgccggagaagatcaaggtctgtggtaagaagacgaagcttcagtatctcaccagtcagattaaggcgatcaagaacacccttaagaagaaggtttagcagatctcccatccgtcgtaaaagatccaggtcttctgaacgaggcagatcacccaaacgtctgacagatttggataaggctcaattacttgaaatagccaaagctaatgcagctgccatgtgtgctaaggctggtgtccctttaccaccaaacctaaagcctgcacctccacctactatagaagagaaagttgctaaaaagtcaggaggagctactatagaagaactaactgagttttagaagccaaactgactgaggagtgggacggttcgtttgaatggaggaggtgttgagtgagcaacacgcagaagctcgcctacagtttcgtttccattcacgacgcgttcactgatcgccaaatgtaaacagatcgcacagagtaaagaagatgatgatgtaatagtgaataaacctcatgtttcggatgaagaggaagaagaacctcctttttatcatcatccctttaaactcagtgaacccaaacctatttttttcaatctgaatattgctgcagcaaaaccaactccaccaaaaagccaggtaacattaacaaaagaattccctgtatcatctggatctcaacatcggaaaaaagaagcggatagtgtttatggagaatgggttcctgtggagaaaaatggtgaagaaaacaaagatgatgataatgttttcagcagcaatttgccctcagagcctgtggacatctctacagcaatgagtgaacgggcacttgctcagaaaagactcagtgagaatgcatttgatcttgaagccatgagcatgttaaatagagctcaggaaaggattgatgcctgggctcagctgaactctattcctggccagttcacaggaagtacaggagtacaggttttgacacaagaacagttggccaatactggtgcccaagcctggattaaaaaggatcagttcttaagagcagccccggtaactggaggaatgggagccgttttgatgagaaaaatgggctggagagaaggagaaggattaggaaaaaacaaagaaggcaataaggaacccatcctagttgattttaagacagaccgaaaaggtcttgttgcagtaggagaaagagcacaaaagaggtctgggaacttctctgctgcaatgaaagatctgtcaggcaaacatcctgtgtctgctttgatggagatctgtaataaaagaaggtggcaaccacctgaatttctattggtccatgatagtggccctgatcatcgcaaacattttctctttagggtattgataaatggaagcgcttaccagcccagctttgccagccctaataagaagcatgctaaagccacagcagctactgtggttcttcaagcaatgggccttgtaccaaaggacctcatggctaatgccacttgcttcaggagtgcctcacgtagatagattgaggttttataataatcatttcagaattttactctgcatcacaatgtatttcctctttaatgttgtaaatatttggcaatttaagacattgtgtaaaaagcaatctgtaaaaacatctccaggctttgatttttgtaccatggaaattgtatttaaccatacagggttttggtatgtttatattgtttaccttagtgatgtatttgtttaagtggctaacatccaaacgactgtttgaaggcatcagagtaatcttcagtgtggaatgttaaataacgcttttatactgtattttgtactatgatgtaactccccttccttatggctaggctactgtaacacttgcctgtaatcagtgaagggctgtgcaccttgtactatttcacaatgggttctgctggacagataatgggccagtgttattgaggtgatcaagatctgttccacagggctaatgccaccatctcccctcaaaattttgtagaggttctaaaaagaaagtggtatgttgtgtgatgatcagcactaagtcctgcattcctgttaaagccacttgggtcataagaagggagtaaaaaatgaagtctgactagaattctattgcagaggccagtacatttagtatggcattgagttgtgatatagttttactttgatgtgcattttgaatttcagctacacctagatagacgtaaaatgataattaaaatgctgtaaccaacttatctaataaaattggcaaccagccactattttgttgactatgagaaagttaaaagtttatgttaatttttagggtctgatagaatatttcatgtgtattacagtggtattcatatgctatgtctctaaactttattttcaaaagcttaaggcccaaatacaaacttctctggaataaacgtggtgttttattttctgggttat

SEQ ID NO: 1950 - protein, 2108 aa, Homo sapiens
MATNIEQIFRSFVVSKFREIQQELSSGRNEGQLNGETNTPIEGNQAGDAAASARSLPNEEIVQKIEEVLSGVLDTELRYKPDLKEGSRKSRCVSVQTDPTDEIPTKKSKKHKKHKNKKKKKKKEKEKKYKRQPEESESKTKSHDDGNIDLESDSFLKFDSEPSAVALELPTRAFGPSETNESPAVVLEPPVVSMEVSEPHILETLKPATKTAELSVVSTSVISEQSEQSVAVMPEPSMTKILDSFAAAPVPTTTLVLKSSEPVVTMSVEYQMKSVLKSVESTSPEPSKIMLVEPPVAKVLEPSETLVVSSETPTEVYPEPSTSTTMDFPESSAIEALRLPEQPVDVPSEIADSSMTRPQELPELPKTTALELQESSVASAMELPGPPATSMPELQGPPVTPVLELPGPSATPVPELPGPLSTPVPELPGPPATAVPELPGPSVTPVPQLSQELPGLPAPSMGLEPPQEVPEPPVMAQELPGLPLVTAAVELPEQPAVTVAMELTEQPVTTTELEQPVGMTTVEHPGHPEVTTATGLLGQPEATMVLELPGQPVATTALELPGQPSVTGVPELPGLPSATRALELSGQPVATGALELPGPLMAAGALEFSGQSGAAGALELLGQPLATGVLELPGQPGAPELPGQPVATVALEISVQSVVTTSELSTMTVSQSLEVPSTTALESYNTVAQELPTTLVGETSVTVGVDPLMAPESHILASNTMETHILASNTMDSQMLASNTMDSQMLASNTMDSQMLASSTMDSQMLATSSMDSQMLATSSMDSQMLATSTMDSQMLATSSMDSQMLATSSMDSQMLATSSMDSQMLATSSMDSQMLATSTMDSQMLATSTMDSQMLATSSMDSQMLASGTMDSQMLASGTMDAQMLASGTMDAQMLASSTQDSAMLGSKSPDPYRLAQDPYRLAQDPYRLGHDPYRLGHDAYRLGQDPYRLGHDPYRLTPDPYRMSPRPYRIAPRSYRIAPRPYRLAPRPLMLASRRSMMMSYAAERSMMSSYERSMMSYERSMMSPMAERSMMSAYERSMMSAYERSMMSPMAERSMMSAYERSMMSAYERSMMSPMADRSMMSMGADRSMMSSYSAADRSMMSSYSAADRSMMSSYTADRSMMSMAADSYTDSYTDTYTEAYMVPPLPPEEPPTMPPLPPEEPPMTPPLPPEEPPEGPALPTEQSALTAENTWPTEVPSSPSEESVSQPEPPVSQSEISEPSAVPTDYSVSASDPSVLVSEAAVTVPEPPPEPESSITLTPVESAVVAEEHEVVPERPVTCMVSETPAMSAEPTVLASEPPVMSETAETFDSMRASGHVASEVSTSLLVPAVTTPVLAESILEPPAMAAPESSAMAVLESSAVTVLESSTVTVLESSTVTVLEPSVVTVPEPPVVAEPDYVTIPVPVVSALEPSVPVLEPAVSVLQPSMIVSEPSVSVQESTVTVSEPAVTVSEQTQVIPTEVAIESTPMILESSIMSSHVMKGINLSSGDQNLAPEIGMQEIALHSGEEPHAEEHLKGDFYESEHGINIDLNINNHLIAKEMEHNTVCAAGTSPVGEIGEEKILPTSETKQRTVLDTYPGVSEADAGETLSSTGPFALEPDATGTSKGIEFTTASTLSLVNKYDVDLSLTTQDTEHDMVISTSPSGGSEADIEGPLPAKDIHLDLPSNNNLVSKDTEEPLPVKESDQTLAALLSPKESSGGEKEVPPPPKETLPDSGFSANIEDINEADLVRPLLPKDMERLTSLRAGIEGPLLASDVGRDRSAASPVVSSMPERASESSSEEKDDYEIFVKVKDTHEKSKKNKNRDKGEKEKKRDSSLRSRSKRSKSSEHKSRKRTSESRSRARKRSSKSKSHRSQTRSRSRSRRRRRSSRSRSKSRGRRSVSKEKRKRSPKHRSKSRERKRKRSSSRDNRKTVRARSRTPSRRSRSHTPSRRRRSRSVGRRRSFSISPSRRSRTPSRRSRTPSRRSRTPSRRSRTPSRRSRTPSRRSRTPSRRRRSRSVVRRRSFSISPVRLRRSRTPLRRRFSRSPIRRKRSRSSERGRSPKRLTDLDKAQLLEIAKANAAAMCAKAGVPLPPNLKPAPPPTIEEKVAKKSGGATIEELTEF

SEQ ID NO: 1951 - DNA, 7402 bp, Homo sapiens
ggagcctggaggactagcgaggaggagttgagagaacggagcggacgccatggcgaccaacatcgagcagatttttaggtctttcgtggtcagtaaattccgggaaattcaacaggagctttccagtggaaggaatgaaggccagctgaatggtgaaacaaatacacccattgaaggaaaccaggcgggtgatgcagctgcctctgccaggagtctaccaaatgaagaaatagtgcagaagatagaggaagtactttctggggtcttagatacagaactacgatataagccagacttgaaagagggctccagaaaaagtagatgcgtatctgtacaaacagatcctactgatgaaattcccactaaaaagtcaaagaagcataaaaagcacaaaaacaaaaagaagaaaaagaagaaagaaaaggaaaaaaaatataaaagacagccagaagaatctgagtcaaagacgaaatctcatgatgatgggaacatagatttagaatctgattcctttttaaagtttgattctgaaccttcagctgtggcgctggagcttcctacaagagcatttggcccatctgagaccaatgaatcccctgcagttgtgctagaacctcctgtagtatcaatggaggtatcagagccacacatcttagaaactctgaagccagctacaaaaactgcagaactgtcagttgtatctacatcagtaatctcagagcagtcagagcagtctgtggcagtaatgccagaaccatccatgacaaagattctggattcctttgcagcagcaccagtgcctactacaacactggtgttgaagtcatctgagccagttgtaacaatgtcagtggagtatcagatgaagtctgtgctgaaatctgtggagagcacatctccagagccatcaaagatcatgttggtagagcccccagtagcaaaagtgttagagccttcagaaacccttgtggtatcatcagagacacctactgaggtgtaccctgagccaagcacatcaacaacaatggattttccagagtcatctgcaattgaagcgctaagattgccagagcagcctgtagacgtaccatcggagattgcagattcatccatgacaagaccgcaggagttgccggagctgcctaagaccacagcgttggagctgcaggagtcgtcggtggcctcagcgatggagttgccggggccacctgcgacctccatgccggagttgcaggggccccctgtgactccagtgctggagttacctgggccctctgctaccccggtgccagagttgccagggcccctttctaccccagtgcctgagttgccagggccccctgcgacagcagtgcctgagttgccagggccctctgtgacaccagtgccacagttgtcgcaggaattgccagggcttccagcaccatccatggggttggagccaccacaggaggtaccagagccacctgtgatggcacaggagttgccagggctgcctttggtgacagcagcagtagagttgccagagcagcctgcggtaacagtagcaatggagttgaccgaacaacctgtgacgacgacagagttggagcagcctgtggggatgacaacggtggaacatcctgggcatcctgaggtgacaacggcaacagggttgctggggcagcctgaggcaacgatggtgctggagttgccaggacagccagtggcaacgacagcgctggagttgccggggcagccttcggtgactggggtgccagagttgccagggctgccttcggcaactagggcactggagttgtcggggcagcctgtggcaactggggcactagagttgcctgggccgctcatggcagctggggcactggagttctcggggcagtctggggcagctggagcactggagcttttggggcagcctctggcaacaggggtgctggagttgccagggcagcctggggcgccagagttgcctgggcagcctgtggcaactgtggcgctggagatctctgttcagtctgtggtgacaacatcggagctgtcaacgatgaccgtgtcgcagtccctggaggtgccctcgacgacagcgctggaatcctataatacggaacgttccatgatgtcatcttacgaacgctctatgatgtcttatgagcggtctatgatgtcccctatggctgaacgctctatgatgtcagcctacgagcgctctatgatgtcagcctacgagcgctctatgatgtcccctatggctgagcgctctatgatgtcagcttatgaacgctccatgatgtcagcttatgaacgctccatgatgtccccaatggctgatcgatctatgatgtccatgggtgctgaccggtctatgatgtcgtcatactctgctgctgaccggtctatgatgtcatcgtactctgcagctgaccgatctatgatgtcatcttatactgctgatcgttcaatgatgtctatggctgctgattcttacaccgattcttacactgacacatatacagaggcatatatggtgccacctttgcctcctgaagagcccccaacaatgccaccgttgccacctgaggagccaccaatgacaccaccattgcctcctgaggaaccaccagagggtccagcattgcccactgagcagtcagcattaacagctgaaaatacttggcctacagaggtgccatcatcaccatctgaagagtctgtatcgcagcctgagcctcctgtgagtcaaagtgagatttcggagccttcagcagtgcctactgattattcagtgtcagcatcagatccctcagttttagtatcagaggctgctgtgactgttccagaaccaccaccagagccagaatcttcaattacgttaacacctgtagagtctgcagtagtagcagaagaacatgaagttgttccagagagaccagtgacttgtatggtatctgaaactcccgccatgtcagctgaaccaactgtgttagcatcagagcctcctgttatgtcagagacagcagaaacatttgattccatgagagcctcaggacatgttgcctcagaagtatctacatccttgttggttccagcagtaactactccagtgctggcagagagcattctggagccgccagccatggctgccccagagtcttcagctatggctgtcctggagtcttcggctgtgaccgtcctggagtcttcgactgtgactgtcctggagtcttcgactgtaactgtcctggagccttcggttgtgactgtcccggagcctcctgttgtggctgagccagactatgttaccattcctgtgccagttgtttctgcgctggagccttctgtgcctgttctggaaccagcggtgtcagtccttcaaccttctatgattgtttcagaaccatctgtttctgtccaggaatcgactgtgacagtttcagagcctgctgtcacagtctcagagcagactcaagtaataccaactgaggtggctatagagtccacaccaatgatactggaatctagtatcatgtcatcacatgttatgaaaggaattaatctatcctctggtgatcaaaatcttgctccagagattggcatgcaggagattgcattgcattcaggtgaagaaccacatgctgaggaacacctgaaaggtgacttttacgaaagtgaacatggtataaatatagaccttaatataaataatcatttaattgctaaagagatggaacataatacagtgtgtgctgctggtactagtcctgttggggaaattggtgaagagaaaattttgcccaccagtgagactaaacagcgcacagtattggatacctaccctggtgttagtgaagctgatgcaggagaaactctatcttctactggtccttttgctctggaacctgatgcaacaggaactagtaagggtattgaatttaccacagcatctactctcagtttagttaataaatatgatgttgatttatctttaactactcaagatactgaacatgacatggtaatttccaccagtcctagtggtggtagtgaagctgacattgaagggcctttgcctgctaaagatattcatcttgatttaccatctaataataaccttgttagtaaggatacagaagaaccattacctgtaaaagagagtgaccagacattagcagctctgctcagccctaaagaaagtagtggaggagaaaaagaagtacctccccctcctaaagagacactgcctgattcaggattttctgccaatattgaggatattaatgaagcagatttagtgagaccgttacttcctaaggacatggaacgtcttacaagccttagagctggcattgaaggacctttacttgcaagtgatgttggacgtgacagatctgctgccagcccggttgtaagtagtatgccagaaagagcttcagagtcttcttcagaggaaaaagatgattatgaaatttttgtaaaagttaaggacactcacgaaaaaagcaagaaaaataagaaccgtgataagggggagaaagagaagaaaagagactcttcattaagatctcgaagtaagcgttccaaatcttctgaacacaaatcacgcaagcgtaccagtgaatctcgttctagggcaagaaagagatcatctaagtccaagtctcatcgctctcagacacgttcacggtcacgttcaagacgcaggaggagaagcagcagatcaagatcaaagtctagaggaagaagatctgtatcaaaagagaagcgcaaaagatctccaaagcacagatccaagtctagggaaagaaaaagaaaaagatcaagctccagggataaccgaaagacagttagagctcgaagtcgaaccccaagtcgtcggagtcggagtcatactccaagtcgtcgacgaaggtctagatctgtgggtagaagaaggagctttagcatttccccaagccgccgcagccgcacccccagccgccgcagccgcacccccagccgccgcagccgcacccccagccgccgcagccgcacccccagccgccggagccgcacccctagccgtcggagccgcaccccaagccgccggagaagatcaaggtctgtggtaagaagacgaagcttcagtatctcaccagtcagattaaggcgatcaagaacacccttaagaagaaggtttagcagatctcccatccgtcgtaaaagatccaggtcttctgaacgaggcagatcacccaaacgtctgacagatttggataaggctcaattacttgaaatagccaaagctaatgcagctgccatgtgtgctaaggctggtgtccctttaccaccaaacctaaagcctgcacctccacctactatagaagagaaagttgctaaaaagtcaggaggagctactatagaagaactaactgagaaatgtaaacagatcgcacagagtaaagaagatgatgatgtaatagtgaataaacctcatgtttcggatgaagaggaagaagaacctcctttttatcatcatccctttaaactcagtgaacccaaacctatttttttcaatctgaatattgctgcagcaaaaccaactccaccaaaaagccaggtaacattaacaaaagaattccctgtatcatctggatctcaacatcggaaaaaagaagcggatagtgtttatggagaatgggttcctgtggagaaaaatggtgaagaaaacaaagatgatgataatgttttcagcagcaatttgccctcagagcctgtggacatctctacagcaatgagtgaacgggcacttgctcagaaaagactcagtgagaatgcatttgatcttgaagccatgagcatgttaaatagagctcaggaaaggattgatgcctgggctcagctgaactctattcctggccagttcacaggaagtacaggagtacaggttttgacacaagaacagttggccaatactggtgcccaagcctggattaaaaaggatcagttcttaagagcagccccggtaactggaggaatgggagccgttttgatgagaaaaatgggctggagagaaggagaaggattaggaaaaaacaaagaaggcaataaggaacccatcctagttgattttaagacagaccgaaaaggtcttgttgcagtaggagaaagagcacaaaagaggtctgggaacttctctgctgcaatgaaagatctgtcaggcaaacatcctgtgtctgctttgatggagatctgtaataaaagaaggtggcaaccacctgaatttctattggtccatgatagtggccctgatcatcgcaaacattttctctttagggtattgataaatggaagcgcttaccagcccagctttgccagccctaataagaagcatgctaaagccacagcagctactgtggttcttcaagcaatgggccttgtaccaaaggacctcatggctaatgccacttgcttcaggagtgcctcacgtagatagattgaggttttataataatcatttcagaattttactctgcatcacaatgtatttcctctttaatgttgtaaatatttggcaatttaagacattgtgtaaaaagcaatctgtaaaaacatctccaggctttgatttttgtaccatggaaattgtatttaaccatacagggttttggtatgtttatattgtttaccttagtgatgtatttgtttaagtggctaacatccaaacgactgtttgaaggcatcagagtaatcttcagtgtggaatgttaaataacgcttttatactgtattttgtactatgatgtaactccccttccttatggctaggctactgtaacacttgcctgtaatcagtgaagggctgtgcaccttgtactatttcacaatgggttctgctggacagataatgggccagtgttattgaggtgatcaagatctgttccacagggctaatgccaccatctcccctcaaaattttgtagaggttctaaaaagaaagtggtatgttgtgtgatgatcagcactaagtcctgcattcctgttaaagccacttgggtcataagaagggagtaaaaaatgaagtctgactagaattctattgcagaggccagtacatttagtatggcattgagttgtgatatagttttactttgatgtgcattttgaatttcagctacacctagatagacgtaaaatgataattaaaatgctgtaaccaacttatctaataaaattggcaaccagccactattttgttgactatgagaaagttaaaagtttatgttaatttttagggtctgatagaatatttcatgtgtattacagtggtattcatatgctatgtctctaaactttattttcaaaagcttaaggcccaaatacaaacttctctggaataaacgtggtgttttattttctgggttat

SEQ ID NO: 1952 - protein, 2140 aa, Homo sapiens
MATNIEQIFRSFVVSKFREIQQELSSGRNEGQLNGETNTPIEGNQAGDAAASARSLPNEEIVQKIEEVLSGVLDTELRYKPDLKEGSRKSRCVSVQTDPTDEIPTKKSKKHKKHKNKKKKKKKEKEKKYKRQPEESESKTKSHDDGNIDLESDSFLKFDSEPSAVALELPTRAFGPSETNESPAVVLEPPVVSMEVSEPHILETLKPATKTAELSVVSTSVISEQSEQSVAVMPEPSMTKILDSFAAAPVPTTTLVLKSSEPVVTMSVEYQMKSVLKSVESTSPEPSKIMLVEPPVAKVLEPSETLVVSSETPTEVYPEPSTSTTMDFPESSAIEALRLPEQPVDVPSEIADSSMTRPQELPELPKTTALELQESSVASAMELPGPPATSMPELQGPPVTPVLELPGPSATPVPELPGPLSTPVPELPGPPATAVPELPGPSVTPVPQLSQELPGLPAPSMGLEPPQEVPEPPVMAQELPGLPLVTAAVELPEQPAVTVAMELTEQPVTTTELEQPVGMTTVEHPGHPEVTTATGLLGQPEATMVLELPGQPVATTALELPGQPSVTGVPELPGLPSATRALELSGQPVATGALELPGPLMAAGALEFSGQSGAAGALELLGQPLATGVLELPGQPGAPELPGQPVATVALEISVQSVVTTSELSTMTVSQSLEVPSTTALESYNTERSMMSSYERSMMSYERSMMSPMAERSMMSAYERSMMSAYERSMMSPMAERSMMSAYERSMMSAYERSMMSPMADRSMMSMGADRSMMSSYSAADRSMMSSYSAADRSMMSSYTADRSMMSMAADSYTDSYTDTYTEAYMVPPLPPEEPPTMPPLPPEEPPMTPPLPPEEPPEGPALPTEQSALTAENTWPTEVPSSPSEESVSQPEPPVSQSEISEPSAVPTDYSVSASDPSVLVSEAAVTVPEPPPEPESSITLTPVESAVVAEEHEVVPERPVTCMVSETPAMSAEPTVLASEPPVMSETAETFDSMRASGHVASEVSTSLLVPAVTTPVLAESILEPPAMAAPESSAMAVLESSAVTVLESSTVTVLESSTVTVLEPSVVTVPEPPVVAEPDYVTIPVPVVSALEPSVPVLEPAVSVLQPSMIVSEPSVSVQESTVTVSEPAVTVSEQTQVIPTEVAIESTPMILESSIMSSHVMKGINLSSGDQNLAPEIGMQEIALHSGEEPHAEEHLKGDFYESEHGINIDLNINNHLIAKEMEHNTVCAAGTSPVGEIGEEKILPTSETKQRTVLDTYPGVSEADAGETLSSTGPFALEPDATGTSKGIEFTTASTLSLVNKYDVDLSLTTQDTEHDMVISTSPSGGSEADIEGPLPAKDIHLDLPSNNNLVSKDTEEPLPVKESDQTLAALLSPKESSGGEKEVPPPPKETLPDSGFSANIEDINEADLVRPLLPKDMERLTSLRAGIEGPLLASDVGRDRSAASPVVSSMPERASESSSEEKDDYEIFVKVKDTHEKSKKNKNRDKGEKEKKRDSSLRSRSKRSKSSEHKSRKRTSESRSRARKRSSKSKSHRSQTRSRSRSRRRRRSSRSRSKSRGRRSVSKEKRKRSPKHRSKSRERKRKRSSSRDNRKTVRARSRTPSRRSRSHTPSRRRRSRSVGRRRSFSISPSRRSRTPSRRSRTPSRRSRTPSRRSRTPSRRSRTPSRRSRTPSRRRRSRSVVRRRSFSISPVRLRRSRTPLRRRFSRSPIRRKRSRSSERGRSPKRLTDLDKAQLLEIAKANAAAMCAKAGVPLPPNLKPAPPPTIEEKVAKKSGGATIEELTEKCKQIAQSKEDDDVIVNKPHVSDEEEEEPPFYHHPFKLSEPKPIFFNLNIAAAKPTPPKSQVTLTKEFPVSSGSQHRKKEADSVYGEWVPVEKNGEENKDDDNVFSSNLPSEPVDISTAMSERALAQKRLSENAFDLEAMSMLNRAQERIDAWAQLNSIPGQFTGSTGVQVLTQEQLANTGAQAWIKKDQFLRAAPVTGGMGAVLMRKMGWREGEGLGKNKEGNKEPILVDFKTDRKGLVAVGERAQKRSGNFSAAMKDLSGKHPVSALMEICNKRRWQPPEFLLVHDSGPDHRKHFLFRVLINGSAYQPSFASPNKKHAKATAATVVLQAMGLVPKDLMANATCFRSASRR

SEQ ID NO: 1953 - DNA, 8439 bp, Homo sapiens
ggagcctggaggactagcgaggaggagttgagagaacggagcggacgccatggcgaccaacatcgagcagatttttaggtctttcgtggtcagtaaattccgggaaattcaacaggagctttccagtggaaggaatgaaggccagctgaatggtgaaacaaatacacccattgaaggaaaccaggcgggtgatgcagctgcctctgccaggagtctaccaaatgaagaaatagtgcagaagatagaggaagtactttctggggtcttagatacagaactacgatataagccagacttgaaagagggctccagaaaaagtagatgcgtatctgtacaaacagatcctactgatgaaattcccactaaaaagtcaaagaagcataaaaagcacaaaaacaaaaagaagaaaaagaagaaagaaaaggaaaaaaaatataaaagacagccagaagaatctgagtcaaagacgaaatctcatgatgatgggaacatagatttagaatctgattcctttttaaagtttgattctgaaccttcagctgtggcgctggagcttcctacaagagcatttggcccatctgagaccaatgaatcccctgcagttgtgctagaacctcctgtagtatcaatggaggtatcagagccacacatcttagaaactctgaagccagctacaaaaactgcagaactgtcagttgtatctacatcagtaatctcagagcagtcagagcagtctgtggcagtaatgccagaaccatccatgacaaagattctggattcctttgcagcagcaccagtgcctactacaacactggtgttgaagtcatctgagccagttgtaacaatgtcagtggagtatcagatgaagtctgtgctgaaatctgtggagagcacatctccagagccatcaaagatcatgttggtagagcccccagtagcaaaagtgttagagccttcagaaacccttgtggtatcatcagagacacctactgaggtgtaccctgagccaagcacatcaacaacaatggattttccagagtcatctgcaattgaagcgctaagattgccagagcagcctgtagacgtaccatcggagattgcagattcatccatgacaagaccgcaggagttgccggagctgcctaagaccacagcgttggagctgcaggagtcgtcggtggcctcagcgatggagttgccggggccacctgcgacctccatgccggagttgcaggggccccctgtgactccagtgctggagttacctgggccctctgctaccccggtgccagagttgccagggcccctttctaccccagtgcctgagttgccagggccccctgcgacagcagtgcctgagttgccagggccctctgtgacaccagtgccacagttgtcgcaggaattgccagggcttccagcaccatccatggggttggagccaccacaggaggtaccagagccacctgtgatggcacaggagttgccagggctgcctttggtgacagcagcagtagagttgccagagcagcctgcggtaacagtagcaatggagttgaccgaacaacctgtgacgacgacagagttggagcagcctgtggggatgacaacggtggaacatcctgggcatcctgaggtgacaacggcaacagggttgctggggcagcctgaggcaacgatggtgctggagttgccaggacagccagtggcaacgacagcgctggagttgccggggcagccttcggtgactggggtgccagagttgccagggctgccttcggcaactagggcactggagttgtcggggcagcctgtggcaactggggcactagagttgcctgggccgctcatggcagctggggcactggagttctcggggcagtctggggcagctggagcactggagcttttggggcagcctctggcaacaggggtgctggagttgccagggcagcctggggcgccagagttgcctgggcagcctgtggcaactgtggcgctggagatctctgttcagtctgtggtgacaacatcggagctgtcaacgatgaccgtgtcgcagtccctggaggtgccctcgacgacagcgctggaatcctataatacggtagcacaggagctgcctactacattagtgggggagacttctgtaacagtaggagtggatcccttgatggccccagaatcccatatattagcttctaacaccatggagacccatatattagcatccaacaccatggactcccaaatgctagcgtccaacaccatggactcccagatgctagcatccaacaccatggactcccagatgttagcgtctagcaccatggactcccagatgttagcaactagctccatggactcccagatgttagcaactagctccatggactcccagatgttagcaactagcactatggactcccagatgttagcaaccagttccatggactcccagatgttagcaaccagctccatggactcccagatgttagcaaccagctccatggactcccagatgttagcaaccagctccatggactcccagatgttagcaaccagcaccatggattctcagatgttagcaaccagcaccatggactcccagatgttagcaactagctcaatggattcccagatgttagcatctggcactatggactctcaaatgttagcttctggcaccatggatgctcagatgttagcgtctggtaccatggatgcccagatgttagcgtctagtacccaagattctgctatgttgggttcaaaatctcctgatccctataggttagctcaggatccttacaggttagctcaggatccctataggttgggccatgacccctatagattaggtcatgatgcttacaggttaggacaagacccttatagattaggccatgatccctacagactaactcctgatccctataggatgtcacctagaccctacaggatagcacccaggtcctatagaatagcacccaggccatataggttagcacctagacccctgatgttagcatctagacgttctatgatgatgtcctatgctgcagaacgttccatgatgtcatcttacgaacgctctatgatgtcttatgagcggtctatgatgtcccctatggctgaacgctctatgatgtcagcctacgagcgctctatgatgtcagcctacgagcgctctatgatgtcccctatggctgagcgctctatgatgtcagcttatgaacgctccatgatgtcagcttatgaacgctccatgatgtccccaatggctgatcgatctatgatgtccatgggtgctgaccggtctatgatgtcgtcatactctgctgctgaccggtctatgatgtcatcgtactctgcagctgaccgatctatgatgtcatcttatactgctgatcgttcaatgatgtctatggctgctgattcttacaccgattcttacactgacacatatacagaggcatatatggtgccacctttgcctcctgaagagcccccaacaatgccaccgttgccacctgaggagccaccaatgacaccaccattgcctcctgaggaaccaccagagggtccagcattgcccactgagcagtcagcattaacagctgaaaatacttggcctacagaggtgccatcatcaccatctgaagagtctgtatcgcagcctgagcctcctgtgagtcaaagtgagatttcggagccttcagcagtgcctactgattattcagtgtcagcatcagatccctcagttttagtatcagaggctgctgtgactgttccagaaccaccaccagagccagaatcttcaattacgttaacacctgtagagtctgcagtagtagcagaagaacatgaagttgttccagagagaccagtgacttgtatggtatctgaaactcccgccatgtcagctgaaccaactgtgttagcatcagagcctcctgttatgtcagagacagcagaaacatttgattccatgagagcctcaggacatgttgcctcagaagtatctacatccttgttggttccagcagtaactactccagtgctggcagagagcattctggagccgccagccatggctgccccagagtcttcagctatggctgtcctggagtcttcggctgtgaccgtcctggagtcttcgactgtgactgtcctggagtcttcgactgtaactgtcctggagccttcggttgtgactgtcccggagcctcctgttgtggctgagccagactatgttaccattcctgtgccagttgtttctgcgctggagccttctgtgcctgttctggaaccagcggtgtcagtccttcaaccttctatgattgtttcagaaccatctgtttctgtccaggaatcgactgtgacagtttcagagcctgctgtcacagtctcagagcagactcaagtaataccaactgaggtggctatagagtccacaccaatgatactggaatctagtatcatgtcatcacatgttatgaaaggaattaatctatcctctggtgatcaaaatcttgctccagagattggcatgcaggagattgcattgcattcaggtgaagaaccacatgctgaggaacacctgaaaggtgacttttacgaaagtgaacatggtataaatatagaccttaatataaataatcatttaattgctaaagagatggaacataatacagtgtgtgctgctggtactagtcctgttggggaaattggtgaagagaaaattttgcccaccagtgagactaaacagcgcacagtattggatacctaccctggtgttagtgaagctgatgcaggagaaactctatcttctactggtccttttgctctggaacctgatgcaacaggaactagtaagggtattgaatttaccacagcatctactctcagtttagttaataaatatgatgttgatttatctttaactactcaagatactgaacatgacatggtaatttccaccagtcctagtggtggtagtgaagctgacattgaagggcctttgcctgctaaagatattcatcttgatttaccatctaataataaccttgttagtaaggatacagaagaaccattacctgtaaaagagagtgaccagacattagcagctctgctcagccctaaagaaagtagtggaggagaaaaagaagtacctccccctcctaaagagacactgcctgattcaggattttctgccaatattgaggatattaatgaagcagatttagtgagaccgttacttcctaaggacatggaacgtcttacaagccttagagctggcattgaaggacctttacttgcaagtgatgttggacgtgacagatctgctgccagcccggttgtaagtagtatgccagaaagagcttcagagtcttcttcagaggaaaaagatgattatgaaatttttgtaaaagttaaggacactcacgaaaaaagcaagaaaaataagaaccgtgataagggggagaaagagaagaaaagagactcttcattaagatctcgaagtaagcgttccaaatcttctgaacacaaatcacgcaagcgtaccagtgaatctcgttctagggcaagaaagagatcatctaagtccaagtctcatcgctctcagacacgttcacggtcacgttcaagacgcaggaggagaagcagcagatcaagatcaaagtctagaggaagaagatctgtatcaaaagagaagcgcaaaagatctccaaagcacagatccaagtctagggaaagaaaaagaaaaagatcaagctccagggataaccgaaagacagttagagctcgaagtcgaaccccaagtcgtcggagtcggagtcatactccaagtcgtcgacgaaggtctagatctgtgggtagaagaaggagctttagcatttccccaagccgccgcagccgcacccccagccgccgcagccgcacccccagccgccgcagccgcacccccagccgccgcagccgcacccccagccgccggagccgcacccctagccgtcggagccgcaccccaagccgccggagaagatcaaggtctgtggtaagaagacgaagcttcagtatctcaccagtcagattaaggcgatcaagaacacccttaagaagaaggtttagcagatctcccatccgtcgtaaaagatccaggtcttctgaacgaggcagatcacccaaacgtctgacagatttggataaggctcaattacttgaaatagccaaagctaatgcagctgccatgtgtgctaaggctggtgtccctttaccaccaaacctaaagcctgcacctccacctactatagaagagaaagttgctaaaaagtcaggaggagctactatagaagaactaactgagaaatgtaaacagatcgcacagagtaaagaagatgatgatgtaatagtgaataaacctcatgtttcggatgaagaggaagaagaacctcctttttatcatcatccctttaaactcagtgaacccaaacctatttttttcaatctgaatattgctgcagcaaaaccaactccaccaaaaagccaggtaacattaacaaaagaattccctgtatcatctggatctcaacatcggaaaaaagaagcggatagtgtttatggagaatgggttcctgtggagaaaaatggtgaagaaaacaaagatgatgataatgttttcagcagcaatttgccctcagagcctgtggacatctctacagcaatgagtgaacgggcacttgctcagaaaagactcagtgagaatgcatttgatcttgaagccatgagcatgttaaatagagctcaggaaaggattgatgcctgggctcagctgaactctattcctggccagttcacaggaagtacaggagtacaggttttgacacaagaacagttggccaatactggtgcccaagcctggattaaaaagggccaaatccttgtagctgtcttcttgccccggtcagtgccagccgtactattcacaacactgctgctaccgaggcctaggatcagttcttaagagcagccccggtaactggaggaatgggagccgttttgatgagaaaaatgggctggagagaaggagaaggattaggaaaaaacaaagaaggcaataaggaacccatcctagttgattttaagacagaccgaaaaggtcttgttgcagtaggagaaagagcacaaaagaggtctgggaacttctctgctgcaatgaaagatctgtcaggcaaacatcctgtgtctgctttgatggagatctgtaataaaagaaggtggcaaccacctgaatttctattggtccatgatagtggccctgatcatcgcaaacattttctctttagggtattgataaatggaagcgcttaccagcccagctttgccagccctaataagaagcatgctaaagccacagcagctactgtggttcttcaagcaatgggccttgtaccaaaggacctcatggctaatgccacttgcttcaggagtgcctcacgtagatagattgaggttttataataatcatttcagaattttactctgcatcacaatgtatttcctctttaatgttgtaaatatttggcaatttaagacattgtgtaaaaagcaatctgtaaaaacatctccaggctttgatttttgtaccatggaaattgtatttaaccatacagggttttggtatgtttatattgtttaccttagtgatgtatttgtttaagtggctaacatccaaacgactgtttgaaggcatcagagtaatcttcagtgtggaatgttaaataacgcttttatactgtattttgtactatgatgtaactccccttccttatggctaggctactgtaacacttgcctgtaatcagtgaagggctgtgcaccttgtactatttcacaatgggttctgctggacagataatgggccagtgttattgaggtgatcaagatctgttccacagggctaatgccaccatctcccctcaaaattttgtagaggttctaaaaagaaagtggtatgttgtgtgatgatcagcactaagtcctgcattcctgttaaagccacttgggtcataagaagggagtaaaaaatgaagtctgactagaattctattgcagaggccagtacatttagtatggcattgagttgtgatatagttttactttgatgtgcattttgaatttcagctacacctagatagacgtaaaatgataattaaaatgctgtaaccaacttatctaataaaattggcaaccagccactattttgttgactatgagaaagttaaaagtttatgttaatttttagggtctgatagaatatttcatgtgtattacagtggtattcatatgctatgtctctaaactttattttcaaaagcttaaggcccaaatacaaacttctctggaataaacgtggtgttttattttctgggttat

SEQ ID NO: 1954 - protein, 2325 aa, Homo sapiens
MATNIEQIFRSFVVSKFREIQQELSSGRNEGQLNGETNTPIEGNQAGDAAASARSLPNEEIVQKIEEVLSGVLDTELRYKPDLKEGSRKSRCVSVQTDPTDEIPTKKSKKHKKHKNKKKKKKKEKEKKYKRQPEESESKTKSHDDGNIDLESDSFLKFDSEPSAVALELPTRAFGPSETNESPAVVLEPPVVSMEVSEPHILETLKPATKTAELSVVSTSVISEQSEQSVAVMPEPSMTKILDSFAAAPVPTTTLVLKSSEPVVTMSVEYQMKSVLKSVESTSPEPSKIMLVEPPVAKVLEPSETLVVSSETPTEVYPEPSTSTTMDFPESSAIEALRLPEQPVDVPSEIADSSMTRPQELPELPKTTALELQESSVASAMELPGPPATSMPELQGPPVTPVLELPGPSATPVPELPGPLSTPVPELPGPPATAVPELPGPSVTPVPQLSQELPGLPAPSMGLEPPQEVPEPPVMAQELPGLPLVTAAVELPEQPAVTVAMELTEQPVTTTELEQPVGMTTVEHPGHPEVTTATGLLGQPEATMVLELPGQPVATTALELPGQPSVTGVPELPGLPSATRALELSGQPVATGALELPGPLMAAGALEFSGQSGAAGALELLGQPLATGVLELPGQPGAPELPGQPVATVALEISVQSVVTTSELSTMTVSQSLEVPSTTALESYNTVAQELPTTLVGETSVTVGVDPLMAPESHILASNTMETHILASNTMDSQMLASNTMDSQMLASNTMDSQMLASSTMDSQMLATSSMDSQMLATSSMDSQMLATSTMDSQMLATSSMDSQMLATSSMDSQMLATSSMDSQMLATSSMDSQMLATSTMDSQMLATSTMDSQMLATSSMDSQMLASGTMDSQMLASGTMDAQMLASGTMDAQMLASSTQDSAMLGSKSPDPYRLAQDPYRLAQDPYRLGHDPYRLGHDAYRLGQDPYRLGHDPYRLTPDPYRMSPRPYRIAPRSYRIAPRPYRLAPRPLMLASRRSMMMSYAAERSMMSSYERSMMSYERSMMSPMAERSMMSAYERSMMSAYERSMMSPMAERSMMSAYERSMMSAYERSMMSPMADRSMMSMGADRSMMSSYSAADRSMMSSYSAADRSMMSSYTADRSMMSMAADSYTDSYTDTYTEAYMVPPLPPEEPPTMPPLPPEEPPMTPPLPPEEPPEGPALPTEQSALTAENTWPTEVPSSPSEESVSQPEPPVSQSEISEPSAVPTDYSVSASDPSVLVSEAAVTVPEPPPEPESSITLTPVESAVVAEEHEVVPERPVTCMVSETPAMSAEPTVLASEPPVMSETAETFDSMRASGHVASEVSTSLLVPAVTTPVLAESILEPPAMAAPESSAMAVLESSAVTVLESSTVTVLESSTVTVLEPSVVTVPEPPVVAEPDYVTIPVPVVSALEPSVPVLEPAVSVLQPSMIVSEPSVSVQESTVTVSEPAVTVSEQTQVIPTEVAIESTPMILESSIMSSHVMKGINLSSGDQNLAPEIGMQEIALHSGEEPHAEEHLKGDFYESEHGINIDLNINNHLIAKEMEHNTVCAAGTSPVGEIGEEKILPTSETKQRTVLDTYPGVSEADAGETLSSTGPFALEPDATGTSKGIEFTTASTLSLVNKYDVDLSLTTQDTEHDMVISTSPSGGSEADIEGPLPAKDIHLDLPSNNNLVSKDTEEPLPVKESDQTLAALLSPKESSGGEKEVPPPPKETLPDSGFSANIEDINEADLVRPLLPKDMERLTSLRAGIEGPLLASDVGRDRSAASPVVSSMPERASESSSEEKDDYEIFVKVKDTHEKSKKNKNRDKGEKEKKRDSSLRSRSKRSKSSEHKSRKRTSESRSRARKRSSKSKSHRSQTRSRSRSRRRRRSSRSRSKSRGRRSVSKEKRKRSPKHRSKSRERKRKRSSSRDNRKTVRARSRTPSRRSRSHTPSRRRRSRSVGRRRSFSISPSRRSRTPSRRSRTPSRRSRTPSRRSRTPSRRSRTPSRRSRTPSRRRRSRSVVRRRSFSISPVRLRRSRTPLRRRFSRSPIRRKRSRSSERGRSPKRLTDLDKAQLLEIAKANAAAMCAKAGVPLPPNLKPAPPPTIEEKVAKKSGGATIEELTEKCKQIAQSKEDDDVIVNKPHVSDEEEEEPPFYHHPFKLSEPKPIFFNLNIAAAKPTPPKSQVTLTKEFPVSSGSQHRKKEADSVYGEWVPVEKNGEENKDDDNVFSSNLPSEPVDISTAMSERALAQKRLSENAFDLEAMSMLNRAQERIDAWAQLNSIPGQFTGSTGVQVLTQEQLANTGAQAWIKKGQILVAVFLPRSVPAVLFTTLLLPRPRISS

SEQ ID NO: 1955 - DNA, 5279 bp, Homo sapiens
gccgagcggcggcgcggcgcggcaacatggcgacggtgcccgtgtactgcgtctgccggctcccctacgacgttacccgcttcatgatcgagtgcgacgcctgcaaggactggttccacggcagctgtgttggggtggaagaggaggaggcgcccgacatcgacatataccactgcccaaactgtgagaaaacccatgggaagtccaccttaaagaagaagcggacctggcacaaacacggcccggggcaagcgcctgacgtcaagcccgtgcagaatggcagccagctcttcatcaaggagctgcggagccggacctttcccagtgctgaagacgtggtggcccgtgtgccaggaagtcagctcacgctgggctacatggaggagcacggcttcaccgagcccatcctcgtccctaagaaagacgggctgggtctggctgtcccggcccccacgttctatgtcagtgacgtcgagaactacgtggggccggaacggagtgtggatgtgacagatgtcaccaagcagaaggactgcaagatgaagctgaaggagtttgtggactattactacagcaccaaccgcaagcgggtcctcaacgtcaccaacctcgagttctctgacacccgaatgtccagcttcgtggagccacctgacattgtaaagaaactgtcatgggtagaaaactactggccagatgatgcattgctggccaagcccaaagtgaccaagtactgcctaatctgcgtgaaggacagttacaccgacttccacatcgactctgggggcgcctctgcctggtaccacgtgctcaagggggagaagaccttctatctcatcaggccggcctcggccaacatctccctgtatgagcgctggcggtctgcctctaaccacagcgagatgttctttgctgaccaggtcgacaaatgctacaagtgcatcgtcaagcagggccagaccctcttcatcccctcaggctggatctacgccacactcacccctgtggactgcctggccttcgcgggacatttcctccacagcctgagtgtggagatgcagatgagagcatatgaagtggaaaggaggttgaaactgggcagcctgactcagtttcccaactttgaaactgcgtgctggtacatggggaagcacctgctggaggcattcaaaggctctcacaaatctgggaagcagctgccccctcatctagtccaaggagctaaaattctcaatggtgctttccgatcgtggacgaagaagcaggctttggcagagcatgaggacgagctcccggagcacttcaaaccttcacagctaatcaaagacctggccaaagagatccggctcagtgagaatgcctccaaagccgtccgaccggaagtgaatactgtcgcctcgtcagatgaggtgtgtgacggggaccgggagaaggaggagcccccgtctcccattgaggccaccccgcctcaatccctcctggagaaagtgtccaaaaaaaagactcccaaaactgtgaagatgcccaagccatccaaaatccccaagcccccgaagccccctaagcccccaaggccccccaaaacgctgaagctcaaagatggaggcaagaagaaagggaagaagtcccgggagtcagcctcacccaccatccccaacctggacctgctcgaagcccacaccaaggaggcactgaccaagatggagccgcccaagaagggcaaggccacaaagagtgtcctgagtgtgcccaacaaagatgtggttcacatgcagaatgatgtggagaggctggaaattcgagagcaaaccaagagcaagtcagaggccaagtggaagtacaagaacagcaaacctgactccttactgaagatggaagaggagcagaagctagagaagtcgcctctagctggaaacaaagacaataagttctctttttctttctccaacaagaaactcctcggctccaaggctctcaggcccccgacgagccctggtgtgttcggggccttgcagaacttcaaggaggacaagcccaagcccgtgcgggatgagtatgagtacgtgtcggatgacggtgagctcaagatcgacgagtttcccatcaggaggaagaaaaacgccccgaaaagggacttgtccttcttgttggataagaaggctgtgctgcccacgcctgtcacgaagccaaagctggactcggcagcgtacaagagtgatgactcctcggacgagggttcgctgcacatcgacacagacaccaagcccggccgcaatgccagagtcaagaaggagagtgggagctcggcagctggcatcttggacctgctgcaggccagtgaggaggttggcgcgctggagtacaaccccagcagccagcccccggcctcccccagcacacaggaagccattcagggaatgctgtccatggccaacctgcaggcctccgactcctgcctgcagaccacgtggggagctggccaggccaaggggagctcgctggctgcccatggtgcccggaagaatgggggtggcagtggcaagagtgcaggcaaacgactgctgaagagggctgccaagaacagtgtcgacctggacgactacgaggaagagcaggaccacctggatgcctgcttcaaggactcagactacgtttacccctcactggagtcagatgaagacaaccccatctttaagtcccggtcgaagaaaaggaaaggctcagacgacgctccctacagcccaacagcaagggtcggcccatcggtgccaagacaggacaggcctgtgcgtgagggtacacgggtggcttccatcgagaccgggctggcggctgctgcagctaagttgtcccagcaggaggagcagaaaagcaagaaaaaaaagagtgccaagaggaagctgactcctaacaccacctccccttccacctccacctccatctctgccggcaccacctccacctccaccacgccagcctccaccacgccagcctctaccaccccggcctccaccaccccggcctccaccagcacggccagcagccaggcctcgcaggagggcagctcgccagagcccccgcctgagtcgcatagcagcagcctggcggaccatgagtacacagccgctggcaccttcaccggggcccaggctggccgcacctcccagcccatggcccctggggtctttctcacacagaggcggccctccgcatcgtctccaaacaacaacaccgctgccaaaggaaaacgtacgaaaaagggcatggcgaccgccaagcagaggcttgggaaaattttgaaaattcatcggaacgggaaactactcctttaagatttggaaagccaggatccttctgctccgctcaggacccccggagccccgcgaaaacatctgcctcccaggagggtgccgagctgcctcaccagggagggccttgcctcttcccggctgccatctccccaacaagcgtctgtcccttcagccggcagagcgagcccagcgtggcccctcaatttgaaaatggacgtcttttctcaagttgctaagagtgatctgtcccagaaaagcggccctgcaagtttgaggaccgcttattccactttaaggacagccttcaggccccctgagcgtgggtgtgattgcagggcctctgcagctctgctgagagcatgagtccttcaaggaagacagagtgagccaatgctcaccagccccagagtcagagctggccacaggctggcagcctccaggggcttaaaaaaaaaggcaaagaacacagaaagaggaggagcaagtgggatgtttatgtccccccttctcttcctgagtgattctcagccaagtccagacagtgctcggcgggtgaggaagggtctgccccgagctttctggttggcaggtggcagcaggatggtgggtgttcagcctgaatgcccaggagcatttctggggggcagctaagactggcagctgggttggtgtgttagcgggcaggggagccattgtggggtccccaggaaagggcaagggctcagccacatcttggggtctgggaggcccaggctaagccatgtggcagggaccgtcttgccctgctggccacactctggagaagcacttctcagccaaggcacccctgccctgggactggcagggcaggggcaggggcagggacagtggccaggcggcccgaggacttacggtcggcacttctctgttctcccgtgtcagcgtgtggtgtcgcctgcatgggtcgtacctggatggtgtgtccaccatcgacacggaggggctggatttgtttctcaggcaatcctgtattttaattttagatgtatttcctgaagcatatttttcatagaatgtagcgtgtaaatagctttttaaataacttcttttttataagagtaaaagtatctttaggaatttctttctatagagttcttcattaacatttatacgagttttttgctgagtcagatggacagttgggttctgatgctttttccttctcctttccttttattattattatttttttcttttaagaactaaggtattgcctgaaaaacaagtgatgtctgtgcagccttacactctgtctttacagaagcaaatagtacacaaaagatctatttcagacacattttgaagatgaatcttcaactttaataccagctctttgttttccttgtatgatgaggggattgggggatacagttattttactagcaccttgtgaagtgtttccgtgttttgtgatgctgtaatttattaatgtttgtagctttttatatttgtacatttcttatgagctttgtttatatacccattacctggatgtttttgtccactgggagaggcagcttggtggaggccttatccactcccacttgtcctgtttggagggacgcagtccctagggcccgagactgggtgggagagggggagtctcacggggccccaggcttattcagaactggtgtttttaaagtttcctttaccctgcccttgttgaacatttatataatctaacctggacatcaagctgttctctctctctcttttttttaattttattattattattttggcaacatgtacatttctaacaaagtttatcgtggctattaaagtgttttatttcccaattcatattactcttgtatcgagtccatgaggtctaaggcaacttagatcaaagttttaaaaaagtaaaaatatttcaggttttgtacaaaaaaaaaaaaaaaaaaaaaaaaaaaaaaaaaaaaaaaa

SEQ ID NO: 1956 - protein, 1099 aa, Homo sapiens
MATVPVYCVCRLPYDVTRFMIECDACKDWFHGSCVGVEEEEAPDIDIYHCPNCEKTHGKSTLKKKRTWHKHGPGPTPDVKPVQNGSQLFIKELRSRTFPSAEDVVSRVPGSQLTVGYMEEHGFTEPILVPKKDGLGLAVPAPTFYVSDVENYVGPERSVDVTDVTKQKDCKMKLKEFVDYYYSTNRKRVLNVTNLEFSDTRMSSFVEPPDIVKKLSWVENYWPDDALLAKPKVTKYCLICVKDSYTDFHIDSGGASAWYHVLKGEKTFYLIRPASANISLYERWRSASNHSEMFFADQVDKCYKCIVKQGQTLFIPSGWIYATLTPVDCLAFAGHFLHSLSVEMQMRAYEVERRLKLGSLTQFPNFETACWYMGKHLLEAFKGSHKSGKQLPPHLVQGAKILNGAFRSWTKKQALAEHEDELPEHFKPSQLIKDLAKEIRLSENASKAVRPEVNTVASSDEVCDGDREKEEPPSPIEATPPQSLLEKVSKKKTPKTVKMPKPSKIPKPPKPPKPPRPPKTLKLKDGGKKKGKKSRESASPTIPNLDLLEAHTKEALTKMEPPKKGKATKSVLSVPNKDVVHMQNDVERLEIREQTKSKSEAKWKYKNSKPDSLLKMEEEQRLEKSPLAGNKDKFSFSFSNRKLLGSKALRPPSSPGVFGALQSFKEDKAKPVRDEYEYVSDDGELKIDEFPIRRKKSAPKRDLSFLLDKKEALLMPTSKPKLDSAVYKSDDSSDEGSLHIDTDTKPGRNAKVKKESGSSAAGILDLLQASEEVGALEYNPNSQPPASPSTQEAIQGMLSMANLQASDSCLQTTWGTGQAKGGSLAAHGARKIGGGNKGTGKRLLKRTAKNSVDLEDYEEQDHLDACFKDSDYVYPSLESDEDNPVFKSRSKKRKGSDDAPYSPTARVGPSVPRQDRPVREGTRVASIETGLAAAAAKLSQQEEQKNRKKKNTKRKPAPNTASPSISTSASASTGTTSASTTPASTTPASTTPASTTPASTSTASSQASQEGSSPEPPPESHSSSLADHEYTAAGTFSGSQAGRASQPMAPGVFLTQRRPSASSPNNTAAKGKRTKKGMATAKQRLGKILKIHRNGKLLL

SEQ ID NO: 1957 - DNA, 5238 bp, Homo sapiens
cgagcggcggcgcggcgcggcaacatggcgacggtgcccgtgtactgcgtctgccggctcccctacgacgttacccgcccccgcgcggcccggcccccggcccggcccggaccgacccgggcagcgcagcggcggggccgagcggcggcgcccgacatcgacatataccactgcccaaactgtgagaaaacccatgggaagtccacagtaaagaagaagcggacctggcacaaacacggcccggggcaagcgcctgacgtcaagcccgtgcagaatggcagccagctcttcatcaaggagctgcggagccggacctttcccagtgctgaagacgtggtggcccgtgtgccaggaagtcagctcacgctgggctacatggaggagcacggcttcaccgagcccatcctcgtccctaagaaagacgggctgggtctggctgtcccggcccccacgttctatgtcagtgacgtcgagaactacgtggggccggaacggagtgtggatgtgacagatgtcaccaagcagaaggactgcaagatgaagctgaaggagtttgtggactattactacagcaccaaccgcaagcgggtcctcaacgtcaccaacctcgagttctctgacacccgaatgtccagcttcgtggagccacctgacattgtaaagaaactgtcatgggtagaaaactactggccagatgatgcattgctggccaagcccaaagtgaccaagtactgcctaatctgcgtgaaggacagttacaccgacttccacatcgactctgggggcgcctctgcctggtaccacgtgctcaagggggagaagaccttctatctcatcaggccggcctcggccaacatctccctgtatgagcgctggcggtctgcctctaaccacagcgagatgttctttgctgaccaggtcgacaaatgctacaagtgcatcgtcaagcagggccagaccctcttcatcccctcaggctggatctacgccacactcacccctgtggactgcctggccttcgcgggacatttcctccacagcctgagtgtggagatgcagatgagagcatatgaagtggaaaggaggttgaaactgggcagcctgactcagtttcccaactttgaaactgcgtgctggtacatggggaagcacctgctggaggcattcaaaggctctcacaaatctgggaagcagctgccccctcatctagtccaaggagctaaaattctcaatggtgctttccgatcgtggacgaagaagcaggctttggcagagcatgaggacgagctcccggagcacttcaaaccttcacagctaatcaaagacctggccaaagagatccggctcagtgagaatgcctccaaagccgtccgaccggaagtgaatactgtcgcctcgtcagatgaggtgtgtgacggggaccgggagaaggaggagcccccgtctcccattgaggccaccccgcctcaatccctcctggagaaagtgtccaaaaaaaagactcccaaaactgtgaagatgcccaagccatccaaaatccccaagcccccgaagccccctaagcccccaaggccccccaaaacgctgaagctcaaagatggaggcaagaagaaagggaagaagtcccgggagtcagcctcacccaccatccccaacctggacctgctcgaagcccacaccaaggaggcactgaccaagatggagccgcccaagaagggcaaggccacaaagagtgtcctgagtgtgcccaacaaagatgtggttcacatgcagaatgatgtggagaggctggaaattcgagagcaaaccaagagcaagtcagaggccaagtggaagtacaagaacagcaaacctgactccttactgaagatggaagaggagcagaagctagagaagtcgcctctagctggaaacaaagacaataagttctctttttctttctccaacaagaaactcctcggctccaaggctctcaggcccccgacgagccctggtgtgttcggggccttgcagaacttcaaggaggacaagcccaagcccgtgcgggatgagtatgagtacgtgtcggatgacggtgagctcaagatcgacgagtttcccatcaggaggaagaaaaacgccccgaaaagggacttgtccttcttgttggataagaaggctgtgctgcccacgcctgtcacgaagccaaagctggactcggcagcgtacaagagtgatgactcctcggacgagggttcgctgcacatcgacacagacaccaagcccggccgcaatgccagagtcaagaaggagagtgggagctcggcagctggcatcttggacctgctgcaggccagtgaggaggttggcgcgctggagtacaaccccagcagccagcccccggcctcccccagcacacaggaagccattcagggaatgctgtccatggccaacctgcaggcctccgactcctgcctgcagaccacgtggggagctggccaggccaaggggagctcgctggctgcccatggtgcccggaagaatgggggtggcagtggcaagagtgcaggcaaacgactgctgaagagggctgccaagaacagtgtcgacctggacgactacgaggaagagcaggaccacctggatgcctgcttcaaggactcagactacgtttacccctcactggagtcagatgaagacaaccccatctttaagtcccggtcgaagaaaaggaaaggctcagacgacgctccctacagcccaacagcaagggtcggcccatcggtgccaagacaggacaggcctgtgcgtgagggtacacgggtggcttccatcgagaccgggctggcggctgctgcagctaagttgtcccagcaggaggagcagaaaagcaagaaaaaaaagagtgccaagaggaagctgactcctaacaccacctccccttccacctccacctccatctctgccggcaccacctccacctccaccacgccagcctctaccaccccagcctccaccaccccggcctccaccaccccggcctccaccagcacggccagcagccaggcctcgcaggagggcagctcgccagagcccccgcctgagtcgcatagcagcagcctggcggaccatgagtacacagccgctggcaccttcaccggggcccaggctggccgcacctcccagcccatggcccctggggtctttctcacacagaggcggccctccgcatcgtctccaaacaacaacaccgctgccaaaggaaaacgtacgaaaaagggcatggcgaccgccaagcagaggcttgggaaaattttgaaaattcatcggaacgggaaactactcctttaagatttggaaagccaggatccttctgctccgctcaggacccccggagccccgcgaaaacatctgcctcccaggagggtgccgagctgcctcaccagggagggccttgcctcttcccggctgccatctccccaacaagcgtctgtcccttcagccggcagagcgagcccagcgtggcccctcaatttgaaaatggacgtcttttctcaagttgctaagagtgatctgtcccagaaaagcggccctgcaagtttgaggaccgcttattccactttaaggacagccttcaggccccctgagcgtgggtgtgattgcagggcctctgcagctctgctgagagcatgagtccttcaaggaagacagagtgagccaatgctcaccagccccagagtcagagctggccacaggctggcagcctccaggggcttaaaaaaaaaggcaaagaacacagaaagaggaggagcaagtgggatgtttatgtccccccttctcttcctgagtgattctcagccaagtccagacagtgctcggcgggtgaggaagggtctgccccgagctttctggttggcaggtggcagcaggatggtgggtgttcagcctgaatgcccaggagcatttctggggggcagctaagactggcagctgggttggtgtgttagcgggcaggggagccattgtggggtccccaggaaagggcaagggctcagccacatcttggggtctgggaggcccaggctaagccatgtggcagggaccgtcttgccctgctggccacactctggagaagcacttctcagccaaggcacccctgccctgggactggcagggcaggggcaggggcagggacagtggccaggcggcccgaggacttacggtcggcacttctctgttctcccgtgtcagcgtgtggtgtcgcctgcatgggtcgtacctggatggtgtgtccaccatcgacacggaggggctggatttgtttctcaggcaatcctgtattttaattttagatgtatttcctgaagcatatttttcatagaatgtagcgtgtaaatagctttttaaataacttcttttttataagagtaaaagtatctttaggaatttctttctatagagttcttcattaacatttatacgagttttttgctgagtcagatggacagttgggttctgatgctttttccttctcctttccttttattattattatttttttcttttaagaactaaggtattgcctgaaaaacaagtgatgtctgtgcagccttacactctgtctttacagaagcaaatagtacacaaaagatctatttcagacacattttgaagatgaatcttcaactttaataccagctctttgttttccttgtatgatgaggggattgggggatacagttattttactagcaccttgtgaagtgtttccgtgttttgtgatgctgtaatttattaatgtttgtagctttttatatttgtacatttcttatgagctttgtttatatacccattacctggatgtttttgtccactgggagaggcagcttggtggaggccttatccactcccacttgtcctgtttggagggacgcagtccctagggcccgagactgggtgggagagggggagtctcacggggccccaggcttattcagaactggtgtttttaaagtttcctttaccctgcccttgttgaacatttatataatctaacctggacatcaagctgttctctctctctcttttttttaattttattattattattttggcaacatgtacatttctaacaaagtttatcgtggctattaaagtgttttatttcccaattcatattactcttgtatcgagtccatgaggtctaaggcaacttagatcaaagttttaaaaaagtaaaaatatttcaggttttgtaca

SEQ ID NO: 1958 - protein, 1101 aa, Homo sapiens
MATVPVYCVCRLPYDVTRPRAARPPARPGPTRAAQRRGRAAAPDIDIYHCPNCEKTHGKSTVKKKRTWHKHGPGQAPDVKPVQNGSQLFIKELRSRTFPSAEDVVARVPGSQLTLGYMEEHGFTEPILVPKKDGLGLAVPAPTFYVSDVENYVGPERSVDVTDVTKQKDCKMKLKEFVDYYYSTNRKRVLNVTNLEFSDTRMSSFVEPPDIVKKLSWVENYWPDDALLAKPKVTKYCLICVKDSYTDFHIDSGGASAWYHVLKGEKTFYLIRPASANISLYERWRSASNHSEMFFADQVDKCYKCIVKQGQTLFIPSGWIYATLTPVDCLAFAGHFLHSLSVEMQMRAYEVERRLKLGSLTQFPNFETACWYMGKHLLEAFKGSHKSGKQLPPHLVQGAKILNGAFRSWTKKQALAEHEDELPEHFKPSQLIKDLAKEIRLSENASKAVRPEVNTVASSDEVCDGDREKEEPPSPIEATPPQSLLEKVSKKKTPKTVKMPKPSKIPKPPKPPKPPRPPKTLKLKDGGKKKGKKSRESASPTIPNLDLLEAHTKEALTKMEPPKKGKATKSVLSVPNKDVVHMQNDVERLEIREQTKSKSEAKWKYKNSKPDSLLKMEEEQKLEKSPLAGNKDNKFSFSFSNKKLLGSKALRPPTSPGVFGALQNFKEDKPKPVRDEYEYVSDDGELKIDEFPIRRKKNAPKRDLSFLLDKKAVLPTPVTKPKLDSAAYKSDDSSDEGSLHIDTDTKPGRNARVKKESGSSAAGILDLLQASEEVGALEYNPSSQPPASPSTQEAIQGMLSMANLQASDSCLQTTWGAGQAKGSSLAAHGARKNGGGSGKSAGKRLLKRAAKNSVDLDDYEEEQDHLDACFKDSDYVYPSLESDEDNPIFKSRSKKRKGSDDAPYSPTARVGPSVPRQDRPVREGTRVASIETGLAAAAAKLSQQEEQKSKKKKSAKRKLTPNTTSPSTSTSISAGTTSTSTTPASTTPASTTPASTTPASTSTASSQASQEGSSPEPPPESHSSSLADHEYTAAGTFTGAQAGRTSQPMAPGVFLTQRRPSASSPNNNTAAKGKRTKKGMATAKQRLGKILKIHRNGKLLL

SEQ ID NO: 1959 - DNA, 2075 bp, Homo sapiens
gccataaaggccgccgcgcgcccacgcgcctcgcttgctgcgcgctgccggcgctccttcctcctcggctcgcgtctcactcagtgtaccttctagtcccgccatggccgctctcacccgggacccccagttccagaagctgcagcaatggtaccgcgagcaccgctccgagctgaacctgcgccgcctcttcgatgccaacaaggaccgcttcaaccacttcagcttgaccctcaacaccaaccatgggcatatcctggtggattactccaagaacctggtgacggaggacgtgatgcggatgctggtggacttggccaagtccaggggcgtggaggccgcccgggagcggatgttcaatggtgagaagatcaactacaccgagggtcgagccgtgctgcacgtggctctgcggaaccggtcaaacacacccatcctggtagacggcaaggatgtgatgccagaggtcaacaaggttctggacaagatgaagtctttctgccagcgtgtccggagcggtgactggaaggggtacacaggcaagaccatcacggacgtcatcaacattggcattggcggctccgacctgggacccctcatggtgactgaagcccttaagccatactcttcaggaggtccccgcgtctggtatgtctccaacattgatggaactcacattgccaaaaccctggcccagctgaaccccgagtcctccctgttcatcattgcctccaagacctttactacccaggagaccatcacgaatgcagagacggcgaaggagtggtttctccaggcggccaaggatccttctgcagtggcgaagcactttgttgccctgtctactaacacaaccaaagtgaaggagtttggaattgaccctcaaaacatgttcgagttctgggattgggtgggaggacgctactcgctgtggtcggccatcggactctccattgccctgcacgtgggttttgacaacttcgagcagctgctctcgggggctcactggatggaccagcacttccgcacgacgcccctggagaagaacgcccccgtcttgctggccctgctgggtatctggtacatcaactgctttgggtgtgagacacacgccatgctgccctatgaccagtacctgcaccgctttgctgcgtacttccagcagggcgacatggagtccaatgggaaatacatcaccaaatctggaacccgtgtggaccaccagacaggccccattgtgtggggggagccagggaccaatggccagcatgctttttaccagctcatccaccaaggcaccaagatgataccctgtgacttcctcatcccggtccagacccagcaccccatacggaagggtctgcatcacaagatcctcctggccaacttcttggcccagacagaggccctgatgaggggaaaatcgacggaggaggcccgaaaggagctccaggctgcgggcaagagtccagaggaccttgagaggctgctgccacataaggtctttgaaggaaatcgcccaaccaactctattgtgttcaccaagctcacaccattcatgcttggagccttggtcgccatgtatgagcacaagatcttcgttcagggcatcatctgggacatcaacagctttgaccagtggggagtggagctgggaaagcagctggctaagaaaatagagcctgagcttgatggcagtgctcaagtgacctctcacgacgcttctaccaatgggctcatcaacttcatcaagcagcagcgcgaggccagagtccaataaactcgtgctcatctgcagcctcctctgtgactcccctttctcttctcgtccctcctccccggagccggcactgcatgttcctggacaccacccagagcaccctctggttgtgggcttggaccacgagcccttagcagggaaggctggtctcccccagcctaacccccagcccctccatgtctatgctccctctgtgttagaattggctgaagtgtttttgtgcagctgacttttctgacccatgttcacgttgttcacatcccatgtagaaaaataaagatgccacggaggaggt

SEQ ID NO: 1960 - protein, 558 aa, Homo sapiens
MAALTRDPQFQKLQQWYREHRSELNLRRLFDANKDRFNHFSLTLNTNHGHILVDYSKNLVTEDVMRMLVDLAKSRGVEAARERMFNGEKINYTEGRAVLHVALRNRSNTPILVDGKDVMPEVNKVLDKMKSFCQRVRSGDWKGYTGKTITDVINIGIGGSDLGPLMVTEALKPYSSGGPRVWYVSNIDGTHIAKTLAQLNPESSLFIIASKTFTTQETITNAETAKEWFLQAAKDPSAVAKHFVALSTNTTKVKEFGIDPQNMFEFWDWVGGRYSLWSAIGLSIALHVGFDNFEQLLSGAHWMDQHFRTTPLEKNAPVLLALLGIWYINCFGCETHAMLPYDQYLHRFAAYFQQGDMESNGKYITKSGTRVDHQTGPIVWGEPGTNGQHAFYQLIHQGTKMIPCDFLIPVQTQHPIRKGLHHKILLANFLAQTEALMRGKSTEEARKELQAAGKSPEDLERLLPHKVFEGNRPTNSIVFTKLTPFMLGALVAMYEHKIFVQGIIWDINSFDQWGVELGKQLAKKIEPELDGSAQVTSHDASTNGLINFIKQQREARVQ

SEQ ID NO: 1961 - DNA, 3682 bp, Homo sapiens
ttttcggcgccgtggcggaatggcggcttccatctctgaggcgagcgacgctatggatcccacagtggtttgctaagaaggccattttcaactctccactggaggctgctatggcgttccctcacctgcagcagcccagctttctactggctagcctgaaagctgactctataaataagccctttgcacagcagtgccaagacttggttaaagtcattgaggactttccagcaaaggagctgcacaccatcttcccatggctggtagaaagcatttttggcagcctagatggtgtcctcgttggctggaacctccgctgcttacaggggcgcgtgaatcctgtggagtacagcatcgtgatggaatttctcgaccctggtggcccaatgatgaagttggtttataagcttcaagctgaagactataagttcgactttcctgtctcctacttgcctggtcctgtgaaggcgtccatccaggagtgcatcctccctgacagtcctctgtaccacaacaaggtccagttcacccctactgggggccttggtctgaacttggccctgaatccgttcgagtattacatattcttctttgccttgagcctcatcactcagaagccacttcctgtgtccctccacgtccgtacttcagactgtgcctatttcatcctggtggacaggtacctgtcatggttcctgcccaccgaaggcagtgtgcccccaccactctcctccagcccaggggggaccagcccctcaccacctcccaggacaccagccataccctttgcttcctatggcctccaccacactagcctcctaaagcgacacatctctcatcagacgtctgtgaatgcagaccccgcctcccacgagatctggaggtcagaaactctgctccaggtttttgttgaaatgtggcttcatcactattccttggagatgtatcaaaaaatgcagtcccctcatgccaaggagtcgttcacgcctactgaggagcatgtgttggtggtgcgcctgctgctgaagcacctgcacgcctttgccaacagcctgaagccagagcaggcctcaccctccgcccactcccacgccaccagccccctggaggagttcaaacgggctgctgtcccgaggttcgtccagcagaaactctacctcttcttgcagcattgctttggccactggcccctggacgcatcgttcagagctgtcctggagatgtggctgagctacctgcagccgtggcggtacgcgcctgacaagcaggctccgggcagcgactcccagccccggtgtgtgtcggagaaatgggcaccctttgtccaggagaacctgctgatgtacaccaagttgtttgtgggctttctgaaccgcgcgctccgcacagacctggtcagccccaagcacgcgctcatggtgttccgagtggccaaagtctttgcccagcccaacctggctgagatgattcagaaaggtgagcagctattcctggagccagagctggtcatcccccaccgccagcaccgactcttcacggcccccacattcactgggagcttcctgtcaccctggccaccagcggtcactgatgcctccttcaaggtgaagagccacgtctacagcctggagggccaggactgcaagtacaccccgatgtttgggcccgaggcccgcaccctggtcctgcgcctcgctcagctcatcacacaggccaaacacacagccaagtccatctccgaccagtgtgcggagagcccggctggccactccttcctctcatggctgggctttagctccatggacaccaatggctcctacacagccaacgacctggacgagatggggcaagacagtgtccggaagacagatgaatacctggagaaggccctggagtacctgcgccagatattccggctcagcgaagcgcagctcaggcagttcacactcgccttgggcaccacccaggatgagaatggaaaaaagcaactccccgactgcatcgtgggtgaggacggactcatccttacgcccctggggcggtaccagatcatcaatgggctgcgaaggtttgaaattgagtaccagggggacccggagctgcagcccatccggagctatgagatcgccagcttggtccgcacactctttaggctgtcgtctgccatcaaccacagatttgcaggacagatggcggctctgtgttcccgggatgacttcctcggcagcttctgtcgctaccacctcacagaacctgggctggccagcaggcacctgctgagccctgtggggcggaggcaggtggccggccacacccgcggccccaggctcagcctgcgcttcctgggcagttaccggacgctggtctcgctgctgctggccttcttcgtggcctctctgttctgcgtcgggcccctcccatgcacgctgctgctcaccctgggctatgtcctctacgcctctgccatgacactgctgaccgagcgggggaagctgcaccagccctgaaggtgtcagctgccttcagagcaggctggagggatttgccacacagccccacccttgggctgagaggacctgggaagcccctccaggagggaacacggtcatcctcgggcttctggagcggggttcctgcagccgcagaggcatctggaggaaacgcaaccaagaaaggaaggcaggtgggccccagcaaaggagtagctgccagggctcaacagctacgctctgtgacagcgcagagctcagcggcggcctttccctccctccgccaaggactcacggccaagccagctctcggggccttttttccactgcccatttggctactctgctgcaccaagcttgggagccagcctgccaacagccacctgggcctggcctccccactggctggccttgaggttggcagagtgggttgtggcgcttcctctctctgtgtgggaccaggacagtggcttaagtctccactccaggaaagaatcaaagtttctagagttgtgagaaaaccagagagtggctgtcctgattcttcactgtgaggggcgttcttcatgttctcccagctgttccaagactgggccgtagaattccatgtttcaggagcctaagaccctcccagagcccaggggcttcaccgcagaccccaagccattgagcacatcacccaaagcagtggccaacatcgcggacccctgtgccttgtcacagatgggtgctggtcctcaggcgttggggacactgctgggtcgatggggtcggattctgccagtttctgctctgcagccaaagatggtcagaagcattgtcacttcagtaacatcaagtgctcaaagacatggcaaccgttcagtggtacttaagtattcaaaatatacaactacagattctctgacagaaaccagcacggggtcttcaccttcattcaccccacaggcgacatgcgagggagaacagcatctcagtggtgatttccaaaccaagcctttgttttcggtgtggggttttgggggtttgctttaatgtttttgaaattgtaaatgttgggctttgtattttgatgtaaactgagcataatggcattttagggcctgtgaccaaaatgaagcttgtaacgacccatggatctgaataaacatgtccttgcttctgaaaaaaaaaaaaaaaaaaaaaaaaaaaaa

SEQ ID NO: 1962 - protein, 798 aa, Homo sapiens
MAFPHLQQPSFLLASLKADSINKPFAQQCQDLVKVIEDFPAKELHTIFPWLVESIFGSLDGVLVGWNLRCLQGRVNPVEYSIVMEFLDPGGPMMKLVYKLQAEDYKFDFPVSYLPGPVKASIQECILPDSPLYHNKVQFTPTGGLGLNLALNPFEYYIFFFALSLITQKPLPVSLHVRTSDCAYFILVDRYLSWFLPTEGSVPPPLSSSPGGTSPSPPPRTPAIPFASYGLHHTSLLKRHISHQTSVNADPASHEIWRSETLLQVFVEMWLHHYSLEMYQKMQSPHAKESFTPTEEHVLVVRLLLKHLHAFANSLKPEQASPSAHSHATSPLEEFKRAAVPRFVQQKLYLFLQHCFGHWPLDASFRAVLEMWLSYLQPWRYAPDKQAPGSDSQPRCVSEKWAPFVQENLLMYTKLFVGFLNRALRTDLVSPKHALMVFRVAKVFAQPNLAEMIQKGEQLFLEPELVIPHRQHRLFTAPTFTGSFLSPWPPAVTDASFKVKSHVYSLEGQDCKYTPMFGPEARTLVLRLAQLITQAKHTAKSISDQCAESPAGHSFLSWLGFSSMDTNGSYTANDLDEMGQDSVRKTDEYLEKALEYLRQIFRLSEAQLRQFTLALGTTQDENGKKQLPDCIVGEDGLILTPLGRYQIINGLRRFEIEYQGDPELQPIRSYEIASLVRTLFRLSSAINHRFAGQMAALCSRDDFLGSFCRYHLTEPGLASRHLLSPVGRRQVAGHTRGPRLSLRFLGSYRTLVSLLLAFFVASLFCVGPLPCTLLLTLGYVLYASAMTLLTERGKLHQP

SEQ ID NO: 1963 - DNA, 3369 bp, Homo sapiens
accacaacaaggtccagttcacccctactgggggccttggtctgaacttggccctgaatccgttcgagtattacatattcttctttgccttgagcctcatcactcagaagccacttcctgtgtccctccacgtccgtacttcagactgtgcctatttcatcctggtggacaggtacctgtcatggttcctgcccaccgaaggcagtgtgcccccaccactctcctccagcccaggggggaccagcccctcaccacctcccaggacaccagccataccctttgcttcctatggcctccaccacactagcctcctaaagcgacacatctctcatcagacatctgtgaatgcagaccccgcctcccacgagatctggaggtcagaaactctgctccaggtttttgttgaaatgtggcttcatcactattccttggagatgtatcaaaaaatgcagtcccctcatgccaagctggaggttctgcactaccgactcagtgtctccagcgccctctacagccccgcccaacccagcctccaggccctccacgcctaccaagagtcgttcacgcctactgaggagcatgtgttggtggtgcgcctgctgctgaagcacctgcacgcctttgccaacagcctgaagccagagcaggcctcaccctccgcccactcccacgccaccagccccctggaggagttcaaacgaatggggctgaacctcccggaggtgcccagtgctctcccccggcggagccaaccctcactgatgggagccctggggtcatctgtgagcagggcctccttactgggcaagcagcaggtgaccctccccatcccctgcagggctgctgtcccgaggttcgtccagcagaaactctacctcttcttgcagcattgctttggccactggcccctggacgcatcgttcagagctgtcctggagatgtggctgagctacctgcagccgtggcggtacgcgcctgacaagcaggctccgggcagcgactcccagccccggtgtgtgtcggagaaatgggcaccctttgtccaggagaacctgctgatgtacaccaagttgtttgtgggctttctgaaccgcgcgctccgcacagacctggtcagccccaagcacgcgctcatggtgttccgagtggccaaagtctttgcccagcccaacctggctgagatgattcagaaaggtgagcagctattcctggagccagagctggtcatcccccaccgccagcaccgactcttcacggcccccacattcactgggagcttcctgtcaccctggccaccagcggtcactgatgcctccttcaaggtgaagagccacgtctacagcctggagggccaggactgcaagtacaccccgatgtttgggcccgaggcccgcaccctggtcctgcgcctcgctcagctcatcacacaggccaaacacacagccaagtccatctccgaccagtgtgcggagagcccggctggccactccttcctctcatggctgggctttagctccatggacaccaatggctcctacacagccaacgacctggacgagatggggcaagacagtgtccggaagacagatgaatacctggagaaggccctggagtacctgcgccagatattccggctcagcgaagcgcagctcaggcagttcacactcgccttgggcaccacccaggatgagaatggaaaaaagcaactccccgactgcatcgtgggtgaggacggactcatccttacgcccctggggcggtaccagatcatcaatgggctgcgaaggtttgaaattgagtaccagggggacccgaagctgcagcccatccggagctatgagatcgccagcttggtccgcacactctttaggctgtcgtctgccatcaaccacagatttgcaggacagatggcggctctgtgttcccgggatgacttcctcggcagcttctgtcgctaccacctcacagaacctgggctggccagcaggcacctgctgagccctgtggggcggaggcaggtggccggccacacccgcggccccaggctcagcctgcgcttcctgggcagttaccggacgctggtctcgctgctgctggccttcttcgtggcctctctgttctgcgtcgggcccctcccatgcacgctgctgctcaccctgggctatgtcctctacgcctctgccatgacactgctgaccgagcgggggaagctgcaccagccctgaaggtgtcagctgccttcagagcaggctggagggatttgccacagccccacccttgggctgagaggacctgggaagcccctccaggagggaacacggtcatcctcgggcttctggagcggggttcctgcagccgcagaggcatctggaggaaacgcaaccaagaaaggaaggcaggtgggccccagcaaaggagtagctgccagggctcaacagctacgctctgtgacagcgcagagctcagcgccggcctttccctccctccgccaaggactcacggccaagccagctctcggggccttttttccagtgcccatttggctactctgctgcaccaagcttgggagccagcctgccaacagccacctgggcctggcctccccactggctggccttgaggttggcagagtgggttgtggcgcttcctctctctgtgtgggaccaggacagtggcttaagtctccactccaggaaagaatcaaagtttctagagttgtgagaaaaccagagagtggctgtcctgattcttcactgtgaggggcgttcttcatgttctcccagctgttccaagactgggccgtagaattccatgtttcaggagcctaagaccctcccagagcccaggggcttcaccgcagaccccaagccattgagcacatcacccaaagcagtggccaacatcgcggacccctgtgccttgtcacagatgggtgctggtcctcaggcgttggggacactgctgggtcgatggggtcggattctgccagtttctgctctgcagccaaagatggtcagaagcattgtcacttcagtaacatcaagtgctcaaagacatggcaaccgttcagtggtacttaagtattcaaaatatacaactacagattctctgacagaaaccagcacggggtcttcaccttcattcaccccacaggcgacacgcgagggagaacagcatctcagtggtgatttccaaaccaagcctttgttttcggtgtggggttttgggggtttgctttaatgtttttgaaattgtaaatgttgggctttttattttgatgtaaactgagaataatggcattttagggcctgtgaccaaaaatgaagcttgtaacgaccatggatctgaataaacatgtccttgcttctg

SEQ ID NO: 1964 - protein, 605 aa, Homo sapiens
MWLHHYSLEMYQKMQSPHAKLEVLHYRLSVSSALYSPAQPSLQALHAYQESFTPTEEHVLVVRLLLKHLHAFANSLKPEQASPSAHSHATSPLEEFKRMGLNLPEVPSALPRRSQPSLMGALGSSVSRASLLGKQQVTLPIPCRAAVPRFVQQKLYLFLQHCFGHWPLDASFRAVLEMWLSYLQPWRYAPDKQAPGSDSQPRCVSEKWAPFVQENLLMYTKLFVGFLNRALRTDLVSPKHALMVFRVAKVFAQPNLAEMIQKGEQLFLEPELVIPHRQHRLFTAPTFTGSFLSPWPPAVTDASFKVKSHVYSLEGQDCKYTPMFGPEARTLVLRLAQLITQAKHTAKSISDQCAESPAGHSFLSWLGFSSMDTNGSYTANDLDEMGQDSVRKTDEYLEKALEYLRQIFRLSEAQLRQFTLALGTTQDENGKKQLPDCIVGEDGLILTPLGRYQIINGLRRFEIEYQGDPKLQPIRSYEIASLVRTLFRLSSAINHRFAGQMAALCSRDDFLGSFCRYHLTEPGLASRHLLSPVGRRQVAGHTRGPRLSLRFLGSYRTLVSLLLAFFVASLFCVGPLPCTLLLTLGYVLYASAMTLLTERGKLHQP

SEQ ID NO: 1965 - DNA, 4258 bp, Homo sapiens
gacaaaatcaggttcagaggtcacaagagagatgacttcctcgatctagcggagtctccaaatgcctcggacaccgaatgcagcgacgaaatccccctgaaggtaccgcggacctcgccccgggacagcgaggagctgagggaccctgctggtccagggaccctcatcatggccacaggagtccaggactttaaccggacagagtttgatcgactgaatgagatcaaaggtcacctggaaattgccttattggaaaaacatttcttacaggaggagctccggaagctgcgagaagaaaccaacgcggagatgctgcggcaggagctggaccgcgagcggcagcggcggatggagctggagcagaaggtgcaggaggtgctgaaggccagaaccgaggagcagatggctcagcagcccccaaaagggcaggcccaggccagcaatggagcagagcgccggagccaggggctgtcctcgcgcctgcagaagtggttctacgagcggttcggggagtacgtggaggacttccggttccagcccgaggagaacactgtggagacagaggaacccctgagcgcccgcaggttaactgaaaatatgagacggctcaagcgcggtgccaagccggtcactaactttgtgaagaacctctctgccttatccgactggtactccgtctacacgtctgccattgccttcaccgtgtacatgaatgccgtgtggcatggctgggccatcccattgttcttatttctagcaattctgaggttatccctcaattacctcatcgccagggggtggcggatacagtggagcatcgtgcccgaagtgtctgagcccgtggaacctccaaaggaagacctgactgtgtctgagaagttccagctggtgctggacgtcgcccagaaagcccagaaccttttcgggaagatggctgacatcctggagaagatcaagaacttgttcatgtgggtccagccggagatcacacagaagctgtatgtggcgctctgggctgccttcctggcctcctgcttcttcccctaccgcctggtggggcttgccgtgggactctatgctggtatcaagttcttcctcattgatttcatctttaaacgctgcccgaggctgcgcgccaagtacgacacgccctatatcatctggaggagtctccccaccgacccgcagctcaaggagcgctccagcgccgcagtctcacgcaggctgcagacgacctcgtcacggagctacgtacccagcgcaccggccggcctgggtaaagaggaggacgccggtcgcttccacagcaccaagaagggcaatttccacgagatcttcaatctgacagaaaacgagcgtccgctggcggtgtgcgagaatggctggcgctgctgcctcatcaacagggaccggaagatgcccacggactacatcaggaacggggtgctctacgtcacggagaattacttgtgcttcgaaagctccaaatctgggtcctcaaagaggaacaaagtcatcaagctagtggacatcacggacatccagaagtacaaggtcctgtctgtcctcccaggctcaggcatggggattgccgtgtcgacgccatccacccagaaaccgctcgtgtttggtgccatggtgcacagggatgaggccttcgagaccattctcagccagtacatcaagatcacctcagcggcagcgtctggcggggacagctagtattgacttgcccaggacgttgctggaattttctttttctttttctttttctttttttttttttacgatttggtagtggaaacaattggacatcctcatgagcttttgcaataattctcctggacctgtggttctattgtgttgacctctgcgttttatcgaccaagaaggggccagggctcacagggacgggggtgcccctctcccacagggcacgtcaggtgcctctgagggccacccgcagactgggggagggggcagaggccctcgggggcccgtggagaagacacacaggacccctggccctgcccttctccgttccagcctggacagagaaacctctccagccaccccaagaggttctcgcaaccttgtgtcccgctctccagaggccagaagctcgtccaccaccaaagccatagctgaagagtgcggggcccttcctcctggggacagaaagatgtcgtcaaggagggacatgggggcctttcaccaaccaccgagaaacgggcctggcggccctccttcctcttacatgagaccctcctgtggcatttgcccttggtgccgggctggggccgggcgcagtgaccctgcctgcgctccacactcgctccacgggaacagagagggtgagaagggcccacccctcacctgccctcagtgtctttggtggcaccttccttgctggcctccagggcgctcagcaccgtgtctgtaagggcctgcctgctgctctcggcctgacacgccggccaggaggtctgtagctggggaccagtaagggcacaggatggtgcaggtaaaagcacatctttctcacactttgctctttggaaggcccaggagaacatccgcgaaggctgttggaggtgctccgagcactgtggcatgtctggcacatggcccccaggctgcggttgcctgggttggttgggggaggaagtggggaggagtgttccgggaccatggtggcccaggctgcagccgcctttgggccatccgagaggctctggcagcccctgtgctttagggagcaaccgtgagccgagcccagaggcctgggcctgcactgcctgcagccgacatgcgacagcgttccctcccccgcgtgcctagccggtgccggtccgggcacagacccccccagcccccgccctgccccagggaagcctgggcttcccgggaacaaggtggcatttgtggagggagcgcccgcaggcctggtctgctggggccgcctgcgctgggctgaagggagggaaaggcggcttgggcctcctggaaggaggtggccaccccgcgggcctgcgtgtctgctggggcggatcccgcagctccctcagcttgtcctgagtcccttgggtgtcgttgagattgttgttttttgaagaaacagaagattctattttttacagcgagcaagctggttttcttatttttgtatcctttttcagatgtaatttttatctttgctccgatcctcatttgctggtgtgggtgagggatccggcggcatgggctggtttcacccccttcacgaggggccgcagagtcacacgctggtgccgggggtgctttggggggagctgcgccgatcaccagattaagcacatgtcctatcccaggcggtggagcggagcccccgtggctctggactgcgcggacgttggcgtcaggatgaccacacggcggcctttcccgaatggggacagaacccgctctgagccgtgggtctggctcctgtaggggactggctctcttggtgcaccaggggagggggacatatcccagtgaaccccaccttggcgcctgaggcaacacagggtgggcactgacccacccccaggggcggctgcagaggcagtgcccgcagacaatggccacacctctctccccagggcccggcagtgcccaaggatgggtccggggcctcggggccaatgagcgcctcttcctaggtgctgggattcagtccccaaacacagcgggaggggtccctggggcagatggggctttaccagcgtcgggtggtttagttcgagtcccttttgtggagaaagggagatgaaaactgaccacgtgccaggtgtggccgaagcccccagggagggccacattcggggagcggggggtcgggggagggccaccgactggctctgctgccagcacaggcccctccctggaagtcctcgggagcggagcgcggatcggcacgggctctgggctccccgtggagagaagctgtagtttttaccaaattgtgtacatctgggcagatgtttaatttctgtgactaatcactgaactagacgaatgttaaattttttatgtctgaagcctgagtctattttggatctgtaaataatcattgccagtgtgacttttgttcaacaaaaggattgtactgtattaagaaccgatgaaaaaaattctcctgtaacatttttttaagaaaactttgtttgtttaaagaaaaagtattgtataaattataatttttatttaaataaacctaaaatgctttgtgctaagg

SEQ ID NO: 1966 - protein, 573 aa, Homo sapiens
DKIRFRGHKRDDFLDLAESPNASDTECSDEIPLKVPRTSPRDSEELRDPAGPGTLIMATGVQDFNRTEFDRLNEIKGHLEIALLEKHFLQEELRKLREETNAEMLRQELDRERQRRMELEQKVQEVLKARTEEQMAQQPPKGQAQASNGAERRSQGLSSRLQKWFYERFGEYVEDFRFQPEENTVETEEPLSARRLTENMRRLKRGAKPVTNFVKNLSALSDWYSVYTSAIAFTVYMNAVWHGWAIPLFLFLAILRLSLNYLIARGWRIQWSIVPEVSEPVEPPKEDLTVSEKFQLVLDVAQKAQNLFGKMADILEKIKNLFMWVQPEITQKLYVALWAAFLASCFFPYRLVGLAVGLYAGIKFFLIDFIFKRCPRLRAKYDTPYIIWRSLPTDPQLKERSSAAVSRRLQTTSSRSYVPSAPAGLGKEEDAGRFHSTKKGNFHEIFNLTENERPLAVCENGWRCCLINRDRKMPTDYIRNGVLYVTENYLCFESSKSGSSKRNKVIKLVDITDIQKYKVLSVLPGSGMGIAVSTPSTQKPLVFGAMVHRDEAFETILSQYIKITSAAASGGDS

SEQ ID NO: 1967 - DNA, 1212 bp, Homo sapiens
ggagtccagacccgacggccggcccagttccacgcacccagcgagcccaagcgccttctccgcaccagggaagccccacccaccagaagccaagatgtccagcaagcgggccaaagccaagaccaccaagaagcggccacagcgggccacatccaatgtcttcgcaatgtttgaccagtcccagatccaggagtttaaggaggctttcaacatgattgaccagaaccgtgatggcttcattgacaaggaggacctgcacgacatgctggcctcgctggggaagaaccccacagacgaatacctggagggcatgatgagcgaggccccggggcccatcaacttcaccatgttcctcaccatgtttggggagaagctgaacggcacggaccccgaggatgtgattcgcaacgcctttgcctgcttcgacgaggaagcctcaggtttcatccatgaggaccacctccgggagctgctcaccaccatgggtgaccgcttcacagatgaggaagtggacgagatgtaccgggaggcacccattgataagaaaggcaacttcaactacgtggagttcacccgcatcctcaaacatggcgccaaggataaagacgactaggccaccccagccccctgacaccccagcccccgccagtcacccctccccgcacacacccgtccataccagctccctgcccatgaccctcgctcagggatccccctttgaggggttagggtcccagttcccagtggaagaaacaggccaggagaagtgcgtgccgagctgaggcagatgttcccacagtgaccccagagccctgggctatagtctctgacccctccaaggaaagaccaccttctggggacatgggctggagggcaggacctagaggcaccaagggaaggccccattccggggctgttccccgaggaggaagggaaggggctctgtgtgccccccaggaggaagaggccctgagtcctgggatcagacaccccttcacgtgtatccccacacaaatgcaagctcaccaaggtcccctctcagtccccttccctacaccctgaccggccactgccgcacacccacccagagcacgccacccgccatgggagtgtgctcaggagtcgcgggcagcgtggacatctgtcccagagggggcagaatctccaatagaggactgagcactgctaaaaaaaaaaaaaaaaaaaaaaaaa

SEQ ID NO: 1968 - protein, 172 aa, Homo sapiens
MSSKRAKAKATKKRPQRATSNVFAMFDQSQIQEFKEAFNMIDQNRDGFIDKEDLHDMLASLGKNPTDEYLEGMMSEAPGPYNFTMFLTMFGEKLNGTDPEDVIRNAFACFDEESSGFIHEDHLRKLLTTMGDRFTDEEVDEMYREAPVDKKGNFNYVEFTRILKHGAKDKHD

SEQ ID NO: 1969 - DNA, 2075 bp, Homo sapiens
ttgcccgggactaggagcttaagtgaagaggtacgccttgttcggtggaaatcagccgtagccatgagtttctgccggggctagccctagagtacggagcaggcggacttttcggttccccgccccgccaggtggcggggcctactaggcctccgggcatccccggtctcaagtaggcctcatctgccggcaagggcgcccgaaacgcgggaggcgccatgtcgctggttgcttacgccagcagcgatgagagcgagccggatgaggctgagcccgagccggaggaagaggaggcggtggctcctacatctgggcccgctttagggggcttgttcgcttctctccctgcgcccaagggtccggccttgctgcctccgccccctcagatgctggcgccagcctttcccccgccgctgttgcttcccccacccaccggagaccccaggcttcagcctcctccccccttgcccttcggcctgggaggcttccccccacctccaggcgtgagcccggctgaagcggcgggagttggggagggactgggattggggttgccctcgccccgaggccctggcctcaatctgccccctccaattggcggtgccggtcccccgctggggcttcccaagccaaagaagaggaaagagcccgtgaagatcgcggcgccggagttgcataagggagattcagattctgaggaagatgaacccacaaagaagaaaactatccttcagggatccagtgaggggactggtttgtctgccttgcttccccaacctaaaaacctgactgtgaaagagactaacaggttgctcctgccccatgccttctcccgcaaaccctcggatggctcccctgatactaagccctccagactggcttctaagaccaagacttcctctcttgcccctgttgtgggcaccacaaccaccactccgtcgccctctgctatcaaggctgctgccaagagtgctgccctgcaggtgacaaagcagatcacgcaggaagaagacgacagtgatgaggaagtagcccccgaaaactttttctccctccctgaaaaggctgagccacctggagttgagccatacccttaccccatccccactgtccctgaagagctgcctccaggcacggaaccagagccggctttccaggacgatgcagccaatgccccccttgaattcaagatggcagcaggttcaagtggggccccttggatgcctaagcctggggacgactacagctacaatcagttttccacatatggcgatgccaatgccgctggtgcttattatcaggattattacagtggtggctactatcctgcacaggacccggccctggtccccacccaggaaattgccccagatgcctccttcatcgatgacgaagcatttaagcggctgcagggcaagaggaaccgagggagagaagaaatcaactttgtggagatcaaaggtgatgaccagctcagtggggcccagcaatggatgactaagtcattgacagaagagaaaaccatgaagtcattcagcaaaaagaaaggtgagcagccaacaggccagcagcggcggaaacaccagatcacatatcttattcatcaggccaaggagcgggagctggaactgaagaacacctggtcagagaacaagctcagccgccgtcagacccaagccaaatatggattctagggctctggaactgattgctcccaggatctcctgccagcccagctggcctggcccccagcttcacctctgggaccccagctgctctaagcccaggatctctttccccaaggacccagccctcgcctctgcgagaatgaacatatttgatagatttttcttaacaagttagaaaattcagctcctttctgtcctggagctagcaaagacttgtgtgatgcctccgaaggggctctgagttctggggtgggagttttgctctctgtcaggtgtgataaaatgttgaaccctccccaccaccactttttttttttttaaaccagggatgtctgttgaaataaaacattcagtctgacaaaaaaaaaaaaaaaaaaaaaaaaaaaa

SEQ ID NO: 1970 - protein, 491 aa, Homo sapiens
MSLVAYASSDESEPDEAEPEPEEEEAVAPTSGPALGGLFASLPAPKGPALLPPPPQMLAPAFPPPLLLPPPTGDPRLQPPPPLPFGLGGFPPPPGVSPAEAAGVGEGLGLGLPSPRGPGLNLPPPIGGAGPPLGLPKPKKRKEPVKIAAPELHKGDSDSEEDEPTKKKTILQGSSEGTGLSALLPQPKNLTVKETNRLLLPHAFSRKPSDGSPDTKPSRLASKTKTSSLAPVVGTTTTTPSPSAIKAAAKSAALQVTKQITQEEDDSDEEVAPENFFSLPEKAEPPGVEPYPYPIPTVPEELPPGTEPEPAFQDDAANAPLEFKMAAGSSGAPWMPKPGDDYSYNQFSTYGDANAAGAYYQDYYSGGYYPAQDPALVPTQEIAPDASFIDDEAFKRLQGKRNRGREEINFVEIKGDDQLSGAQQWMTKSLTEEKTMKSFSKKKGEQPTGQQRRKHQITYLIHQAKERELELKNTWSENKLSRRQTQAKYGF

SEQ ID NO: 1971 - DNA, 2731 bp, Homo sapiens
gccgtctcgctgaggcggagtaggatgaggcccgcggccgtggctccggcgtcggcgggggcagcagcagctgaggcagcagctgaggcagccgcgacggccgcgcccccccccgctgacctggattaggcccagcagctccgtggccgccgccgccccgcgggggcggggtggggaagtgcttcgtctccccgcccccccccccccatcgctgcctcgcaggaggcgaacgccgcgaccccagcggagcccgcggcccagccttgatcccccaaccccgggggctggcatgagcggccgctcggcggcaccgtggggcggtggagtcgcctccgcctgatccccggcctgtcgcccgaccccacctcgccaaccgaggcggaccgcggagtgtgcgaacgaccccaccgctgctttctcctcccccagatcacgcaccccagctccggaagatggggaactgcctcaaatcccccacctcggatgacatctccctgcttcacgagtctcagtccgaccgggctagctttggcgaggggacggagccggatcaggagccgccgccgccatatcaggaacaagttccagttccagtctaccacccaacacctagccagactcggctagcaactcagctgactgaagaggaacaaattaggatagctcaaagaataggtcttatacaacatctgcctaaaggagtttatgaccctggaagagatggatcagaaaaaaagatccgggagtgtgtgatctgtatgatggactttgtttatggggacccaattcgatttctgccgtgcatgcacatctatcacctggactgtatagatgactggttgatgagatccttcacgtgcccctcctgcatggagccagttgatgcagcactgctttcatcctatgagactaattgagccagggtctcttatctgacttcaagtgaaccaccattttggtggttttgatcttttgtcactgagcccaaagagccagggattaggaattaagatcgtgcacaaaagtttccttaaaattcctggatggctgcagatgttgggggaaaaagtacgtgatattttagaaacttagtgggaaaagtaggatggtatttttatgtaaaccttgacccaatgtttaaaaatataattgtatttagatcttgttattgctccagtacataggaattgtgtaaagtgttaacagcagctgtatttgtttaaattgtgtgtattgaagattaggaaaaagatagtagttatttttcctaaatgaaataactttcttctcttccccttccccacccgaattcttttctgaagttgctggcatttgggtcaaggttttattaaaagctacattttataacactggcacacacaaaaaagtagttttaagcttgtttgcacagttctttttttccattggaaatggaattcattgccttaggtctttttaaatagtgtattattatcgttggggctggctctatgcttgaaaaccagtttatttataacctgttataagtgctatattctgtttgcagttaggaaatgcagaattcaaagtgatctcctagcttgtaagcaaactgagatgcactatcccttttctataaaaaataagttaatgtgtcaagaaaccaactctattaaggtggggtttaatattaccctttcctatgtgttttatctaattattttggttgttaatatggtgataatggaaagtcaagttaaattttaaatattaagaattctgatttattgagattgaattatgccaccacgtttatgtaaaaatgaaggtggcaccgtggtgagacctaatgagaaatagttactcagttgtaaaaattttgatttattctctttcttctgacctccttgcctcttgtcttgaaccatagcaaaaggatactgcatctctcattactgtagtgctgaggttattgaagttatacaaaacacatctcagtctctgtttcttggaaaggtatctattacatcctgctagctgactgacaaaactaagcagggagaataaagataattgtattttatgttttgcacacaaacgcagaatttgtataaccatatgacttcatagttgtgatctcaaaaaaagaaggaatttctcctttgtttcttgcagttaatgtaagaatactttaaatctctaagcttctgaagtgttagaggtagagatggtctagtaaagatgtagtagtaatgttttatccatttagcatgtgtttattttttcatatgtactcaaaggtgacttattggttcacctcagtgatattacagctaaaaaaatcattcattagcaaaaggaaaagtggtctcaacctaacatcagaagtgtttcttattattattttatattgagttgaatattgaactctaacagttttctacatacaaaacacagtgtcatgaaggttattcataattgcattatagaggaatgtagtatgtcataagtactttgtaaagatttgacattcaactgtagtatccatatgttgcttaaatttccttatgagccccatgatggaaagacttaaagatgaatttgagaaaaattgaaagaaattagattatcaggttctgttaaattgttacatgtatcttgcttaaatttctgtttattaatttatatccacccaagtacataaagcaaatttggaggaaacaactgaagttgtgcaaaaaaaaaaaaaaaa

SEQ ID NO: 1972 - protein, 154 aa, Homo sapiens
MGNCLKSPTSDDISLLHESQSDRASFGEGTEPDQEPPPPYQEQVPVPVYHPTPSQTRLATQLTEEEQIRIAQRIGLIQHLPKGVYDPGRDGSEKKIRECVICMMDFVYGDPIRFLPCMHIYHLDCIDDWLMRSFTCPSCMEPVDAALLSSYETN

SEQ ID NO: 1973 - DNA, 2622 bp, Homo sapiens
cttccgttgagcaccaagcaagatggcagcttccgagacggttaggctacggcttcaatttgattacccgccgccagctaccccgcactgtacggccttctggcttctggtcgacttgaacagatgccgagtcgtcacagatctcattagtctcatccgccagcgcttcggcttcagttctggggccttcctaggcctctacctggagggggggctcttgccccccgccgagagcgcgcgccttgtgagagacaacgactgcctcagagttaaattagaagagagaggagttgctgagaattctgtagtcatcagtaatggtgacattaatttatctcttagaaaagcaaagaagcgggcatttcagttagaggagggtgaagaaactgaaccagattgcaaatattcaaagaagcattggaagagtcgagagaacaataacaataatgagaaggtcttggatctggaaccaaaagctgtcacagatcagactgtcagcaaaaaaaacaagagaaaaaataaagcaacctgtggcacagtgggtgatgataacgaagaggccaaaagaaaatcaccaaagaaaaaggagaaatgtgaatataaaaaaaaggctaagaatcccaagtctccgaaagtacaggcagtgaaagactgggccaatcagagatgtagttctccaaaaggttctgctagaaacagccttgttaaagccaaaaggaaaggtagtgtaagcgtttgctcaaaagagagtcccagttcctcctcggagtctgagtcttgtgatgaatctatcagtgatggtcccagcaaagtcactttggaggccagaaattcctcagagaaattaccaactgagttatcaaaggaagaaccctctaccaaaaatacaactgcagacaaactggctataaaacttggctttagccttacccccagcaagggcaagacctctggaacaacatcttccagttcagactctagtgcagagtcagacgaccaatgcttgatgtcatcgagcaccccggagtgtgctgcgggtttcttaaagacagtaggcctttttgcaggaagaggtcgtccaggcccagggctgtcatcacagactgcaggtgctgctggatggaggcgttctggctcaaatggtggtggacaggctcctggtgcttctcccagtgtgtctctccctgctagtttaggaagaggatggggtagagaagagaaccttttttcttggaagggagctaagggacggggcatgcgggggagaggtcgaggacgagggcatcctgtttcctgtgttgtaaatagaagcactgacaaccagaggcaacagcaattaaatgacgtggtaaaaaattcatctactattatccagaatccagtagagacacccaagaaggactatagtctgttaccactgttagcagctgcccctcaagttggagaaaagattgcatttaagcttttggagctaacatccagttactctcctgatgtctctgactacaaggaaggaagaatattaagccacaatccagagacccagcaagtagatatagaaattctttcatccttacctgccttgagagaacctgggaaatttgatttagtttatcacaatgaaaatggagccgaggtagtggagtacgctgtgacacaggagagcaagatcactgtattttggaaagagttgattgacccaagactgattattgaatctccaagtaacacatcaagtacagaacctgcctgagtatgacctctccaccttatagtttatgaatgtcttgtttgtgaaagtgactataacccaaactttttttttttttaaagaggatttggaagttgtatggatttttttgttatcttcactttactgcataggaaacaatctacctcatcatttaaaatgacatgggtgtcggttttgtagatctttggtttttttgtcaggtttaattaccattaacaaatgtaaaacatgacattccctgcagatattgttgtataccagtatggtttattatctttctttaaatcttattggccatcaagtatgcagtcgtcagtatgtgatgtttataataccaatgaatgtgctgcgtatcttgtctcaataagttttaagtaacatttaaaaatattaaagcatgttatttgacctaattttttagcatttgagttgttccattaaatggagcatcttgtaaatttcaagtattttatacttgcaattgttaagagttaacaggtagttggatttgtcgcagacaatgagttaaggaatcctttcacgtttttcccaactttaaaattaaggattctcaggtccctgtgtagagcagtgaaaataagatgtgcgtatgtgtgtgtatgcctggagattggtgtttcacttcagtgagaggattggctgtgagcttcagaccagaaatgtgtcatcttgccagcccctggctgagtgtgctggagtgaggatcttgaacagaaacttccttttctgttattattcactacgaagctaaaatggccaaatatataccgtgaaaattggtttcatttaacaaaagatcagatccctccttcagctgtacacatttttaaataaaatcatattgaact

SEQ ID NO: 1974 - protein, 576 aa, Homo sapiens
MAASETVRLRLQFDYPPPATPHCTAFWLLVDLNRCRVVTDLISLIRQRFGFSSGAFLGLYLEGGLLPPAESARLVRDNDCLRVKLEERGVAENSVVISNGDINLSLRKAKKRAFQLEEGEETEPDCKYSKKHWKSRENNNNNEKVLDLEPKAVTDQTVSKKNKRKNKATCGTVGDDNEEAKRKSPKKKEKCEYKKKAKNPKSPKVQAVKDWANQRCSSPKGSARNSLVKAKRKGSVSVCSKESPSSSSESESCDESISDGPSKVTLEARNSSEKLPTELSKEEPSTKNTTADKLAIKLGFSLTPSKGKTSGTTSSSSDSSAESDDQCLMSSSTPECAAGFLKTVGLFAGRGRPGPGLSSQTAGAAGWRRSGSNGGGQAPGASPSVSLPASLGRGWGREENLFSWKGAKGRGMRGRGRGRGHPVSCVVNRSTDNQRQQQLNDVVKNSSTIIQNPVETPKKDYSLLPLLAAAPQVGEKIAFKLLELTSSYSPDVSDYKEGRILSHNPETQQVDIEILSSLPALREPGKFDLVYHNENGAEVVEYAVTQESKITVFWKELIDPRLIIESPSNTSSTEPA

SEQ ID NO: 1975 - DNA, 2047 bp, Homo sapiens
gtcgcggctcgagagcgagagtcacgtcccggcgctagcccagcccgacccaggcccaccgtggtgcacgcaaaccacttcctggccatgcgctccctcctgcttctcagcgccttctgcctcctggaggcggccctggccgccgaggtgaagaaacctgcagccgcagcagctcctggcactgcggagaagttgagccccaaggcggccacgcttgccgagcgcagcgccggcctggccttcagcttgtaccaggccatggccaaggaccaggcagtggagaacatcctggtgtcacccgtggtggtggcctcgtcgctggggctcgtgtcgctgggcggcaaggcgaccacggcgtcgcaggccaaggcagtgctgagcgccgagcagctgcgcgacgaggaggtgcacgccggcctgggcgagctgctgcgctcactcagcaactccacggcgcgcaacgtgacctggaagctgggcagccgactgtacggacccagctcagtgagcttcgctgatgacttcgtgcgcagcagcaagcagcactacaactgcgagcactccaagatcaacttccgcgacaagcgcaggccgctgcagtccatcaacgagtgggccgcgcagaccaccgacggcaagctgcccgaggtcaccaaggacgtggagcgcacggacggcgccctgttagtcaacgccatgttcttcaagccacactgggatgagaaattccaccacaagatggtggacaaccgtggcttcatggtgactcggtcctataccgtgggtgtcatgatgatgcaccggacaggcctctacaactactacgacgacgagaaggaaaagctgcaaatcgtggagatgcccctggcccacaagctctccagcctcatcatcctcatgccccatcacgtggagcctctcgagcgccttgaaaagctgctaaccaaagagcagctgaagatctggatggggaagatgcagaagaaggctgttgccatctccttgcccaagggtgtggtggaggtgacccatgacctgcagaaacacctggctgggctgggcctgactgaggccattgacaagaacaaggccgacttgtcacgcatgtcaggcaagaaggacctgtacctggccagcgtgttccacgccaccgcctttgagttggacacagatggcaacccctttgaccaggacatctacgggcgcgaggagctgcgcagccccaagctgttctacgccgaccaccccttcatcttcctagtgcgggacacccaaagcggctccctgctattcattgggcgcctggtccggcctaagggtgacaagatgcgagacgagttatagggcctcagggtgcacacaggatggcaggaggcatccaaaggctcctgagacacatgggtgctattggggttgggggggaggtgaggtaccagccttggatactccatggggtgggggtggaaaagcagaccggggttcccgtgtgcctgagcggaccttcccagctagaattcactccacttggacatgggccccagataccatgatgctgagcccggaaactccacatcctgtgggacctgggccatagtcattctgcctgccctgaaagtcccagatcaagcctgcctcaatcagtattcatatttatagccaggtaccttctcacctgtgagaccaaattgagctaggggggtcagccagccctcttctgacactaaaacacctcagctgcctccccagctctatcccaacctctcccaactataaaactaggtgctgcagcccctgggaccaggcacccccagaatgacctggccgcagtgaggcggattgagaaggagctcccaggaggggcttctgggcagactctggtcaagaagcatcgtgtctggcgttgtggggatgaactttttgttttgtttcttccttttttagttcttcaaagatagggagggaagggggaacatgagcctttgttgctatcaatccaagaacttatttgtacattttttttttcaataaaacttttccaatgacattt

SEQ ID NO: 1976 - protein, 418 aa, Homo sapiens [sequence omitted]

SEQ ID NO: 1977 - DNA, 4485 bp, Homo sapiens
cgcgggcggcgcggaagcggcggcggcgcggccggggcagccatgtcgccattgtctgcggcgcgggcggccctgcgggtctacgcggtaggcgccgcggtgatcctggcgcagctgctgcggcgctgccgcgggggcttcctggagccaggtccccacgcatgagcagccgtccagcaggcaggctccggtggagaagcaatggagaataaaagcctggagagctcccagacagacctgaagctggtggcccacccccgcgccaagagcaaggtgtggaagtatttcggcttcgacaccaacgccgagggatgcatcctgcagtggaagaaaatctactgccgcatctgcatggcccagatcgcctactccggaaacacctccaacctgtcctaccacctggagaagaaccaccccgaggaattctgcgagttcgtcaagagcaacacggagcagatgcgtgaagccttcgccaccgccttctccaagctgaagcccgagtcgtcccagcagcccgggcaggacgcgctggccgtcaaggccggccacggctacgacagcaagaagcagcaggagctgacggccgccgtgctgggcctcatctgcgaggggctgtacccagcctccatcgtggacgagcccaccttcaaggtgctgctgaagacggccgacccccggtatgagctgcccagccggaagtacatctctaccaaggccatccctgagaagtacggggccgtccgggaggtgatcctgaaggagctggccgaggccacctggtgtggcatctccaccgacatgtggaggagtgagaatcagaaccgcgcctacgtcacgctggccgcccacttcctgggcctgggcgcccccaactgcctgtccatgggctcccgctgcctgaagaccttcgaggtgcccgaagagaacacggcggagaccatcacgcgagtgctctatgaggtcttcatcgagtggggcatcagcgccaaggtcttcggggccaccaccaactatggcaaggacatcgtgaaggcgtgctccctgctggacgtcgcagtgcacatgccctgcctgggccacaccttcaatgccggcatccagcaggccttccagctcccgaagctgggggcgctgctgtcgcgctgccgcaaactggtggagtacttccagcagtctgccgtggccatgtacatgctctatgagaagcagaagcagcagaacgtggcccactgcatgctggtgagcaaccgcgtctcctggtgggggagcacgctggccatgctgcagcgcctcaaggagcagcagttcgtcatcgccggggtcttggtggaggacagcaacaaccaccacctcatgctggaggccagcgagtgggccaccatcgaggggctggtggagctcctgcagcccttcaagcaggtggccgagatgctgtcggcctccaggtaccccaccatcagcatggtgaagccgctgctgcacatgctcctgaacaccacgctcaacatcaaggagaccgactccaaggagctcagcatggccaaggaggtcatcgccaaggagctttccaagacctaccaggagacgcccgagatcgacatgtttctcaacgtggccaccttcctggacccccgctacaagaggctgcccttcctctccgccttcgagcggcagcaggtggagaatcgcgtggtggaagaggccaagggcctgctggacaaggtcaaagacggcggctaccggccggctgaggacaagatcttcccggtgcccgaggagcctcccgtcaagaagctcatgcggacatccacgccgccgcccgccagcgtcatcaacaacatgctggccgagatcttctgccagacaggcggcgtggaggaccaggaagagtggcatgcccaggtggtggaggagctgagcaacttcaagtcccagaaggtgcttggcctcaacgaagaccccctcaagtggtggtcagaccgcctggccctcttccccctgctgcccaaggtgctgcagaagtactggtgcgtgacggccacgcgcgtcgcccctgagcgtctcttcggatccgccgccaacgtggtcagcgccaagaggaaccggctggctcccgcgcacgtggacgagcaggtgtttctgtatgagaacgcccggagtggggcagaggcggaacccgaggaccaggacgagggggagtggggcctggaccaggagcaggtgttctccttgggggatggcgtcagcggcggtttctttggcattagggacagcagcttcctgtagcgaggaagcgtgttgtcttacaagtcatccccgcagcagcccattggatgctttgctgtaaatacttacccggtcagcttggttttgaacctcagagaccatccactgtctttgacacctagaaggtggaaaaaggaaagagattcgagaagtgagagagggtcgggggcggtggctcctgtctataatcgcagcactttgggaggccgaggtgggcagatcagctgaggtcaggagatcgagaccagcctggccaacatggcgaaaccccgtctctactaaaaatacaaaaattagccaggactgatggcatgtgcctgtaatcccagcttctggaggctgaggccagagaatcgcttgaacctgggaggtggaggttgcagtaagctgagatcgctgcactccagcctgggcgacaagagcgagactctctcaaaaagaaaaaagaagacacaagagaggtggctttgagtgggtttcctttcctcccctattcccggggcccggacgacttctgcttgggaactgccaacgcttctgcttgggaattgcgtgcagcagagcctagaggagctgttccttccttcacagatacttaagacctccaccatgtctgattcgagttctccctgggagggtttagaagaaacgcaggaacattctgggtggcgtcgaaggagcctttcccgatcatcatgtgtgacttctgcgaggtccagatcactgaattcatgtttacattctcgtgcaagcagggacctcttgcttctgagaaatggggaagagaccttttagccaaaatgcccttcttaaaaagagagacctttttttttaatgttcggttaaaaatgtgacagatgagtagaaaaatgcagacacttaacaaaaagcaaacagaaaaaaaagtgtggaatgtgttgtattttcgacaggttgctgccagagagcctgcttcctgctgcctgccgaaatttcactttgcggagttggtccttaaaactgggcggtggccgggcgtggtggctcacgctgaggtcaggagttcgagaccagcctggccaaccaacatggtgaaacctcgtgtctactaaaaatacaagaaactagccagatgcggtggcacccgcctgtaatcccagctactcgggaggctgaggcggaagattcgcttgagcccaggaggtggaggttgcagtgagccaagactacgccactgcactccagcctggaggccagagtgagactccgtctcaaaacaaaacaaaagtgggtggctcactggtccggaggttatgtcttcggtgtctcagccctaaaagtccagttcccccgtgcggccagcttttccacataaggtgtttttgatttgattaccggaaaggactcttgattcttctcttttaaactgaataccataggggaaatgaattttaaaatattgcccccggaggggttttccgtggctggattcctgcgagttgctttcagtcattcagggaaacagaaagacgttttccaacatgtagaactgctttttaactggaggaaaaatacttcaggaggcttagcatattgcttggattctacgtgcagcgggttctctgcctccgtgaagacaagctgggctggggaggacggtgtctaggagggatgaccccactcagctccaggcagtgttctgccgagaccccaagaactcggggtgtcagagggcaaaggaactacctgcctttcacggctgctgacttctcagggctgcaagcagcacagaatgttatccttacgtcctgagccggtttaagtctgtggaaaaggaagcacgggagaaatccacgtaacctttgctttctttttaagggaagcggttccgccgtgaacttggaaccctcagctccgggtgttctcggcagaagggcagctggaagggacacagtggggcaggctttggggttgctccctgttctgccccgaggccggggacgcagggcagcccacgcctccgtgggctccattctgtagcattgccagcgttctcttcacgtctctaacaatcctttgcttttcctcactcacgtggaaatgtgaactgtcccggctctgtcttcatttttatttttaagccatcgttcccctcctgaacggttgccccttatttaatgctgtaaagttggactgttgttcaataaaccagagcaatgc

SEQ ID NO: 1978 - protein, 694 aa, Homo sapiens
MENKSLESSQTDLKLVAHPRAKSKVWKYFGFDTNAEGCILQWKKIYCRICMAQIAYSGNTSNLSYHLEKNHPEEFCEFVKSNTEQMREAFATAFSKLKPESSQQPGQDALAVKAGHGYDSKKQQELTAAVLGLICEGLYPASIVDEPTFKVLLKTADPRYELPSRKYISTKAIPEKYGAVREVILKELAEATWCGISTDMWRSENQNRAYVTLAAHFLGLGAPNCLSMGSRCLKTFEVPEENTAETITRVLYEVFIEWGISAKVFGATTNYGKDIVKACSLLDVAVHMPCLGHTFNAGIQQAFQLPKLGALLSRCRKLVEYFQQSAVAMYMLYEKQKQQNVAHCMLVSNRVSWWGSTLAMLQRLKEQQFVIAGVLVEDSNNHHLMLEASEWATIEGLVELLQPFKQVAEMLSASRYPTISMVKPLLHMLLNTTLNIKETDSKELSMAKEVIAKELSKTYQETPEIDMFLNVATFLDPRYKRLPFLSAFERQQVENRVVEEAKGLLDKVKDGGYRPAEDKIFPVPEEPPVKKLMRTSTPPPASVINNMLAEIFCQTGGVEDQEEWHAQVVEELSNFKSQKVLGLNEDPLKWWSDRLALFPLLPKVLQKYWCVTATRVAPERLFGSAANVVSAKRNRLAPAHVDEQVFLYENARSGAEAEPEDQDEGEWGLDQEQVFSLGDGVSGGFFGIRDSSFL

SEQ ID NO: 1979 - DNA, 3131 bp, Homo sapiens
gcggagcgcggcgcgcgcggcggttgggccgttggctgttcggccctgggatccgccgccactccgcgatcagaccgctctgtgccgcgagccgccgtgagcactcggattcaagccggcgccaacgagtccgggggcatcgcccgcagcggccaagctcatggccggctgagcgggacgccgcctccgcctcagccaccgccgccgccgccgcctcctcctcctcagccggcggcggcccgggcccagcaaccatggctgaagactactgggacgggcgcctgcggcgaacaggaggagaaggaggtcgcgcggcctcatcccgggccgccgccccaggcgccgccgcgccggccccgcggctctgaggttgctcgcgcgcccccgccgatcgccatggatcggatgaagaagatcaaacggcagctgtcaatgacactccgaggtggccgaggcatagacaagaccaatggtgcccctgagcagataggcctggatgagagtggtggtggtggcggcagtgaccctggagaggcccccacacgtgctgctcctggggaacttcgttctgcacggggcccactcagctctgcaccagagattgtgcacgaggacttgaagatggggtctgatggggagagtgaccaggcttcagccacgtcctcggatgaggtgcagtctccagtgagagtgcgtatgcgcaaccatcccccacgcaagatctccactgaggacatcaacaagcgcctatcactaccagctgacatccggctgcctgagggctacctggagaagctgaccctcaatagccccatctttgacaagcccctcagccgccgcctccgtcgtgtcagcctatctgagattggctttgggaaactggagacctacattaagctggacaaactgggcgagggtacctatgccaccgtctacaaaggcaaaagcaagctcacagacaaccttgtggcactcaaggagatcagactggaacatgaagagggggcaccctgcaccgccatccgggaagtgtccctgctcaaggacctcaaacacgccaacatcgttacgctacatgacattatccacacggagaagtccctcacccttgtctttgagtacctggacaaggacctgaagcagtacctggatgactgtgggaacatcatcaacatgcacaacgtgaaactgttcctgttccagctgctccgtggcctggcctactgccaccggcagaaggtgctacaccgagacctcaagccccagaacctgctcatcaacgagaggggagagctcaagctggctgactttggcctggcccgagccaagtcaatcccaacaaagacatactccaatgaggtggtgacactgtggtaccggccccctgacatcctgcttgggtccacggactactccactcagattgacatgtggggtgtgggctgcatcttctatgagatggccacaggccgtcccctctttccgggctccacggtggaggaacagctacacttcatcttccgtatcttaggaaccccaactgaggagacgtggccaggcatcctgtccaacgaggagttcaagacatacaactaccccaagtaccgagccgaggcccttttgagccacgcaccccgacttgatagcgacggggccgacctcctcaccaagctgttgcagtttgagggtcgaaatcggatctccgcagaggatgccatgaaacatccattcttcctcagtctgggggagcggatccacaaacttcctgacactacttccatatttgcactaaaggagattcagctacaaaaggaggccagccttcggtcttcgtcgatgcctgactcaggcaggccagctttccgcgtggtggacaccgagttctaagccacagaccgaggccccagcaggcagcggctggagggatgccacacccctcacagggcagcccccaactacatcttccctgcttactctctgcctacctgcctgagccatgttcacctgcccacttgtcccctgctgcctgcccaaacaccccaccattggcctgtcaacccacccattggcctgtctgctgggtgctaacaaagctctcatcactccttcacttggtctgtctgtctctgtcttggtagttgccggtggacagcatggccgtgccagcctcccacactgaggccaggtctaccccccatcataccagcccccaggaccactaccccacggccagccaggggtccagagctagcccaggctggggatctcgactcagacaagatggtgacaatgccttgagtctgaggcatcctctgcctgctttcctgcctgccccacctgcctcatattgtgtgggcctttttttgtttgtttcattcattgttttttttttttttaattattttaaatgagatttttgttttttttaaatgcaatatctctgtatacagactggctgggccccaccccctgcgtgtggccctcccacagtattttgtgcaatgaagccctgctcccagcctttcagagacagggacacagcccctatttggaaccctgatcatcaccagaccctgggattggctatgggaaagcatgccacagccactcgccttcctacccccgcccgccatccccagttgcagggggatctggggactaccagagactctgggaaatggacaaggtggggggccccactctttctctcctgcagtcccgtagctggggcctccttccttctcagggtctccccagcccagtccccttgctcccatcccactcggtgctgttgggtaggggccctgccaggaactgaccagctcagcgaggagccataatgtgcatatgtgcacaagcagggttgggggaggggggtgtgaggggttgtgcccaggtgttgccccctatctcctggggagggtgaggcagggcagggacagtctccagggtcagtccctggatgggtggttacctccccttcctccaccctaagccctggggccctgaaatggggtgggagggcaggggtgggagccctcctagtgggtttggggggttgggttcctgaatgcaccataatcgctgtatgaaatattaaaaagtctaaagtgaaaaaaaaaaaaaaaaaa

SEQ ID NO: 1980 - protein, 496 aa, Homo sapiens [sequence omitted]

SEQ ID NO: 1981 - DNA, 3182 bp, Homo sapiens
ggcacgaggggagggggcagttgggcggggataggccgtcctagctaaggtggtaaaggccaataactcttcaggctgcctctcctcgaaaagtcatcttctcgcgaacctttaaaatgccttcctccccaagcacctcaagggactagaactgagtgcttcatttgtcttttttcctccttgcaaaagtcccgtttgccaccatggggatgtaccaagtgagaccgagtagggggaacgagtggtgattgacgcgccaggttactggccactgctcacctaggcgctagcaaacttctgccaagatcggaactgagtactaaacagcctccacagttctccctggtgccgtctccggcttggcgccgcatcctcctctgggctcgcgatggccgcgtcccctcccgctgcggacgggtcctttggtacatgcagtccgagatcgccatggatcggatgaagaagatcaaacggcagctgtcaatgacactccgaggtggccgaggcatagacaagaccaatggtgcccctgagcagataggcctggatgagagtggtggtggtggcggcagtgaccctggagaggcccccacacgtgctgctcctggggaacttcgttctgcacggggcccactcagctctgcaccagagattgtgcacgaggacttgaagatggggtctgatggggagagtgaccaggcttcagccacgtcctcggatgaggtgcagtctccagtgagagtgcgtatgcgcaaccatcccccacgcaagatctccactgaggacatcaacaagcgcctatcactaccagctgacatccggctgcctgagggctacctggagaagctgaccctcaatagccccatctttgacaagcccctcagccgccgcctccgtcgtgtcagcctatctgagattggctttgggaaactggagacctacattaagctggacaaactgggcgagggtacctatgccaccgtctacaaaggcaaaagcaagctcacagacaaccttgtggcactcaaggagatcagactggaacatgaagagggggcaccctgcaccgccatccgggaagtgtccctgctcaaggacctcaaacacgccaacatcgttacgctacatgacattatccacacggagaagtccctcacccttgtctttgagtacctggacaaggacctgaagcagtacctggatgactgtgggaacatcatcaacatgcacaacgtgaaactgttcctgttccagctgctccgtggcctggcctactgccaccggcagaaggtgctacaccgagacctcaagccccagaacctgctcatcaacgagaggggagagctcaagctggctgactttggcctggcccgagccaagtcaatcccaacaaagacatactccaatgaggtggtgacactgtggtaccggccccctgacatcctgcttgggtccacggactactccactcagattgacatgtggggtgtgggctgcatcttctatgagatggccacaggccgtcccctctttccgggctccacggtggaggaacagctacacttcatcttccgtatcttaggaaccccaactgaggagacgtggccaggcatcctgtccaacgaggagttcaagacatacaactaccccaagtaccgagccgaggcccttttgagccacgcaccccgacttgatagcgacggggccgacctcctcaccaagctgttgcagtttgagggtcgaaatcggatctccgcagaggatgccatgaaacatccattcttcctcagtctgggggagcggatccacaaacttcctgacactacttccatatttgcactaaaggagattcagctacaaaaggaggccagccttcggtcttcgtcgatgcctgactcaggcaggccagctttccgcgtggtggacaccgagttctaagccacagaccgaggccccagcaggcagcggctggagggatgccacacccctcacagggcagcccccaactacatcttccctgcttactctctgcctacctgcctgagccatgttcacctgcccacttgtcccctgctgcctgcccaaacaccccaccattggcctgtcaacccacccattggcctgtctgctgggtgctaacaaagctctcatcactccttcacttggtctgtctgtctctgtcttggtagttgccggtggacagcatggccgtgccagcctcccacactgaggccaggtctaccccccatcataccagcccccaggaccactaccccacggccagccaggggtccagagctagcccaggctggggatctcgactcagacaagatggtgacaatgccttgagtctgaggcatcctctgcctgctttcctgcctgccccacctgcctcatattgtgtgggcctttttttgtttgtttcattcattgttttttttttttttaattattttaaatgagatttttgttttttttaaatgcaatatctctgtatacagactggctgggccccaccccctgcgtgtggccctcccacagtattttgtgcaatgaagccctgctcccagcctttcagagacagggacacagcccctatttggaaccctgatcatcaccagaccctgggattggctatgggaaagcatgccacagccactcgccttcctacccccgcccgccatccccagttgcagggggatctggggactaccagagactctgggaaatggacaaggtggggggccccactctttctctcctgcagtcccgtagctggggcctccttccttctcagggtctccccagcccagtccccttgctcccatcccactcggtgctgttgggtaggggccctgccaggaactgaccagctcagcgaggagccataatgtgcatatgtgcacaagcagggttgggggaggggggtgtgaggggttgtgcccaggtgttgccccctatctcctggggagggtgaggcagggcagggacagtctccagggtcagtccctggatgggtggttacctccccttcctccaccctaagccctggggccctgaaatggggtgggagggcaggggtgggagccctcctagtgggtttggggggttgggttcctgaatgcaccataatcgctgtatgaaatattaaaaagtctaaagtgaaaaaaaaaaaaaaaaaa

SEQ ID NO: 1982 - DNA, 2987 bp, Homo sapiens
gcggagcgcggcgcgcgcggcggttgggccgttggctgttcggccctgggatccgccgccactccgcgatcagaccgctctgtgccgcgagccgccgtgagcactcggattcaagccggcgccaacgagtccgggggcatcgcccgcagcggccaagctcatggccggctgagcgggacgccgcctccgcctcagccaccgccgccgccgccgcctcctcctcctcagccggcggcggcccgggcccagcaaccatggctgaagactactgggacgggcgcctgcggcgaacaggaggagaaggaggtcgcgcggcctcatcccgggccgccgccccaggcgccgccgcgccggccccgcggctctgaggttgctcgcgcgcccccgccgatcgccatggatcggatgaagaagatcaaacggcagctgtcaatgacactcagctctgcaccagagattgtgcacgaggacttgaagatggggtctgatggggagagtgaccaggcttcagccacgtcctcggatgaggtgcagtctccagtgagagtgcgtatgcgcaaccatcccccacgcaagatctccactgaggacatcaacaagcgcctatcactaccagctgacatccggctgcctgagggctacctggagaagctgaccctcaatagccccatctttgacaagcccctcagccgccgcctccgtcgtgtcagcctatctgagattggctttgggaaactggagacctacattaagctggacaaactgggcgagggtacctatgccaccgtctacaaaggcaaaagcaagctcacagacaaccttgtggcactcaaggagatcagactggaacatgaagagggggcaccctgcaccgccatccgggaagtgtccctgctcaaggacctcaaacacgccaacatcgttacgctacatgacattatccacacggagaagtccctcacccttgtctttgagtacctggacaaggacctgaagcagtacctggatgactgtgggaacatcatcaacatgcacaacgtgaaactgttcctgttccagctgctccgtggcctggcctactgccaccggcagaaggtgctacaccgagacctcaagccccagaacctgctcatcaacgagaggggagagctcaagctggctgactttggcctggcccgagccaagtcaatcccaacaaagacatactccaatgaggtggtgacactgtggtaccggccccctgacatcctgcttgggtccacggactactccactcagattgacatgtggggtgtgggctgcatcttctatgagatggccacaggccgtcccctctttccgggctccacggtggaggaacagctacacttcatcttccgtatcttaggaaccccaactgaggagacgtggccaggcatcctgtccaacgaggagttcaagacatacaactaccccaagtaccgagccgaggcccttttgagccacgcaccccgacttgatagcgacggggccgacctcctcaccaagctgttgcagtttgagggtcgaaatcggatctccgcagaggatgccatgaaacatccattcttcctcagtctgggggagcggatccacaaacttcctgacactacttccatatttgcactaaaggagattcagctacaaaaggaggccagccttcggtcttcgtcgatgcctgactcaggcaggccagctttccgcgtggtggacaccgagttctaagccacagaccgaggccccagcaggcagcggctggagggatgccacacccctcacagggcagcccccaactacatcttccctgcttactctctgcctacctgcctgagccatgttcacctgcccacttgtcccctgctgcctgcccaaacaccccaccattggcctgtcaacccacccattggcctgtctgctgggtgctaacaaagctctcatcactccttcacttggtctgtctgtctctgtcttggtagttgccggtggacagcatggccgtgccagcctcccacactgaggccaggtctaccccccatcataccagcccccaggaccactaccccacggccagccaggggtccagagctagcccaggctggggatctcgactcagacaagatggtgacaatgccttgagtctgaggcatcctctgcctgctttcctgcctgccccacctgcctcatattgtgtgggcctttttttgtttgtttcattcattgttttttttttttttaattattttaaatgagatttttgttttttttaaatgcaatatctctgtatacagactggctgggccccaccccctgcgtgtggccctcccacagtattttgtgcaatgaagccctgctcccagcctttcagagacagggacacagcccctatttggaaccctgatcatcaccagaccctgggattggctatgggaaagcatgccacagccactcgccttcctacccccgcccgccatccccagttgcagggggatctggggactaccagagactctgggaaatggacaaggtggggggccccactctttctctcctgcagtcccgtagctggggcctccttccttctcagggtctccccagcccagtccccttgctcccatcccactcggtgctgttgggtaggggccctgccaggaactgaccagctcagcgaggagccataatgtgcatatgtgcacaagcagggttgggggaggggggtgtgaggggttgtgcccaggtgttgccccctatctcctggggagggtgaggcagggcagggacagtctccagggtcagtccctggatgggtggttacctccccttcctccaccctaagccctggggccctgaaatggggtgggagggcaggggtgggagccctcctagtgggtttggggggttgggttcctgaatgcaccataatcgctgtatgaaatattaaaaagtctaaagtgaaaaaaaaaaaaaaaaaa

SEQ ID NO: 1983 - protein, 448 aa, Homo sapiens
MDRMKKIKRQLSMTLSSAPEIVHEDLKMGSDGESDQASATSSDEVQSPVRVRMRNHPPRKISTEDINKRLSLPADIRLPEGYLEKLTLNSPIFDKPLSRRLRRVSLSEIGFGKLETYIKLDKLGEGTYATVYKGKSKLTDNLVALKEIRLEHEEGAPCTAIREVSLLKDLKHANIVTLHDIIHTEKSLTLVFEYLDKDLKQYLDDCGNIINMHNVKLFLFQLLRGLAYCHRQKVLHRDLKPQNLLINERGELKLADFGLARAKSIPTKTYSNEVVTLWYRPPDILLGSTDYSTQIDMWGVGCIFYEMATGRPLFPGSTVEEQLHFIFRILGTPTEETWPGILSNEEFKTYNYPKYRAEALLSHAPRLDSDGADLLTKLLQFEGRNRISAEDAMKHPFFLSLGERIHKLPDTTSIFALKEIQLQKEASLRSSSMPDSGRPAFRVVDTEF

SEQ ID NO: 1984 - DNA, 1495 bp, Homo sapiens
ggcacgaggagagagagaaagagaactagtctcgagttttttttttttttttttctcaggtgcttgcgaggtgatcagaaggcaaagatgtcggagcgaaaagtattaaacaaatactacccgccggactttgacccatcaaagatccccaaactcaagctccccaaagaccggcagtacgtggtgcggctgatggcccccttcaacatgaggtgtaagacgtgcggagaatacatctacaaggggaagaaattcaatgctcggaaggagacggtgcagaacgaggtctacctgggcctgcccatcttccgcttttacatcaagtgcacgcgctgcctggcagagatcaccttcaagacagaccctgaaaacacagactacaccatggagcatggagccacgcggaatttccaggctgagaagctcctggaggaggaggagaagagggtgcagaaggagcgggaggacgaggagctgaacaaccccatgaaggtgctggagaaccggaccaaggactccaagctggagatggaggtgctggagaacctccaggagctgaaagacctgaaccagcggcaggcgcacgtggacttcgaggctatgctgaggcagcaccgcctgtcggaggaggagcggcggaggcagcagcaggaggaggacgagcaggagaccgcggccctgttggaggaagccagaaagcgaagactgctggaggactccgactcagaggatgaggctgctccctcgcccctgcagccagcccttcggcccaaccccaccgccatcctggatgaggccccaaagcccaagaggaaggtggaggtctgggagcagagcgttggcagcctgggcagccggcccccgctgtcgaggctggtcgtggtgaagaaggcaaaggccgacccggactgcagcaacgggcagcctcaggcggcccccaccccaggagccccgcagaacaggaaggaggccaaccctacacccctgacgcctggcgcgtcctccctgagccaactgggtgcatacctggacagtgacgacagcaacggcagcaactgagccctcccaggaccccctcacggggtcaaagtcacacgtccagcttcagccacattgaggccagcattgctggtggtcagggcaggaggccttggcgtgactggaggccggacagacaagcgccagcgtgctccaacacatagggccaccaggggcctcagccccaggaggtcccttctctgtgccctcaccagcctctcaacacctcggggacccctgctgctcctgcccccacctgtcactgtgcttagggctgcaacatccctggagcagcttccaacactacttcagggtggcagtgtttggggcactgggcgagcctgccggcctctagatggcctcatctcttccttccacaaactgtctagaaccaataaaaggaaacctgccaaaaaaaaaaaaaaaaaaaaaaaaaaaaaaaaaaaaaaaaaaaaaa

SEQ ID NO: 1985 - protein, 323 aa, Homo sapiens
MSERKVLNKYYPPDFDPSKIPKLKLPKDRQYVVRLMAPFNMRCKTCGEYIYKGKKFNARKETVQNEVYLGLPIFRFYIKCTRCLAEITFKTDPENTDYTMEHGAARNFQAEKLLEEEEKRVQKEREDEELNNPMKVLENRTKDSKLEMEVLENLQELKDLNQRQAHVDFEAMLRQHRLSEEERRRQQQEEDEQETAALLEEARKRRLLEDSDSEDEAAPSPLQPALRPNPTAILDEAPKPKRKVEVWEQSVGSLGSRPPLSRLVVVKKAKADPDCSNGQPQAAPTPGAPQNRKEANPTPLTPGASSLSQLGAYLDSDDSNGSN

SEQ ID NO: 1986 - DNA, 5947 bp, Homo sapiens
tctttagagcaaaaggtgaatcaaaggagagtcccagaaaacctgtgactgttgaagaaaattcatctgtgaatttttatattcaaggagtcagtatttatattcatcttttaaactgggaagatttatattttactttaaaacttcttgataataatttacaatgaatggacacagtgatgaagaaagtgttagaaacagtagtggagaatcaagccagtcggatgatgattctgggtcagcttcaggctctggatctggttcgagttctggaagcagtagtgatggaagcagtagccagtcaggtagcagtgactctgactccggatctgaatcaggcagtcagtcagagtctgagtcagacacttcccgagaaaacaaagttcaagcaaaaccaccgaaagttgatggagctgagttttggaaatctagtcctagtattctggccgttcagagatctgcaatcctcaagaagcagcaacagcagcagcagcaacaacaacatcaagcctcatctaatagcggatcagaagaggattcctctagcagtgaagattccgatgactcatcaagtgaggtcaaaaggaaaaagcataaagatgaagattggcaaatgtctgggtcaggatctccatctcagtctggttcagattcagaatctgaagaagagagagagaaaagcagttgtgatgaaacagaatctgattatgagccaaaaaacaaagtcaaaagcagaaaacctcaaaatagatctaagtcaaaaaatggaaagaagattcttggacaaaaaaagagacagattgattcatctgaggaggatgatgatgaagaagattatgataatgataaaagaagttctcgtcgccaagcaactgttaatgttagctataaggaggatgaagaaatgaaaacagattctgatgacctactggaagtctgtggagaggatgttcctcaacctgaggaagaggaatttgaaaccatagaaagatttatggattgtcggattgggagaaaaggagctactggtgctactacaaccatctatgcagttgaagcagatggtgacccaaatgcaggctttgaaaaaaacaaagaaccaggagagattcagtatttaattaaatggaaaggatggtcccatatccacaacacttgggagacagaagaaaccctcaagcagcagaatgttagaggaatgaaaaaattggataattataagaaaaaagatcaggaaacaaaaagatggttgaaaaatgcctctccagaagatgtggaatattataattgccagcaagaacttacagatgatctacataaacagtatcaaatagtgggacgtataattgctcattccaatcaaaagtcagcagctggttatcctgattattactgcaaatggcagggccttccatactcagagtgcagctgggaagatggagctctcatttccaaaaagtttcaagcatgcattgatgagtattttagcaggaaccaatcaaaaaccactccttttaaagattgcaaagtattaaaacaaaggccaaggtttgtagccctgaagaagcagccatcctatattggaggacatgagggcttagaattaagagattatcaactgaatggtttaaattggcttgctcattcttggtgcaaaggaaatagttgcatactcgctgatgaaatgggccttggaaaaacaatacagacgatctcatttctgaattatttgtttcatgaacatcaattatatggaccttttttattggtagtaccgctctccactcttacttcctggcaaagggaaattcagacttgggcttctcaaatgaatgctgtggtttatttaggtgacattaacagcagaaacatgataagaactcatgaatggacgcatcatcagaccaaacggttaaaatttaatatattgttaacaacttatgaaattttattaaaagataaggcattccttggaggtctaaattgggcatttataggtgttgatgaagcacaccgattaaagaatgatgactcccttctgtataaaactttaatagattttaaatccaatcatcgtctccttatcactggaactcctctacagaattccctcaaagagctctggtctttgctacatttcattatgccagaaaagttttcttcctgggaagattttgaagaagaacatggcaaagggagagaatatggttatgcaagccttcacaaggagcttgagccatttctgttacgccgagttaagaaagatgtggaaaaatctcttcctgccaaggttgagcagattttaagaatggaaatgagtgctttacagaaacaatattacaaatggattttaactaggaattacaaagccctcagcaaaggttccaagggcagtacctcaggctttttgaacattatgatggagctaaagaaatgttgtaaccattgctacctcattaaaccaccagataataatgaattctataataaacaggaggccttacaacacttaattcgtagtagcggaaaattgattcttcttgacaagctattaattcgcctaagagaacgaggcaatcgagttcttattttttcacaaatggtgcggatgttagatatacttgcagaatatttgaaatatcgtcaattcccctttcaaagattagatggatcaataaaaggagaactgaggaaacaagctctagatcattttaatgctgagggatcagaggatttttgctttttgctgtccacaagagctggaggtctagggattaatttagcctctgctgacactgttgttatatttgattccgattggaatccacagaatgatcttcaggcacaggctagagcccatcgaattggccaaaagaaacaggtgaatatttatcgtctagttacaaagggatcagttgaagaagatattcttgaaagggcgaaaaagaagatggttttagatcatcttgtaattcaaagaatggacacaactgggaagacagtactacatacaggttctgccccatcaagttctactcctttcaataaagaagagttatcagccattttaaagtttggtgctgaagaactttttaaggaacctgaaggagaagaacaagagccccaggaaatggatatagatgaaatcttgaagagagctgaaactcatgaaaatgaaccaggtcctttaactgtaggagatgaattgctttcccagttcaaggttgccaacttctcaaatatggatgaggatgacattgagttggaacctgaaagaaattcaaagaattgggaggaaattattccagaagatcaaagaagacgattagaagaagaagaaagacaaaaggaacttgaagaaatttatatgctcccaagaatgagaaattgtgcaaaacagattagtttcaatggaagtgaagggaggcgcagtagaagtaggagatactctggatctgatagtgattccatctcagaagggaaaaggccaaagaaacgtggaagaccacggactattcctcgggagaatattaaaggatttagtgatgcagaaattaggcggtttatcaagagctataagaaatttggtggtcctctggaaagattagatgcaattgctcgagatgctgagttagttgataagtcagaaacagaccttagacgactgggagaattggtacataatggttgcattaaagcattaaaggatagttcttcaggaacagaacgaacaggtggtagactcggaaaagtgaagggtccaacattccgaatatcaggagtacaggtgaatgccaaactagtcatctcccatgaagaagaattaatacctttgcacaaatccattccttctgatccagaagaaagaaagcagtatactatcccatgccacacaaaggcagctcattttgatatagactggggcaaagaagatgattccaatttgttaattggcatctatgaatatggatatggaagctgggaaatgattaaaatggatcctgacctcagtctaacacacaagattcttccagatgatcccgataaaaaaccacaagcaaaacagttgcagacccgtgcagactacctcatcaaattacttagtagagatcttgcaaaaaaagaagctctttctggtgcgggaagttcaaagaggagaaaagcaagagctaagaagaataaagcaatgaagtctataaaagtgaaagaggaaataaagagtgattcttctcctctgccttcagagaagtctgatgaagatgatgataaattgagtgaatccaagtctgatggtagggaaagatccaagaaatcttcagtgtcagatgctccagttcatatcacggcaagtggtgaaccagttcccatttctgaagaatctgaagagctggatcagaagacattcagcatttgtaaagaaagaatgaggcctgttaaagcagctttgaaacaacttgataggcctgagaaaggcctttcagaaagagaacaactagaacatactagacaatgtttaataaaaattggagaccatatcacagaatgtctaaaagagtatacaaatcctgaacaaattaagcaatggagaaaaaacctgtggatttttgtatctaagtttactgaatttgatgcaagaaaattacataaattatataagcatgctattaaaaaacggcaggagtctcagcaaaacagtgatcaaaacagcaacttgaatcctcacgtgattagaaatccagatgtggaaagattaaaagagaatacaaatcacgatgatagcagcagggacagttattcctctgatagacacttaactcagtaccatgatcatcataaagaccgacatcagggagattcttacaaaaaaagtgattccaggaaaagaccctattcttcttttagtaatggtaaagaccatcgtgattgggatcactacaagcaagacagcagatattacagtgacagagagaaacacagaaaactggatgatcacaggagtagagatcacaggtcaaatttggaaggaagtttaaaagatagatctcattctgatcatcgttctcactcagatcatcggttacattcagaccaccggtcaagttctgaatatacgcaccataaatcttccagggattataggtatcactcagactggcaaatggaccacagagcttccagcagtggccctaggtcaccactagatcagagatcttatggctccagatctccatttgaacattcagttgaacacaaaagtacaccggagcatacctggagtagtcggaaaacataacaaaaactgatacttcgtctttctggacttttcttttagccatatatcataaaccaacacagtaattgccttacatgacttgaaagatataaacagatcttctatcagtagcagtattgttacttctttccaggatgcaaggtctattatcccaacagaagagaaaatatttttatatttaaggattatgctgcactgtactacaaaattgtagtacttttttttgttttcttttttaaagaaatggaaaatgtttactattacagggacctcaacactgccctcccatacaggctggataaaactgtttttaagtcagtgattttagactgacctccatttaaattatgtttatatatgaactttactctgacctgtgatcatgtttcaggaaggaatgaaagagagttctttcttaataaagaaaaacactcaaggactttgttcatttccaaagctacttgtttacattgtacactgcgaccaccttgccgcttttcatcacaagcttgaatatttaaattctgtacttatatctgtaaaatagccaggaatttcctgtttgtgatctattatgcctttttacaaaaaaaatggctgtaaattattgtaaatattaaaggaactttccttacaaaaaaaaaaaaaaaaaaa

SEQ ID NO: 1987 - protein, 1709 aa, Homo sapiens
MNGHSDEESVRNSSGESSQSDDDSGSASGSGSGSSSGSSSDGSSSQSGSSDSDSGSESGSQSESESDTSRENKVQAKPPKVDGAEFWKSSPSILAVQRSAILKKQQQQQQQQQHQASSNSGSEEDSSSSEDSDDSSSEVKRKKHKDEDWQMSGSGSPSQSGSDSESEEEREKSSCDETESDYEPKNKVKSRKPQNRSKSKNGKKILGQKKRQIDSSEEDDDEEDYDNDKRSSRRQATVNVSYKEDEEMKTDSDDLLEVCGEDVPQPEEEEFETIERFMDCRIGRKGATGATTTIYAVEADGDPNAGFEKNKEPGEIQYLIKWKGWSHIHNTWETEETLKQQNVRGMKKLDNYKKKDQETKRWLKNASPEDVEYYNCQQELTDDLHKQYQIVGRIIAHSNQKSAAGYPDYYCKWQGLPYSECSWEDGALISKKFQACIDEYFSRNQSKTTPFKDCKVLKQRPRFVALKKQPSYIGGHEGLELRDYQLNGLNWLAHSWCKGNSCILADEMGLGKTIQTISFLNYLFHEHQLYGPFLLVVPLSTLTSWQREIQTWASQMNAVVYLGDINSRNMIRTHEWTHHQTKRLKFNILLTTYEILLKDKAFLGGLNWAFIGVDEAHRLKNDDSLLYKTLIDFKSNHRLLITGTPLQNSLKELWSLLHFIMPEKFSSWEDFEEEHGKGREYGYASLHKELEPFLLRRVKKDVEKSLPAKVEQILRMEMSALQKQYYKWILTRNYKALSKGSKGSTSGFLNIMMELKKCCNHCYLIKPPDNNEFYNKQEALQHLIRSSGKLILLDKLLIRLRERGNRVLIFSQMVRMLDILAEYLKYRQFPFQRLDGSIKGELRKQALDHFNAEGSEDFCFLLSTRAGGLGINLASADTVVIFDSDWNPQNDLQAQARAHRIGQKKQVNIYRLVTKGSVEEDILERAKKKMVLDHLVIQRMDTTGKTVLHTGSAPSSSTPFNKEELSAILKFGAEELFKEPEGEEQEPQEMDIDEILKRAETHENEPGPLTVGDELLSQFKVANFSNMDEDDIELEPERNSKNWEEIIPEDQRRRLEEEERQKELEEIYMLPRMRNCAKQISFNGSEGRRSRSRRYSGSDSDSISEGKRPKKRGRPRTIPRENIKGFSDAEIRRFIKSYKKFGGPLERLDAIARDAELVDKSETDLRRLGELVHNGCIKALKDSSSGTERTGGRLGKVKGPTFRISGVQVNAKLVISHEEELIPLHKSIPSDPEERKQYTIPCHTKAAHFDIDWGKEDDSNLLIGIYEYGYGSWEMIKMDPDLSLTHKILPDDPDKKPQAKQLQTRADYLIKLLSRDLAKKEALSGAGSSKRRKARAKKNKAMKSIKVKEEIKSDSSPLPSEKSDEDDDKLSESKSDGRERSKKSSVSDAPVHITASGEPVPISEESEELDQKTFSICKERMRPVKAALKQLDRPEKGLSEREQLEHTRQCLIKIGDHITECLKEYTNPEQIKQWRKNLWIFVSKFTEFDARKLHKLYKHAIKKRQESQQNSDQNSNLNPHVIRNPDVERLKENTNHDDSSRDSYSSDRHLTQYHDHHKDRHQGDSYKKSDSRKRPYSSFSNGKDHRDWDHYKQDSRYYSDREKHRKLDDHRSRDHRSNLEGSLKDRSHSDHRSHSDHRLHSDHRSSSEYTHHKSSRDYRYHSDWQMDHRASSSGPRSPLDQRSYGSRSPFEHSVEHKSTPEHTWSSRKT

SEQ ID NO: 1988 - DNA, 1272 bp, Homo sapiens
aggaggagagccactgtggtctgaagagatgctactgcctggagactggggtcttaacctccagcctggcactgagccacctgcaacctagcagcaggtgaccttggctcccagcctgactcagctgaacctggatcctgtgcataggcaagagctgactctgagccctggcccagccaagctgacccctacactagaccctacacaccggatggagctgatcctgagtaccagcccagctgagctgactctggatcctgcgtgccagccaaagctgcccctggattccacatgccaaccagagatgaccttcaatcctggtccaactgagcttaccctggatcctgaacaccagccagaggagaccccagctcctagcctggctgagttgaccctggagcctgtgcaccgccgacccgagctcctggatgcttgtgctgacctcatcaatgatcagtggccccgcagccgcacctcccgcctgcactccctgggccagtcctcagatgccttccccctctgcctgatgctgctaagcccccaccccacacttgaagcagcacccgttgtggtgggccatgcccgcctgtcacgggtgctgaaccagccccagagcctcttagtggagacagtggtggtggcccgggccctgaggggccgtggctttggccgccgcctcatggagggcctggaggtctttgctcgggcccggggcttccgcaagctgcatctcaccacccatgaccaggtgcacttctatacccacctgggctaccagctgggtgagcctgtgcagggcctggtcttcaccagcagacggctgcctgccaccctgcttaatgccttccccacagccccctctccccggccacccaggaaggccccaaacctgactgcccaagctgccccaaggggtcccaagggacctccattgccaccaccccctcccctacctgagtgcctgaccatctcacccccagttccatcagggcccccttcaaaaagcctgctggagacacaatatcaaaatgtgagggggcgccccatattctggatggaaaaagacatctgaggccatccagggcaaggaactgtctttctggttcaatagactgccccgacagtctacaagcctcagcccactgaccatacctcagcccctagcccctggggggcagctttaacctgggcatgtttcctgggtaccagtggggccaggaggtggctctggctcagagccgtcagtgtggctgaataaaggctctcttgggt

SEQ ID NO: 1989 - protein, 286 aa, Homo sapiens
MELILSTSPAELTLDPACQPKLPLDSTCQPEMTFNPGPTELTLDPEHQPEETPAPSLAELTLEPVHRRPELLDACADLINDQWPRSRTSRLHSLGQSSDAFPLCLMLLSPHPTLEAAPVVVGHARLSRVLNQPQSLLVETVVVARALRGRGFGRRLMEGLEVFARARGFRKLHLTTHDQVHFYTHLGYQLGEPVQGLVFTSRRLPATLLNAFPTAPSPRPPRKAPNLTAQAAPRGPKGPPLPPPPPLPECLTISPPVPSGPPSKSLLETQYQNVRGRPIFWMEKDI

SEQ ID NO: 1990 - DNA, 4337 bp, Homo sapiens
ggctgtgacactaatacttaacatggtggttgtgtctctttatgcctgactcaatcagttgaaatccaaaagtaagttcttccttgatttacctgccaagacctgagttcaggccctcagggtgctgaggttttcctttgtgggagaaaatgccaccagatggcgggttaggattgcagctccgttgaaggcgcggcccccgctcccgaacccccggcgaccaccccgtaacaacccccccacatcgggaataacacaccggagacttttggggggaaactaggtcgatggtcggcggcgccggatgggcagctgaggattgcctttgaggttattttaaaagttttgagttgtacagcacttgattattttgctgcattgtgaaaggacctctccagcaatgattacttcagaattaccagtgttacaggattcaactaatgaaactactgcccattccgatgctggcagcgagcttgaagaaacagaggtcaaaggaaaaagaaaaaggggtcgtcctggccggcctccatctacaaataagaaacctcgaaaatctccaggtgagaagagcagaattgaagctggaattagaggagcaggccgtggaagagctaatggacaccctcaacagaatggggaaggggagcctgtcacattatttgaggtggtgaaactggggaaaagtgcaatgcagtccgtggtggatgactggattgaatcatataaacaagacagggacatcgcacttctggatttaatcaacttttttatccagtgttcaggatgtcgaggtactgtgagaatagagatgtttcgaaatatgcagaatgcagaaatcatcagaaaaatgactgaagaatttgatgaggacagtggtgattatcctcttaccatgcctggacctcagtggaaaaaatttcgttcaaacttttgtgaatttattggagtcctgattcgacagtgtcagtatagcataatttatgatgagtatatgatggacacagtaatctcccttttgacgggtttgtcagactcccaggtcagagcttttaggcatacaagtaccctggctgccatgaagctcatgactgctctggtgaatgttgccttaaacctcagtattcatcaggataatacccagagacaatatgaagccgagagaaataaaatgattgggaagagagccaatgaaaggttggagttactacttcagaaacgcaaagagctgcaagaaaatcaggatgaaatcgaaaatatgatgaactctatttttaagggtatatttgttcatagataccgtgatgctattgctgagattagagccatttgtattgaagaaattggagtatggatgaaaatgtatagtgatgccttcctaaatgacagttacctaaaatatgttggctggactcttcatgacaggcaaggggaagtcaggctgaagtgtttgaaagctctgcagagtctatataccaatagagaattattccccaaattggaactattcactaaccgattcaaggatcgcattgtatcaatgacacttgataaagaatatgatgttgctgtggaagctattcgattggttactctgatacttcatggaagtgaagaagctctttccaatgaagactgtgaaaatgtttaccacttggtgtactcggcacatcgccctgttgctgtggcagctggagagttccttcacaaaaagctatttagcagacatgacccacaagcagaagaagcattagcaaagaggaggggaagaaacagcccgaatggaaacctcattaggatgctggttcttttctttcttgaaagtgagttacatgaacatgcagcctacttggtggacagtttatgggagagctctcaagaactgttgaaagactgggaatgtatgacagagttgctattagaagaacctgttcaaggagaggaagcaatgtctgatcgtcaagagagtgctcttatagagctaatggtttgtacaattcgtcaagctgctgaggcacatcctccagtgggaaggggtaccggcaagagagtgctaactgccaaagaaaggaaaactcaaattgatgatagaaacaaattgactgaacattttattattacacttcctatgttactgtcaaagtattctgcagatgcagagaaggtagcaaacttgctacaaatcccacagtattttgatttagaaatctacagcacaggtagaatggaaaagcatctggatgctttattaaaacagattaagtttgttgtggagaaacacgtagaatcagatgttctagaagcctgcagtaaaacctatagtatcttatgcaatgaagaatataccatccagaacagagttgacatagctcgaagccagctgattgatgagtttgtagatcgattcaatcattctgtggaagacctattgcaagagggagaagaagctgatgatgatgacatttacaatgttctttctacattaaagcggttaacttcttttcagaatgcacatgatctcacaaaatgggatctctttggtaattgctacagattattgaagactggaattgaacatggagccatgccagaacagatagtcgtgcaagcactgcagtgttcccattattcgattctttggcagttggtgaaaattactgatggctctccttccaaagaggatttgttggtattgaggaaaacggtgaaatcctttttggctgtttgccagcagtgcctgtctaatgttaatactccagtgaaagaacaggctttcatgttactctgtgatcttctgatgattttcagccaccaattaatgacaggtggcagagagggccttcagcctttggtgttcaatccagatactggactccaatctgaactcctcagttttgtgatggatcacgtttttattgaccaagacgaggagaaccagagcatggagggtgatgaagaagatgaagctaataaaattgaggccttacataaaagaaggaatctacttgctgctttcagcaaacttatcatttatgacattgttgacatgcatgcagctgcagacatcttcaaacactacatgaagtattacaatgactatggtgatattattaaggaaacactgagtaaaaccaggcagattgataaaattcagtgtgccaagactctcattctcagtttgcaacagttatttaatgaacttgttcaagagcaaggtcccaacctagataggacatctgcccatgtcagtggcattaaagaactggcacgtcgctttgcccttacatttggattggaccagattaagacacgagaagcagttgccacacttcacaaggatggcatagagtttgcatttaaataccaaaatcagaaaggacaagagtatccacctcctaatctggcttttcttgaagtactaagtgaattttcttctaaacttcttcgacaggacaaaaagacagttcattcatacctagagaaattccttaccgagcagatgatggaaaggagggaggatgtatggcttccactcatctcctatagaaattcattagtcactgggggtgaagatgatagaatgtctgtgaacagtggaagtagcagcagcaaaacctcatcagtaaggaataagaaaggacgacctccacttcataaaaaacgagtagaagatgagagtctggataacacatggctaaacaggactgacaccatgattcagactcctggccccctgccagcaccacaactcacatccactgtactgcgggagaacagtcggcccatgggagaccagattcaagaacctgagtctgaacatggttctgaaccagactttttacacaatcctcagatgcagatctcttggttaggccagccgaagttagaagacttaaatcggaaggacagaacaggaatgaactacatgaaagtgagaactggagtgaggcatgctgttcggggtctaatggaggaagatgctgagcccatctttgaagatgtgatgatgtcatcccgaagccagttagaagatatgaatgaagaatttgaggacaccatggttattgatctgcctccatcaagaaatcggcgagagagagctgagctaaggccagacttctttgactctgcagctatcatagaagatgattcaggatttggaatgcctatgttctgaagtctgaagaaaatttacaaatctggaactctattatttagagctagaggcctatatactgtgatagcttgtatggggaaaaacaacttttgatgtgatctgatttgttttttaatcaaatgattaaggtcaatccctttttgcagtgacagaagaggag

SEQ ID NO: 1991 - protein, 1258 aa, Homo sapiens
MITSELPVLQDSTNETTAHSDAGSELEETEVKGKRKRGRPGRPPSTNKKPRKSPGEKSRIEAGIRGAGRGRANGHPQQNGEGEPVTLFEVVKLGKSAMQSVVDDWIESYKQDRDIALLDLINFFIQCSGCRGTVRIEMFRNMQNAEIIRKMTEEFDEDSGDYPLTMPGPQWKKFRSNFCEFIGVLIRQCQYSIIYDEYMMDTVISLLTGLSDSQVRAFRHTSTLAAMKLMTALVNVALNLSIHQDNTQRQYEAERNKMIGKRANERLELLLQKRKELQENQDEIENMMNSIFKGIFVHRYRDAIAEIRAICIEEIGVWMKMYSDAFLNDSYLKYVGWTLHDRQGEVRLKCLKALQSLYTNRELFPKLELFTNRFKDRIVSMTLDKEYDVAVEAIRLVTLILHGSEEALSNEDCENVYHLVYSAHRPVAVAAGEFLHKKLFSRHDPQAEEALAKRRGRNSPNGNLIRMLVLFFLESELHEHAAYLVDSLWESSQELLKDWECMTELLLEEPVQGEEAMSDRQESALIELMVCTIRQAAEAHPPVGRGTGKRVLTAKERKTQIDDRNKLTEHFIITLPMLLSKYSADAEKVANLLQIPQYFDLEIYSTGRMEKHLDALLKQIKFVVEKHVESDVLEACSKTYSILCNEEYTIQNRVDIARSQLIDEFVDRFNHSVEDLLQEGEEADDDDIYNVLSTLKRLTSFQNAHDLTKWDLFGNCYRLLKTGIEHGAMPEQIVVQALQCSHYSILWQLVKITDGSPSKEDLLVLRKTVKSFLAVCQQCLSNVNTPVKEQAFMLLCDLLMIFSHQLMTGGREGLQPLVFNPDTGLQSELLSFVMDHVFIDQDEENQSMEGDEEDEANKIEALHKRRNLLAAFSKLIIYDIVDMHAAADIFKHYMKYYNDYGDIIKETLSKTRQIDKIQCAKTLILSLQQLFNELVQEQGPNLDRTSAHVSGIKELARRFALTFGLDQIKTREAVATLHKDGIEFAFKYQNQKGQEYPPPNLAFLEVLSEFSSKLLRQDKKTVHSYLEKFLTEQMMERREDVWLPLISYRNSLVTGGEDDRMSVNSGSSSSKTSSVRNKKGRPPLHKKRVEDESLDNTWLNRTDTMIQTPGPLPAPQLTSTVLRENSRPMGDQIQEPESEHGSEPDFLHNPQMQISWLGQPKLEDLNRKDRTGMNYMKVRTGVRHAVRGLMEEDAEPIFEDVMMSSRSQLEDMNEEFEDTMVIDLPPSRNRRERAELRPDFFDSAAIIEDDSGFGMPMF

SEQ ID NO: 1992 - protein, 209 aa, Homo sapiens
MVDYLANKPKGQNSLALHKVIMVGSGGVGKSALTLQFMYDEFVEDYEPTKADSYRKKVVLDGEEVQIDILDTAGQEDYAAIRDNYFRSGEGFLCVFSITEMESFAATADFREQILRVKEDENVPFLLVGNKSDLEDKRQVSVEEAKNRAEQWNVNYVETSAKTRANVDKVFFDLMREIRARKMEDSKEKNGKKKRKSLAKRIRERCCIL

SEQ ID NO: 1993 - DNA, 10891 bp, Homo sapiens
agccgctgagaggctctgcgtgtgcgtgtgcgcgggtgacgccgtgtgtgtgcgagtgtgtgtgtgtgtgtgcgcgcgcgcgtgtgagagagagaaagggagagagagagggggactctgtgtgagggaaagaaaacaatttctcctgctctgcagcttctgttcaggatcaatgtgactctaagaacaaatggatgaatgaatatccatatgaagagaaaaacaataaagaatatcaacacctttgagaacagaatgttaatgcttgatgggatgccggcagtcagagtcaaaacagagcttttggaatctgaacaagggtctccaaacgtccacaactatcccgatatggaagccgttcccctgttgctaaataatgtgaaaggggagcccccggaggactcgttatctgtagatcacttccaaacacaaactgagccagtggacttgtcaataaacaaagccaggacgtcccctactgccgtttcatcctccccagtttccatgacagcatctgcctcctcaccttcttcaacttcaacctcttcatcgtcttctagtcgtctagcctcatccccaactgttatcacatcagtatcttcagcgtcatcttcgtcaacagtattaactccagggccccttgtggcctctgcatctggtgttggaggccagcagtttttgcacattatccatcccgtaccgccttcaagtcccatgaatttacagtctaacaaactgagtcatgttcaccgcatccccgtggtggtacagtcggtgcctgttgtctacacagctgtaaggtcacctggaaatgtgaacaacactattgtcgtgccgcttttggaggatgggagaggccatggcaaagcacaaatggacccccgaggcctatctcccagacaaagtaaaagtgacagtgatgatgatgacctgccaaatgtgaccttagatagcgttaatgaaactggatctacggccctttccatagccagagcagtacaagaggtacatccgtccccagtatcaagggtccggggcaatcgaatgaataatcaaaagtttccttgttcaatttcaccatttagtattgagagcacaagacgccagagacggtctgaatccccagactccagaaaacggcgtatccacagatgtgattttgagggatgcaacaaagtgtacacaaaaagttctcacctgaaggctcaccggaggacacatacaggagagaaaccttacaagtgtacctgggaaggctgcacctggaagttcgctcgttcagatgaactgacgaggcattaccgcaaacatacgggagtgaagccattcaagtgcgcggactgtgatcgcagcttttcccggtcagatcatttggccctgcaccgccggaggcatatgttggtgtgaggaatgctacctgtccagctgagcgtaagagctggatctcttagcggcacccaattcagcagggctgaatccccttcacagtgttaacacaaaagggcatcaccatcccacgatgtctgaaaccagagcaggaaaaagaaggcacacttcttttggtctgaaggtaacccccatcatgactagacgagaaccgtctttacccggcctgggagctcagtgacataaatgctgaagagacaggcattgttttccgtgctgtgtcctctgccatttaaagatgtttgtagcttgtacattttctgagctgtcagacattttgttattgataccttaaaggtcacctaccacaaattgatggctagagcaagaccttttaaatttggatgaatctcccatcatcccatcccttaacccctttttacagaaattttagttacaatctgagtaagctagaacacacatccaatctgttaccagcaagcagcatgaaagtagaaacgaagaagcagatggagaggtcccattacctgcaaagaaagggcactcaggcagccctttgcaatcgcgatggcagccactagatatcactctcaacttgtcattctgccatgccctgaagaaaaccaacattgaatctttcatttgtttgtcgttgattgtttttgttttgtttcgattctgttttgttcatctgttcgagcagaggggcagttgaagtctcgtcctggtctctgccctggcatggactggcacagaggtgttctgtagttgaataggaagagcctgtctaaaaaactactgccccacttcaaattgcagtgttctgtcacctaggcatcatctcttcctgcccctagtatttgattacaaggaaccaggggaaaaaaactttcttagacacactggcaccaaggtaagaggtggggctgcccaggcaaagtcagtgaacatgaaaactcagacaaagcagagatggaaataatgcgcctcttgaggagaaaagcaataatgaataaaaggactttcctacaataacttcactgaggactcacgttaccaattttcatacttactaaagggattgtaaaaaacaccccagcattttaggtgtcttggttccatttacagcactgaggtaatctttctgctgtttgttgtcctgcttggttgagtaccacaattaaagattatgctccccttttcttgtttgaaaacagttatttggtgactagaaaggcaagggaggcatagccgggaattaactcttcggttaatgggtcagttctccttggaactgaatcagtggaaagagaatgcttcccatagaaagcccgacatggtgctagtttcctctcttggagagccaaggataagtgactctccaataggttcttctataccgatttcattttctaaactgtatcaggacccaggtgtcctgcattggcatctgcagggatattgaacccactcatcctgtgcagaggatgagaggaaggtgttagttccatcagccccataaaattatgaacctttttgcaactaggaacatatacagtaaacaagcaatacatcaccaacgagcattctttcagaaaaattaccatatttttgtccccaccacaagctgggtttttttccagctttctgtggctgaggggctggtgagattttttgttgttattgttgttgttgctagaattttttatagcttagatataaaaggtctccaacaaagacctttgcaatatattttaattacaaacacttgattttgggaattgcacatattaacctcacaatattactagctcatttttaaatgtctggacattctgaaataatttccggttacagaattaccctttttaggatcatcttctaattcagataatcttattctgatgaagcgagaactatgaacgttgaaacaaggacaatttgtgttggatggtattcaaaaggaattttttaaaacattaagcaacagtgtaatgattttcaggtcaaattatggcttcacaaatatgtgctctatattgtctgccaggtctcaaaaattcatcaagcaatttccctccaacaagggctgcagttctagtgataaatagcatctttagctgcacagtctactactcatcaaccagtgggttttttttagcacctggaaagtttttttgtactatatgcaactcctacttcacattgcctgtgaccattcagaatagaaaaaggtctgttgatgcatgccagtgctggttactagtcagtgacagagaacacagagagggacaaacacagccatgaaccccctggcactagtaccagcacctagttggcaagtagtgggtgcatctctcaagtgaagtgtagatttgtatttagtcctgcttgctctcataaaaagagccagttcttttctctgctgaaagatgtcttgagagtattacaggtagacttggtttttagaattcataaaactgacaggcaggggaatcttcctgagtgacagcttggtttaaatttagcacagaactagatgagttgcacttttctaataacataggatggatttggggaagggaacattttccctcatcctctgaaagtggaaaccagactgagatggtaagttaactgataaaacctgtcagcattccatcattttccccttttgacgtatcagtacttctaagaagggatctaagcacaattaagtgaattgagtccctggtctagcctcaggaactgaaacttctttggggcttgtcttgagacgtggcaaattctccttggtgagttttctaaaagtatttccccatggaaaggagaaagtggtttgggacagaaagaaatggaatgtcttcagtcatggaagagcctccatttcatctcatgtccatttctagcctctttcaaaaagcacagtgcatcatgagcaacagaaaagcagtagaatcctaaaggacataacagttgttccgtaactagaagcattctttgattttaaatttgaagctgttcagtttgcagctggggatatgtgcatggttgggaacttatacacatagagccattaactacttaagcagctgcagtagacctgattttctgtttgcagtatagagattgatttcaagggagttacattatttgaaaagttatgactttcagcctttgaggttttaagaatcccttttcatggtctgatcttaagttgtttgaaaaaagattcacgcttctgcatccacctctgccctcattctgtcaattgtgtgtggactctgagaagcctgcttgataacttgtcttaagttctattaaggcagttagactgagatttctaatgacttcaccataaagattatacttctgcctggcgtcgtttctataaaacactataggacatttgttttcaaaagcagttgagtaacagcaacataaaccacattttttaaaaaaatgagcacttttcattcacttgaaagcttaagtgggaaaaaggaagatgattgtcaggggaaaaacttacaaaatgctacagtgtttacaaatgccagttccaggtgattagaaaggccgttttcattatggttcagatttggaatagcttatgcaaagattgtgttcatttttatacaattctttttaactttaaattgccatctgtgttttaaacataattctgcactttggaatcagttcattagaatgataacatttatatggataaagatgcagtattccttattctgtacttgatttattatacttaccaaagctgcaactgaataaatctggtgaggtgaggccttcaaaatgtattaatacgcctttgttatgttgttatgactgcttagaaatgtagccatgatgttgttctaaagatgtcttaacatttatagtgaggattgacagaaattaagcagtgttaagaataccagcatccatgttacagtctgcgtataagggactgaatgtgaggtaactcttatgaatcataataggcccagaaagccttaatattcatagttcataatccagtctcagattttgctcttcaatgttgcctgtaaacttagcaggtaaatgtattctagtataaaacatcattgaccaaatctcttcctttagtttttctgaggtagtgcatcccattaaaaaagtctcttcaattagatttggctttagtttagaaaggggtttggtaagtcatgtcttccatatgacatttctactcatccccacactgccttccacttaacctgtacagacagccccaacacatgcacatgtgtgtacacaactgtatatgcagcagccagtgggctaacaaatatcagcaaagaacttttttaaaaagaatttgtaataatccgtgctgtctagaaatgtgagttacttaccttattaggaaaccggcttataatactatatatgactctgcctgcattttatagttaagaaatgtacataaaaattgctatattttcacagtttcattataatgtctgtttagtaacccatgtccactgatactttaaatatgctaattactgagcaattgcaatagaaatccagattttcataagaaaatgaaatagaaggatactgcatctttaaaaaatagagtgaagatattttactgtattcgtaacatatgtgatagtggaaaaagtattttcaaactcacaaattttacagaggttgtaaatagtttgatgaagtatgttgggaaagagagcttctagttttcatcacaataaaaagaaaaaacttgttcagatatgccttgtatatcttacacacaatgagtgaaattgccatgggaactctgtccaactttgtcagagcatgctcttcgtgttctgttcaaaatagagtggccacttgtcatggtttagccaggatggtttaaaatataatgaagtcattttaagttgcagacaactgattccaaactagtaatgtcttttcctgaaaagggcaaaacagctgcacaggattttgcttgtactaaagaggagcatcttacaattgttctcttttctcagttatctccctcctcaacagagtgtgaacaaccatacaggtgtttattcttgttttattccagggagactgcttttaggtataactacatgttgacaagattaagtgctgtggatatggccacgtgttaaaggaatctatactcgcaataggaataagctaatgcccattttcagaaataaattaaatgctgaaagtgcctgtcagtaaaccttatgaccaatgagatattcctatacttttacacagcaataattcttaataagactgggttttttcctgcacatgtgaacacacacacacatacacacagagagagtaaatacatacacatagtaaatcaaatctgttcacatgcccacaaaaaacgcttttatagctttcaaatatacctaatcttgtttacattaacatttcttaatttgatctttctaacttgcagaacgttaagaacacaaatctgaacattaagtttatcttcagtgaacactattgcatatggtaattataatttccagataaaaagttgactgtcatttgccccaaacttatgaaacagtatgtatgattcaaaaagttttgctcagttaaaaacaccaatttatttggcgcaaaagactgaaggatatttgtttgcttgttcattttatccactcatatcaaacgcacaaattcatctttacatttcttcattcccctttcccctaatatttcctattatcatcttaagaatcattttggaatgaatattgacagaatcatttctccccaaaaagtctgttgaagtaccactgacacttagtaagcctagcctttaaccatctttgcagttagtcctaaaaattaccagatgcacattcagaagctcacaggttttttcctgtaattactgtactgctaaaagtggagtcatggatagaaatatacaatgagactatatgaatagacatgaaccctggaaattctccaaccctgccatctcagagcacaaattcacccaaacaagctactgaggctatcagtaaaattatactcatggagagtcacacatcgggtaagggcaattttaaaagtaggactgtgattaaacattcaggctttagacttccatgatggactcagaccacaggcctcaaaaaaacatccactgttttctcctcccaatgttagaaagaagaaaagggagacggaaatgtaccaggataagggggtaaaataaccaattaagtgtcaaaggaaagctgctgggttccttaatctcactgaagtcaagtcttctgactgggcttcttaccatgtgttgtctgaaaaaactaaagtaccttgaaaggttacacattcagcaaaccatgaagataatagctattctttattaaacactgtgtgccaagcaatagactaggcaatttttagatacgttacctgcaacctgtacaacatttctacactttatggatgggaaacggagacatgggaagtgtggctgagttgttcatggatgtagaaatagtaaacggcagagtaggaaagtgaaaccgcctatctctgacctggaggtctgcctgtatctttcccactccaccacactgcacgtgggtgtcccgaaaccaccttcccagattcctgactctcagtaattttattatggacaacatgcatgagtagtcatcatatttttcaagtgaaatatcgggacatgatataacacatgacttaacaatggtactgaatatttgaaatcaggcctttcccggaaaatcatgcatgaaggatcattataaacaaacaatagcaaccagttgtctccccgaacttgtcacttttctcataaatgtctggcctggagctccaaaatcatccaaatacttagtagcattttagcctgagtacactttctcagttcctcaactctttgtatacctttccaccaatatagacattctagaatctgcttcagatgcatttgaaattttcacccccatggaactagtgattaatatcagagcccactcttgcagttggtaatggggtggcaatcaaacgttcagatgatgataaaggagagataatggataattctttttcagagttctcacttaacagctctgttgtggaatgttttaaatagtcttataaataatttgtttatagtattgttgttagtttaattgaattttatgtaagaagctgtccaacatcagagaaatgaaattcctcccactttctgtgtagaacaaggtctctgacagtattgattcatggaagtactaatggacttagaaaacattaagagaatgtcatttctcatagtgtttctgtttctgaaaatgaatctcctgaattattatctttctccctgttacttggctggggaaagagatagaagctgtataaacaaattctcttccatgctcaaagcaagtgttccatgtgcacaacctgctgcagactggggcccttctcagttaattgggtttcacaagcaataatttctccacaacaaaaaccacaacttgaagtgagttgaaaagagatcaatagtggaaacagtcgcctcagtactttttctttctggatttcatctctagaaatttgaagtgtttgagacagagtccaccctttgtgcaaggcgagaaccaatgaatggactccttgtgtgaattattgcatcttcttccaaagcaggttcatcaagactttcacagagattcatttttgttgagaagtaagggttaataggaggatagaatttggatccaaatctagtgataaaagtgtccaagcaatcaaaaagtaagatattttagggacataccaacatcttccctttctgctaatttcatgctccaaagatatggcaaaaaaaaaaatcataaaaagtgcttttgccctacttgtgttctagttttcccatggcagaattttgtaattacatccagaatatagtgtatattttgttcctcaaactttattacattggatggatattgttgaactggggcactggtgcctatattcaaggctctttcctatcaacgtgtctgtccacgatttgttgtgtttaaagcttcattttgaaaaatcactgtccccctgtggggtagtgactgtattgttttgttcatgtctatgtgggacacattgcatcacatggcaaaccaactctctgtggatgtgagataagtacttataaaaccagcttgaaaacatcgtcttatgtattatgtcatcctgcatcataatgcaattatgtgtatcataacatgctcatttaaaaaaagagaaaccagcaaattcatgtttgtccatagaagaatgtactcagaactttgtgttgtgaaacgatgagaacagaccacctttaagatacccacctgccacttaaaatgacttagttataattagtagtagtctagacgttgttcttggtgtgtgggggtcaattctaacgtcatgttcttttgaataaatctctcagtcatatttgaaaaaaaaatacatgggaataaagaaaaatatcatctttggccaaatcaagcaggcatcttttttcttttccttgacgtttagctcattatacgtggtgattggatcacgagatctgtccgtgtgaaaatacagaaacatcctttagtttacaaaacagttattctaggcttgaagcctctgaacagcaaattgaatagatgggctgcatctgatttgctttatggatgtaattttacaaaacactcttgggtctctgaccccagggagttaagagtgcccagaggaggtcctacacattaaaggataaagccccccagtgatgctggcaagcaaatgtgttgagttcttaaatcttcatttggttttctgttcaggattttaattgcaaatgaatttatttctccagtttatctaaagacctaatttcccaatagtttcctctgcatttatatactctgtagtgtttaggcaaccctgttataagtttattaatattatgtaagtgttgttcttgtatttatgtatagtgtatgtattgtaaatatactcagagcttttttccttttactgtaaaatggtgatttttttgccctatgataatgtaaagggagaccctcctaatgagattctctcagaggatgattattccagtctattctcagagatttaaatgaacaagtgttattgtttttaatggtgtctcagacatattctgttggtgcattgcttttctgtattcaactttcctatgaattgagctgtgaactgaaatagagtttaaacctttaactgtatgcatttgtataattatctgaatgaaggcatgaaggttaaataaagcattttgtatggaacaaaaaacaaaactccctaactgactcagacactttggaaatcatagttattaaccattctaattaaacctttgttatgaaaagtttta

SEQ ID NO: 1994 - protein, 402 aa, Homo sapiens
MNIHMKRKTIKNINTFENRMLMLDGMPAVRVKTELLESEQGSPNVHNYPDMEAVPLLLNNVKGEPPEDSLSVDHFQTQTEPVDLSINKARTSPTAVSSSPVSMTASASSPSSTSTSSSSSSRLASSPTVITSVSSASSSSTVLTPGPLVASASGVGGQQFLHIIHPVPPSSPMNLQSNKLSHVHRIPVVVQSVPVVYTAVRSPGNVNNTIVVPLLEDGRGHGKAQMDPRGLSPRQSKSDSDDDDLLNVTLDSVNETGSTALSIARAVQEVHPSPVSRVRGNRMNNQKFPCSISPFSIESTRRQRRSESPDSRKRRIHRCDFEGCNKVYTKSSHLKAHRRTHTGEKPYKCTWEGCTWKFARSDELTRHYRKHTGVKPFKCADCDRSFSRSDHLALHRRRHMLV

SEQ ID NO: 1995 - DNA, 1597 bp, Homo sapiens
agccgctgagaggctctgcgtgtgcgtgtgcgcgggtgacgccgtgtgtgtgcgagtgtgtgtgtgtgtgtgcgcgcgcgcgtgtgagagagagaaagggagagagagagggggactctgtgtgagggaaagaaaacaatttctcctgctctgcagcttctgttcaggatcaatgtgactctaagaacaaatggatgaatgaatatccatatgaagagaaaaacaataaagaatatcaacacctttgagaacagaatgttaatgcttgatgggatgccggcagtcagagtcaaaacagagcttttggaatctgaacaagggtctccaaacgtccacaactatcccgatatggaagccgttcccctgttgctaaataatgtgaaaggggagcccccggaggactcgttatctgtagatcacttccaaacacaaactgagccagtggacttgtcaataaacaaagccaggacgtcccctactgccgtttcatcctccccagtttccatgacagcatctgcctcctcaccttcttcaacttcaacctcttcatcgtcttctagtcgtctagcctcatccccaactgttatcacatcagtatcttcagcgtcatcttcgtcaacagtattaactccagggccccttgtggcctctgcatctggtgttggaggccagcagtttttgcacattatccatcccgtaccgccttcaagtcccatgaatttacagtctaacaaactgagtcatgttcaccgcatccccgtggtggtacagtcggtgcctgttgtctacacagctgtaaggtcacctggaaatgtgaacaacactattgtcgtgccgcttttggaggatgggagaggccatggcaaagcacaaatggacccccgaggcctatctcccagacaaagtaaaagtgacagtgatgatgatgacctgccaaatgtgaccttagatagcgttaatgaaactggatctacggccctttccatagccagagcagtacaagagtaagtatcacattcacaggatgaattaagaattgccaaggtgttcaatggataatggaaactgcagcatctcctgtcccccagccatgtcattctagctgtgaactggcacgaatgtcagcagcttttcattcagctgaatgctctttgggagattagggcagagaatggagtgttttaatgagttggaaattcatgctttgatgagatataagacctatgtgcatcttttctaatacctcctgcacccttctcctgaactctgcaaaaaaaaaaaaattgttatttttgaatgtcactatttgattatcatcatcattattattacacaaagtcaagggaaatatggcaaagtattgttatcttgttttgataggaaattacagaatagctttttggaagatttaaatttggaaaataatatgttcatcctttgaaaagtagtactcatatgttatttttaaatgaatcttttctctgtccttttacctggaccgcagggttagatttcagccctcgtttattgaaaatagctgcttttctatcagtcaaccttgtacctagaattgaacctaaatgattgaaaaaaaaaa

SEQ ID NO: 1996 - protein, 269 aa, Homo sapiens
MNIHMKRKTIKNINTFENRMLMLDGMPAVRVKTELLESEQGSPNVHNYPDMEAVPLLLNNVKGEPPEDSLSVDHFQTQTEPVDLSINKARTSPTAVSSSPVSMTASASSPSSTSTSSSSSSRLASSPTVITSVSSASSSSTVLTPGPLVASASGVGGQQFLHIIHPVPPSSPMNLQSNKLSHVHRIPVVVQSVPVVYTAVRSPGNVNNTIVVPLLEDGRGHGKAQMDPRGLSPRQSKSDSDDDDLPNVTLDSVNETGSTALSIARAVQE

SEQ ID NO: 1997 - DNA, 1579 bp, Homo sapiens
aaaacactaaggggagcgcgcgaagctgaacttggcgctcgatgggggccgttagccgccctagagcgcgcggagccgcagaggcgtagctggactacaacgcagtgcatctcgggaggccaactcgactggactgggtgagaggacagaggtggctcgatgggcggcccgaaggccggggatcatggcgggaaggcgggcccagccaggttcagccccgccccgacccgccgctccccacccccggccggcctcgcgtgccttcccgcagcactgccgtccccgggatgctgagcgcccaccgtctccccgcagccccctcatgcccggctgcgagctgcccgtgggcacctgcccggacatgtgcccggccgccgagcgcgcccagcgcgaaagggagcaccgcctgcaccgcttggaggtggtgccgggttgccgccaggacccgccccgcgcggatccgcagcgcgcggtgaaggagtacagccgacccgccgccggcaagccccggcccccgcccagccagttgcgtccgccctccgtgctgctggccaccgtgcgctacctggccggtgaggtggcggagagcgccgacatcgcccgcgccgaggtggccagcttcgtggcagaccgcttgcgagctgtgcgcctggacctggcgctgcagggagcgggcgacgccgaggcagcggtggtgctggaggcggcgctggccacgctgctggccgtagtggcgcggctcgggcccgacgcggcgcggggacccgcggacccggtgctgctgcaggcccaggtgcaggagggcttcggctcgctgcggcgctgctacgcgcggggcgccgggccgcacccccgccaacccgccttccagggcctctttctgctctataacctgggtgagtcgggatcctggcggctgggcagagcgtggggacaggagcccaccatgacagtggaggctcggtggaagccctgcatgaggttctacagctgcctgctgccctgcgcgcctgcccgcccctccgcaaggccttggcggtagatgctgccttccgagagggcaatgctgcccgcctgttccgtctgctccagaccctgccctacctgccaagttgcgctgtgcagtgccatgtgggccatgcccgccgggaagccctggcccgcttcgctcgtgcctttagcacccccaagggccagaccttgcctctgggcttcatggtcaacctcttggccctggatggactcagggaagcacgggacctgtgccaggcccacgggctgcccttggacggagaggagagagttgtgttcctgaggggtcgctacgtggaggaagggctaccgcctgccagtacgtgcaaggtgttagtggagagcaaacttcgaggacgtaccctggaggaggtggtcatggcagaggaggaagatgagggcacggacagacctgggtccccagcctgaggagggagcgtgagcctcccagagccccaggactgggccagagcacttaggtttctttttccatggtttccaggtaataaaaggaacttgttttgttggtaaaaaaaaaaaaaaaaaa

SEQ ID NO: 1998 - protein, 285 aa, Homo sapiens
MAGRRAQPGSAPPRPAAPHPRPASRAFPQHCRPRDAERPPSPRSPLMPGCELPVGTCPDMCPAAERAQREREHRLHRLEVVPGCRQDPPRADPQRAVKEYSRPAAGKPRPPPSQLRPPSVLLATVRYLAGEVAESADIARAEVASFVADRLRAVRLDLALQGAGDAEAAVVLEAALATLLAVVARLGPDAARGPADPVLLQAQVQEGFGSLRRCYARGAGPHPRQPAFQGLFLLYNLGESGSWRLGRAWGQEPTMTVEARWKPCMRFYSCLLPCAPARPSARPWR

SEQ ID NO: 1999 - DNA, 2380 bp, Homo sapiens
ggaaaacttgtctctgcgttgtggggaggacgcgcgctcgcgcgggattttcaagcgtaggcccccgggaactcgagctgccatgagcctctgggtggacaagtatcggccctgctccttgggacggctggactatcacaaggagcaggcggcccagctgcggaacctggtgcagtgtggtgactttcctcatctgttagtgtacggaccatcaggtgctggaaaaaagacaagaattatgtgtattctacgtgaactttatggtgttggagtggaaaaattgagaattgaacatcagaccatcacaactccatctaaaaaaaaaattgaaattagcaccattgcaagtaactaccaccttgaagttaatcctagtgatgctggaaatagtgaccgagtagtcattcaggagatgttgaaaacagtggcacaatcacaacaacttgaaacaaactctcaaagggattttaaagtggtattattgacagaagttgacaaactcaccaaagatgctcagcatgccttgcgaagaaccatggaaaaatatatgtctacctgcagattgatcttgtgctgcaattctacatctaaagtgatcccacctattcgtagtaggtgcttggcggttcgtgtgcctgctcccagcattgaagatatttgccacgtgttatctactgtgtgtaagaaggaaggtctgaatcttccttcacaactggctcatagacttgcagagaagtcttgtagaaatctcagaaaagccctgcttatgtgtgaagcctgcagagtgcaacaatatccttttactgcagatcaagaaatccctgagacagattgggaggtgtatctgagggagactgcaaatgctattgtcagtcagcaaactccacaaaggctccttgaagttcgtggaaggctgtatgagcttctaactcattgtattcctcctgagataataatgaagggccttctctcagaactgttacataattgtgatggacaactgaaaggggaggtggcacaaatggcagcttactatgagcatcgtctacagctgggtagcaaagccatttatcacttggaagcgtttgtggccaaattcatggcactttataagaagttcatggaggatggattggaaggcatgatgttctgacttctgtcagttattcttgcaaagatttctcagtatcagtatttacatacagcttatattaaaagagctgtgggtaaattaactgaacttaatcatgtcgtatttgcgtttttttggtaataacttctctgtgaactattaatcatcctctgagttaaataattgctcctatactattgaagtatgtagttttgtacataacttagagactttagagtctaagaaaatgatcttaatttactttaagcattggttattcaagtattcattgttgatcctcctattctcttccgtctaatctctcacctgctaaaggagatttacacattagaaagcaaagattattttcatttatccagatgaccattttctgccacaggtaacatgattgtttgacacaccattatatttaattctagtttctctcaatgaataattgtatttttgtaggaaatgtaagatttcattctgaaacataattattggtatggacaaaattgcagataccatttctgttgaggctgcagatttccaacttttatttcagtggttcagattagtattaggtcggtactaagaaataagcatgttttcactaatttaagtacttgagactcttgaagaaaattcagaatgaagttctggagaaaggtatgttactgtagtaattactctttgaacaggttttgtgttttgtcattagctctgccctttttaattaaatattttggttcatggaccaaagggtttacttgacaaatttgtgtgacagactccgaacaattcctttactacgaagtataatttataaaataaaatatacccattttaagggtacagtttgatttttgaccagtgaaactatgatcccaatcaaggtatagatgccgtcaccccaaaaagttccctccatatccctttgcagtcagttcatccctaccctggcccagatgatcactgatcttgtcattatagatgagttttgccagttcaagaatttaatggaatcagatattgtaagcattcttgtgtaatacttcattctctctcattattgagattcatccatattgttgaatgtttcactagttaatgtttattgttcaatatttttgtatatacttttaaagcctattcacttgctgatggatctttggtttgtttccaggtttggttattatgaataaagttgctgtgaatacttacgtgtaaaaaaaaaaaaaaaaa

SEQ ID NO: 2000 - protein, 356 aa, Homo sapiens
MSLWVDKYRPCSLGRLDYHKEQAAQLRNLVQCGDFPHLLVYGPSGAGKKTRIMCILRELYGVGVEKLRIEHQTITTPSKKKIEISTIASNYHLEVNPSDAGNSDRVVIQEMLKTVAQSQQLETNSQRDFKVVLLTEVDKLTKDAQHALRRTMEKYMSTCRLILCCNSTSKVIPPIRSRCLAVRVPAPSIEDICHVLSTVCKKEGLNLPSQLAHRLAEKSCRNLRKALLMCEACRVQQYPFTADQEIPETDWEVYLRETANAIVSQQTPQRLLEVRGRLYELLTHCIPPEIIMKGLLSELLHNCDGQLKGEVAQMAAYYEHRLQLGSKAIYHLEAFVAKFMALYKKFMEDGLEGMMF

SEQ ID NO: 2001 - DNA, 3224 bp, Homo sapiens
ccccgctcgcgactccccaccccccagggctccctaaagagggccacgagctgcgaaagggcgggaaaggcagttggagaagaggtaagcggttactcactccatggctgcagcaaggagaggcggcggcggcctcggctgaagaaagaagaaatcttcccaaggctgcagacaccgacggatttgctttgggagccagagtagctgccgccaccagagtccggagccatgagcgggtttaattttggaggcactggggcccctacaggcgggttcacgtttggcactgcaaagacggcaacaaccacacctgctacagggttttctttctccacctctggcactggagggtttaattttggggctcccttccaaccagccacaagtaccccttccaccggcctgttctcacttgccacccagactccggccacacagacgacaggcttcacttttggaacagcgactcttgcttcggggggaactggattttctttggggatcggtgcttcaaagctcaacttgagcaacacagctgccaccccagccatggcaaaccccagcggctttgggctgggcagcagcaacctcactaatgccatatcgagcaccgtcacctccagccagggcacagcacccaccggctttgtgtttggcccctccaccacctctgtggctccagctaccacatctggaggcttctcattcactggtggaagcacggcccaaccctccggtttcaacattggctcagcagggaattcagcccagcccacggcacctgccacgttgcccttcactccggccacgccagcagccaccacagcaggtgccacacagccagctgctcccacacccacagccaccatcaccagtactgggcccagcctctttgcgtcaatagcaactgctccaacctcatctgccaccactggactctccctctgtacccctgtgaccacagcgggcgcccccactgctgggacacagggcttcagcttaaaggcacctggagcagcttccggcacctccacaacaacatccaccgctgccaccgccaccgccaccaccaccagcagcagcagcaccaccggctttgccttgaatttaaaaccactggcgccagccgggatccccagcaatacagcagctgccgtgaccgctccacctggccctggcgcagctgcaggggcggctgccagctccgccatgacctacgcgcagctggagagcctgatcaacaaatggagcctggagctagaggaccaggagcggcacttcctccagcaggccacccaggtcaacgcctgggaccgcacgctgatcgagaatggagaaaagatcaccagcctgcaccgcgaggtggagaaggtgaagctggaccagaagaggctggaccaggagctcgacttcatcctgtcccagcagaaggagctggaagacctgctgagcccactggaggagttggtcaaggagcagagcgggaccatctacctgcagcacgcggatgaggagcgtgagaaaacctacaagctggctgagaacatcgacgcacagctcaagcgcatggcccaggatctcaaggacatcatcgagcacctgaacacgtccggggcccccgccgacaccagtgacccactgcagcagatctgcaagatcctcaatgcgcacatggactcactgcagtggatcgaccagaactcggccctgctgcagaggaaggtggaggaggtgaccaaggtgtgcgagggccggcgcaaggagcaggagcgcagcttccggatcacctttgactgagcgacagcagccctggggcccgcaggtccctagggagttcatgaggggaatgcgccctgttgtctgtagtttggggttgtggcaagatacttgtttgtttctttctttctttcacatgactgcccttgacatgatcgctgtgtgctttgcgtttttccatttaggagggtattctgggccttctgcccaggcagcagcctcatgggtgtggcttctgtggctttcatttgagtatctttggccccttttcacctactgcgaccacccacctcatcctggctcagcctggtgatggagaagtgctgatggtcttggtcccagccagggtcgtgggggcagccactctctccaaagcatagtcataggtgtcatgaaaaaataccaaatgtaagagaacctccaagtcagggcgcagtggctcacccctgtaatctcagcactttgggtggccaaggcgggcagatgacttgaggtcaggagttcgagaccagcctggccaacatggtgaaaccccgtctctactaaaaatacaaaaattagtcaggtgtggtggacgcctgtgatctcaatctcagctactcgggaggctgaggcaggagaatcacttgaacccaggaggtgttgcagtgaaccaagatcacaccactgcactccagcctaggcaacagagactctgtctcaaaaaaaaaaaaaaaaaaaaagaaactcccaggagacagcagcctagttttcgagtgtgagcttgtgcttgtgaaagctaaccatgctaaccaccaaggcaaagcagcacagtgtgaatagaacagagcgggatcaagaatttcacagaagacaggtcagctgaggggcctgcacacacagggtgttgaggaaccacagatgggcgccgagaggcctgccttttgcctggcccaggctcacccccaccttgggcctcacctcctccaggaagccttcccagctacccgaagctcaggtggccttcttgcaggtccccgtagcaccctgagcctgtaccttgggtggcacttgttatgctatcctgtgctagccgtttgtgcctcgtctcgctgttagattgtgagttcccatgggcagagacccactgtcgttccccgtgtgtccccagcccggtccctgtcacatttgttaaatgaaagaacaatgaagcccagtgtaacgtcagtccacagaaatagccacagcttccagtggtggccgtagacttggctcggaacttagtggcaccagagtaactctagtcagttacagtaaaatccactgtgtgtggaaggcagaagctagcggttgtatcccaagcatcttttgtatttgtctttatactttgctgaattctctgaaatacctattactgtatgttgcttttctaaataaatgtattgtgaaaccaaaaaaaaaaaaaaaaa

SEQ ID NO: 2002 - protein, 522 aa, Homo sapiens [sequence omitted]

SEQ ID NO: 2003 - DNA, 3370 bp, Homo sapiens
ccccgctcgcgactccccaccccccagggctccctaaagagggccacgagctgcgaaagggcgggaaaggcagttggagaagaggtaagcggttactcactccatggctgcagcaaggagaggcggcggcggcctcggctgaagaaagaaggtgggagcggagagcgcaggcgtgaaacccaccttgtcccatccacatcaggacatcccagctggagttcaaccttcatcccttctgtggcagttaggagactgaatcaaggtccagagaaggtggaggaatcctgatactgagcgaaatcttcccaaggctgcagacaccgacggatttgctttgggagccagagtagctgccgccaccagagtccggagccatgagcgggtttaattttggaggcactggggcccctacaggcgggttcacgtttggcactgcaaagacggcaacaaccacacctgctacagggttttctttctccacctctggcactggagggtttaattttggggctcccttccaaccagccacaagtaccccttccaccggcctgttctcacttgccacccagactccggccacacagacgacaggcttcacttttggaacagcgactcttgcttcggggggaactggattttctttggggatcggtgcttcaaagctcaacttgagcaacacagctgccaccccagccatggcaaaccccagcggctttgggctgggcagcagcaacctcactaatgccatatcgagcaccgtcacctccagccagggcacagcacccaccggctttgtgtttggcccctccaccacctctgtggctccagctaccacatctggaggcttctcattcactggtggaagcacggcccaaccctccggtttcaacattggctcagcagggaattcagcccagcccacggcacctgccacgttgcccttcactccggccacgccagcagccaccacagcaggtgccacacagccagctgctcccacacccacagccaccatcaccagtactgggcccagcctctttgcgtcaatagcaactgctccaacctcatctgccaccactggactctccctctgtacccctgtgaccacagcgggcgcccccactgctgggacacagggcttcagcttaaaggcacctggagcagcttccggcacctccacaacaacatccaccgctgccaccgccaccgccaccaccaccagcagcagcagcaccaccggctttgccttgaatttaaaaccactggcgccagccgggatccccagcaatacagcagctgccgtgaccgctccacctggccctggcgcagctgcaggggcggctgccagctccgccatgacctacgcgcagctggagagcctgatcaacaaatggagcctggagctagaggaccaggagcggcacttcctccagcaggccacccaggtcaacgcctgggaccgcacgctgatcgagaatggagaaaagatcaccagcctgcaccgcgaggtggagaaggtgaagctggaccagaagaggctggaccaggagctcgacttcatcctgtcccagcagaaggagctggaagacctgctgagcccactggaggagttggtcaaggagcagagcgggaccatctacctgcagcacgcggatgaggagcgtgagaaaacctacaagctggctgagaacatcgacgcacagctcaagcgcatggcccaggatctcaaggacatcatcgagcacctgaacacgtccggggcccccgccgacaccagtgacccactgcagcagatctgcaagatcctcaatgcgcacatggactcactgcagtggatcgaccagaactcggccctgctgcagaggaaggtggaggaggtgaccaaggtgtgcgagggccggcgcaaggagcaggagcgcagcttccggatcacctttgactgagcgacagcagccctggggcccgcaggtccctagggagttcatgaggggaatgcgccctgttgtctgtagtttggggttgtggcaagatacttgtttgtttctttctttctttcacatgactgcccttgacatgatcgctgtgtgctttgcgtttttccatttaggagggtattctgggccttctgcccaggcagcagcctcatgggtgtggcttctgtggctttcatttgagtatctttggccccttttcacctactgcgaccacccacctcatcctggctcagcctggtgatggagaagtgctgatggtcttggtcccagccagggtcgtgggggcagccactctctccaaagcatagtcataggtgtcatgaaaaaataccaaatgtaagagaacctccaagtcagggcgcagtggctcacccctgtaatctcagcactttgggtggccaaggcgggcagatgacttgaggtcaggagttcgagaccagcctggccaacatggtgaaaccccgtctctactaaaaatacaaaaattagtcaggtgtggtggacgcctgtgatctcaatctcagctactcgggaggctgaggcaggagaatcacttgaacccaggaggtgttgcagtgaaccaagatcacaccactgcactccagcctaggcaacagagactctgtctcaaaaaaaaaaaaaaaaaaaaagaaactcccaggagacagcagcctagttttcgagtgtgagcttgtgcttgtgaaagctaaccatgctaaccaccaaggcaaagcagcacagtgtgaatagaacagagcgggatcaagaatttcacagaagacaggtcagctgaggggcctgcacacacagggtgttgaggaaccacagatgggcgccgagaggcctgccttttgcctggcccaggctcacccccaccttgggcctcacctcctccaggaagccttcccagctacccgaagctcaggtggccttcttgcaggtccccgtagcaccctgagcctgtaccttgggtggcacttgttatgctatcctgtgctagccgtttgtgcctcgtctcgctgttagattgtgagttcccatgggcagagacccactgtcgttccccgtgtgtccccagcccggtccctgtcacatttgttaaatgaaagaacaatgaagcccagtgtaacgtcagtccacagaaatagccacagcttccagtggtggccgtagacttggctcggaacttagtggcaccagagtaactctagtcagttacagtaaaatccactgtgtgtggaaggcagaagctagcggttgtatcccaagcatcttttgtatttgtctttatactttgctgaattctctgaaatacctattactgtatgttgcttttctaaataaatgtattgtgaaaccaaaaaaaaaaaaaaaaa

SEQ ID NO: 2004 - protein, 522 aa, Homo sapiens [sequence omitted]

SEQ ID NO: 2005 - DNA, 3248 bp, Homo sapiens
ccccgctcgcgactccccaccccccagggctccctaaagagggccacgagctgcgaaagggcgggaaaggcagttggagaagaggtaagcggttactcactccatggctgcagcaaggagaggcggcggcggcctcggctgaagaaagaaggtgggagcggagagcgcaggcgtgaaatcttcccaaggctgcagacaccgacggatttgctttgggagccagagtagctgccgccaccagagtccggagccatgagcgggtttaattttggaggcactggggcccctacaggcgggttcacgtttggcactgcaaagacggcaacaaccacacctgctacagggttttctttctccacctctggcactggagggtttaattttggggctcccttccaaccagccacaagtaccccttccaccggcctgttctcacttgccacccagactccggccacacagacgacaggcttcacttttggaacagcgactcttgcttcggggggaactggattttctttggggatcggtgcttcaaagctcaacttgagcaacacagctgccaccccagccatggcaaaccccagcggctttgggctgggcagcagcaacctcactaatgccatatcgagcaccgtcacctccagccagggcacagcacccaccggctttgtgtttggcccctccaccacctctgtggctccagctaccacatctggaggcttctcattcactggtggaagcacggcccaaccctccggtttcaacattggctcagcagggaattcagcccagcccacggcacctgccacgttgcccttcactccggccacgccagcagccaccacagcaggtgccacacagccagctgctcccacacccacagccaccatcaccagtactgggcccagcctctttgcgtcaatagcaactgctccaacctcatctgccaccactggactctccctctgtacccctgtgaccacagcgggcgcccccactgctgggacacagggcttcagcttaaaggcacctggagcagcttccggcacctccacaacaacatccaccgctgccaccgccaccgccaccaccaccagcagcagcagcaccaccggctttgccttgaatttaaaaccactggcgccagccgggatccccagcaatacagcagctgccgtgaccgctccacctggccctggcgcagctgcaggggcggctgccagctccgccatgacctacgcgcagctggagagcctgatcaacaaatggagcctggagctagaggaccaggagcggcacttcctccagcaggccacccaggtcaacgcctgggaccgcacgctgatcgagaatggagaaaagatcaccagcctgcaccgcgaggtggagaaggtgaagctggaccagaagaggctggaccaggagctcgacttcatcctgtcccagcagaaggagctggaagacctgctgagcccactggaggagttggtcaaggagcagagcgggaccatctacctgcagcacgcggatgaggagcgtgagaaaacctacaagctggctgagaacatcgacgcacagctcaagcgcatggcccaggatctcaaggacatcatcgagcacctgaacacgtccggggcccccgccgacaccagtgacccactgcagcagatctgcaagatcctcaatgcgcacatggactcactgcagtggatcgaccagaactcggccctgctgcagaggaaggtggaggaggtgaccaaggtgtgcgagggccggcgcaaggagcaggagcgcagcttccggatcacctttgactgagcgacagcagccctggggcccgcaggtccctagggagttcatgaggggaatgcgccctgttgtctgtagtttggggttgtggcaagatacttgtttgtttctttctttctttcacatgactgcccttgacatgatcgctgtgtgctttgcgtttttccatttaggagggtattctgggccttctgcccaggcagcagcctcatgggtgtggcttctgtggctttcatttgagtatctttggccccttttcacctactgcgaccacccacctcatcctggctcagcctggtgatggagaagtgctgatggtcttggtcccagccagggtcgtgggggcagccactctctccaaagcatagtcataggtgtcatgaaaaaataccaaatgtaagagaacctccaagtcagggcgcagtggctcacccctgtaatctcagcactttgggtggccaaggcgggcagatgacttgaggtcaggagttcgagaccagcctggccaacatggtgaaaccccgtctctactaaaaatacaaaaattagtcaggtgtggtggacgcctgtgatctcaatctcagctactcgggaggctgaggcaggagaatcacttgaacccaggaggtgttgcagtgaaccaagatcacaccactgcactccagcctaggcaacagagactctgtctcaaaaaaaaaaaaaaaaaaaaagaaactcccaggagacagcagcctagttttcgagtgtgagcttgtgcttgtgaaagctaaccatgctaaccaccaaggcaaagcagcacagtgtgaatagaacagagcgggatcaagaatttcacagaagacaggtcagctgaggggcctgcacacacagggtgttgaggaaccacagatgggcgccgagaggcctgccttttgcctggcccaggctcacccccaccttgggcctcacctcctccaggaagccttcccagctacccgaagctcaggtggccttcttgcaggtccccgtagcaccctgagcctgtaccttgggtggcacttgttatgctatcctgtgctagccgtttgtgcctcgtctcgctgttagattgtgagttcccatgggcagagacccactgtcgttccccgtgtgtccccagcccggtccctgtcacatttgttaaatgaaagaacaatgaagcccagtgtaacgtcagtccacagaaatagccacagcttccagtggtggccgtagacttggctcggaacttagtggcaccagagtaactctagtcagttacagtaaaatccactgtgtgtggaaggcagaagctagcggttgtatcccaagcatcttttgtatttgtctttatactttgctgaattctctgaaatacctattactgtatgttgcttttctaaataaatgtattgtgaaaccaaaaaaaaaaaaaaaaa

SEQ ID NO: 2006 - protein, 522 aa, Homo sapiens
MSGFNFGGTGAPTGGFTFGTAKTATTTPATGFSFSTSGTGGFNFGAPFQPATSTPSTGLFSLATQTPATQTTGFTFGTATLASGGTGFSLGIGASKLNLSNTAATPAMANPSGFGLGSSNLTNAISSTVTSSQGTAPTGFVFGPSTTSVAPATTSGGFSFTGGSTAQPSGFNIGSAGNSAQPTAPATLPFTPATPAATTAGATQPAAPTPTATITSTGPSLFASIATAPTSSATTGLSLCTPVTTAGAPTAGTQGFSLKAPGAASGTSTTTSTAATATATTTSSSSTTGFALNLKPLAPAGIPSNTAAAVTAPPGPGAAAGAAASSAMTYAQLESLINKWSLELEDQERHFLQQATQVNAWDRTLIENGEKITSLHREVEKVKLDQKRLDQELDFILSQQKELEDLLSPLEELVKEQSGTIYLQHADEEREKTYKLAENIDAQLKRMAQDLKDIIEHLNTSGAPADTSDPLQQICKILNAHMDSLQWIDQNSALLQRKVEEVTKVCEGRRKEQERSFRITFD

SEQ ID NO: 2007 - DNA, 3403 bp, Homo sapiens
ccccgctcgcgactccccaccccccagggctccctaaagagggccacgagctgcgaaagggcgggaaaggcagttggagaagaggtaagcggttactcactccatggctgcagcaaggagaggcggcggcggcctcggctgaagaaagaaggtgggagcggagagcgcaggcgtgccgaggtggatgtccgtcttttctctgttgcagaaacccaccttgtcccatccacatcaggacatcccagctggagttcaaccttcatcccttctgtggcagttaggagactgaatcaaggtccagagaaggtggaggaatcctgatactgagcgaaatcttcccaaggctgcagacaccgacggatttgctttgggagccagagtagctgccgccaccagagtccggagccatgagcgggtttaattttggaggcactggggcccctacaggcgggttcacgtttggcactgcaaagacggcaacaaccacacctgctacagggttttctttctccacctctggcactggagggtttaattttggggctcccttccaaccagccacaagtaccccttccaccggcctgttctcacttgccacccagactccggccacacagacgacaggcttcacttttggaacagcgactcttgcttcggggggaactggattttctttggggatcggtgcttcaaagctcaacttgagcaacacagctgccaccccagccatggcaaaccccagcggctttgggctgggcagcagcaacctcactaatgccatatcgagcaccgtcacctccagccagggcacagcacccaccggctttgtgtttggcccctccaccacctctgtggctccagctaccacatctggaggcttctcattcactggtggaagcacggcccaaccctccggtttcaacattggctcagcagggaattcagcccagcccacggcacctgccacgttgcccttcactccggccacgccagcagccaccacagcaggtgccacacagccagctgctcccacacccacagccaccatcaccagtactgggcccagcctctttgcgtcaatagcaactgctccaacctcatctgccaccactggactctccctctgtacccctgtgaccacagcgggcgcccccactgctgggacacagggcttcagcttaaaggcacctggagcagcttccggcacctccacaacaacatccaccgctgccaccgccaccgccaccaccaccagcagcagcagcaccaccggctttgccttgaatttaaaaccactggcgccagccgggatccccagcaatacagcagctgccgtgaccgctccacctggccctggcgcagctgcaggggcggctgccagctccgccatgacctacgcgcagctggagagcctgatcaacaaatggagcctggagctagaggaccaggagcggcacttcctccagcaggccacccaggtcaacgcctgggaccgcacgctgatcgagaatggagaaaagatcaccagcctgcaccgcgaggtggagaaggtgaagctggaccagaagaggctggaccaggagctcgacttcatcctgtcccagcagaaggagctggaagacctgctgagcccactggaggagttggtcaaggagcagagcgggaccatctacctgcagcacgcggatgaggagcgtgagaaaacctacaagctggctgagaacatcgacgcacagctcaagcgcatggcccaggatctcaaggacatcatcgagcacctgaacacgtccggggcccccgccgacaccagtgacccactgcagcagatctgcaagatcctcaatgcgcacatggactcactgcagtggatcgaccagaactcggccctgctgcagaggaaggtggaggaggtgaccaaggtgtgcgagggccggcgcaaggagcaggagcgcagcttccggatcacctttgactgagcgacagcagccctggggcccgcaggtccctagggagttcatgaggggaatgcgccctgttgtctgtagtttggggttgtggcaagatacttgtttgtttctttctttctttcacatgactgcccttgacatgatcgctgtgtgctttgcgtttttccatttaggagggtattctgggccttctgcccaggcagcagcctcatgggtgtggcttctgtggctttcatttgagtatctttggccccttttcacctactgcgaccacccacctcatcctggctcagcctggtgatggagaagtgctgatggtcttggtcccagccagggtcgtgggggcagccactctctccaaagcatagtcataggtgtcatgaaaaaataccaaatgtaagagaacctccaagtcagggcgcagtggctcacccctgtaatctcagcactttgggtggccaaggcgggcagatgacttgaggtcaggagttcgagaccagcctggccaacatggtgaaaccccgtctctactaaaaatacaaaaattagtcaggtgtggtggacgcctgtgatctcaatctcagctactcgggaggctgaggcaggagaatcacttgaacccaggaggtgttgcagtgaaccaagatcacaccactgcactccagcctaggcaacagagactctgtctcaaaaaaaaaaaaaaaaaaaaagaaactcccaggagacagcagcctagttttcgagtgtgagcttgtgcttgtgaaagctaaccatgctaaccaccaaggcaaagcagcacagtgtgaatagaacagagcgggatcaagaatttcacagaagacaggtcagctgaggggcctgcacacacagggtgttgaggaaccacagatgggcgccgagaggcctgccttttgcctggcccaggctcacccccaccttgggcctcacctcctccaggaagccttcccagctacccgaagctcaggtggccttcttgcaggtccccgtagcaccctgagcctgtaccttgggtggcacttgttatgctatcctgtgctagccgtttgtgcctcgtctcgctgttagattgtgagttcccatgggcagagacccactgtcgttccccgtgtgtccccagcccggtccctgtcacatttgttaaatgaaagaacaatgaagcccagtgtaacgtcagtccacagaaatagccacagcttccagtggtggccgtagacttggctcggaacttagtggcaccagagtaactctagtcagttacagtaaaatccactgtgtgtggaaggcagaagctagcggttgtatcccaagcatcttttgtatttgtctttatactttgctgaattctctgaaatacctattactgtatgttgcttttctaaataaatgtattgtgaaaccaaaaaaaaaaaaaaaaa

SEQ ID NO: 2008 - DNA, 1204 bp, Homo sapiens
atattttctcacggtgcctctcatttcccagagccgcctggagcccaaggctgtacacgtgccctgtgctgattctctgcctaggaaaggaccatgcagctagagatcaaagtggccctgaacttcatcatctcctacttgtacaacaagctgccccggcgccgggcagacctgtttggggaggagctagagcaggctttgaaaaagaaatatgaaggccactggtaccctgagaagccactgaaaggctctggcttccgctgtgttcacattggggagatggtggaccccgtggtggagctggccgccaagcggagtggcctggcagtggaagatgtgcgggccaatgtgcctgaggagctgagtgtctggattgatccctttgaggtgtcctaccagattggtgagaagggagctgtgaaagtgctgtacctggatgacagtgagggttgcggtgccccagagctggacaaggagatcaagagcagcttcaaccctgacgcccaggtgttcgtgcccattggcagccaggacagctccctgtccaactccccatcgccatcctttggccagtcacccagccctaccttcattccccgctccgctcagcccatcaccttcaccaccgcctccttcgctgccaccaaatttggctccactaagatgaagaaggggggcggggcagcaagtggtgggggtgtagccagcagtggggcgggtggccagcagccacaccagcagcctcgcatggcccgctcacccaccaacagcctgctgaagcacaagagcctctctctgtctatgcattcactgaacttcatcacggccaacccggcccctcagtcccagctctcacccaatgccaaggagttcgtgtacaacggtggtggctcacccagcctcttctttgatgcggccgatggcagggcagcggcaccccaggcccgtttggaggcagtggggctggcacctgcaacagcagcagctttgacatggcccaggtatttggaggtggtgccaacagcctcttcctggagaagacacccctttgtggaaggcctcagctacaacctgaacaccatgcagtatcccagccagcagttccagcccgtggtgctggccaactgaccatctacctgcccgtggggccaggagcacccaagaccacagaaaagagaaaggaaaggccaaaaaaaaaaaaacc

SEQ ID NO: 2009 - protein, 344 aa, Homo sapiens [sequence omitted]

SEQ ID NO: 2010 - DNA, 1051 bp, Homo sapiens
gtgcggtccgcgccaagccgtccccgccgacgccggctccccgcggctcgggtgacagcgtcgcggccgccggacgcagcgcggggcaggcgcgggcagagccgagcgcagcggaggctccggcggaggcgcggggaaaatggctgatgactttggcttcttctcgtcgtcggagagcggtgccccggaggcggcggaggaggacccggcggccgccttcctggcccagcaggagagcgagattgcaggcatagagaacgacgagggcttcggggcacctgccggcagccatgcggcccccgcgcagccgggccccacgagtggggctggttctgaggacatggggaccacagtcaatggagatgtgtttcaggaggccaacggtcctgctgatggctacgcagccattgcccaggctgacaggctgacccaggagcctgagagcatccgcaagtggcgagaggagcagaggaaacggctgcaagagctggatgctgcatctaaggtcacggaacaggaatggcgggagaaggccaagaaggacctggaggagtggaaccagcgccagagtgaacaagtagagaagaacaagatcaacaaccgggcatccgaggaggctttcgtgaaggaatccaaggaggagaccccaggcacagagtgggagaaggtggcccagctatgtgacttcaaccccaagagcagcaagcagtgcaaagatgtgtcccgcctgcgctcggtgctcatgtccctgaagcagacgccactgtcccgctaggtgcctgctaggtgcatggccacagagcatgggctgggcctgggcacaggaggagcagctgctttggtcggggtggagactcgcagcagctgctacccacagcctattccactcctccccatctccaggcgctgggaggggggccctcaccccatcacgcctcgctccctcctggccctctggtccagcccctcacgcctcctctcagtctactcaattgtgactgtccctcctgatgtattttttttcttggcttaaagggtgtgttgttgactc

SEQ ID NO: 2011 - protein, 211 aa, Homo sapiens
MADDFGFFSSSESGAPEAAEEDPAAAFLAQQESEIAGIENDEGFGAPAGSHAAPAQPGPTSGAGSEDMGTTVNGDVFQEANGPADGYAAIAQADRLTQEPESIRKWREEQRKRLQELDAASKVTEQEWREKAKKDLEEWNQRQSEQVEKNKINNRASEEAFVKESKEETPGTEWEKVAQLCDFNPKSSKQCKDVSRLRSVLMSLKQTPLSR

SEQ ID NO: 2012 - DNA, 1134 bp, Homo sapiens
cgcggggagccggcgtcggcggggacgggcttggcgcggaccgcacttcctctccgccaccgggcccggctccccgcggctcgggtgacagcgtcgcggccgccggacgcagcgcggggcaggcgcgggcagagccgagcgcagcggaggctccggcggaggcgcggggaaaatggctgatgactttggcttcttctcgtcgtcggagagcggtgccccggaggcggcggaggaggacccggcggccgccttcctggcccagcaggagagcgagattgcaggcatagagaacgacgagggcttcggggcacctgccggcagccatgcggcccccgcgcagccgggccccacgagtggggctggttctgaggacatggggaccacagtcaatggagatgtgtttcaggaggccaacggtcctgctgatggctacgcagccattgcccaggctgacaggctgacccaggagcctgagagcatccgcaagtggcgagaggagcagaggaaacggctgcaagagctggatgctgcatctaaggtcacggaacaggaatggcgggagaaggccaagaaggacctggaggagtggaaccagcgccagagtgaacaagtagagaagaacaagatcaacaaccggatcgctgacaaagcattctaccagcagccagatgctgatatcatcggctacgtggcatccgaggaggctttcgtgaaggaatccaaggaggagaccccaggcacagagtgggagaaggtggcccagctatgtgacttcaaccccaagagcagcaagcagtgcaaagatgtgtcccgcctgcgctcggtgctcatgtccctgaagcagacgccactgtcccgctaggtgcctgctaggtgcatggccacagagcatgggctgggcctgggcacaggaggagcagctgctttggtcggggtggagactcgcagcagctgctacccacagcctattccactcctccccatctccaggcgctgggaggggggccctcaccccatcacgcctcgctccctcctggccctctggtccagcccctcacgcctcctctcagtctactcaattgtgactgtccctcctgatgtattttttttcttggcttaaagggtgtgttgttg

SEQ ID NO: 2013 - protein, 229 aa, Homo sapiens
MADDFGFFSSSESGAPEAAEEDPAAAFLAQQESEIAGIENDEGFGAPAGSHAAPAQPGPTSGAGSEDMGTTVNGDVFQEANGPADGYAAIAQADRLTQEPESIRKWREEQRKRLQELDAASKVTEQEWREKAKKDLEEWNQRQSEQVEKNKINNRIADKAFYQQPDADIIGYVASEEAFVKESKEETPGTEWEKVAQLCDFNPKSSKQCKDVSRLRSVLMSLKQTPLSR

SEQ ID NO: 2014 - DNA, 7149 bp, Homo sapiens
atgtctggcggcgccgcagagaagcagagcagcactcccggttccctgttcctctcgccgccggctcctgcccccaagaatggctccagctccgattcctccgtgggggagaaactgggagccgcggccgccgacgctgtgaccggcaggaccgaggagtacaggcgccgccgccacactatggacaaggacagccgtggggcggccgcgaccactaccaccactgagcaccgcttcttccgccggagcgtcatctgcgactccaatgccactgcgctggagcttcccggccttcctctttccctgccccagcccagcatccccgcggctgtcccgcagagtgctccaccggagccccaccgggaagagaccgtgaccgccaccgccacttcccaggtagcccagcagcctccagccgctgccgcccctggggaacaggccgtcgcgggccctgccccctcgactgtccccagcagtaccagcaaagaccgcccagtgtcccagcctagccttgtggggagcaaagaggagccgccgccggcgagaagtggcagcggcggcggcagcgccaaggagccacaggaggaacggagccagcagcaggatgatatcgaagagctggagaccaaggccgtgggaatgtctaacgatggccgctttctcaagtttgacatcgaaatcggcagaggctcctttaagacggtctacaaaggtctggacactgaaaccaccgtggaagtcgcctggtgtgaactgcaggatcgaaaattaacaaagtctgagaggcagagatttaaagaagaagctgaaatgttaaaaggtcttcagcatcccaatattgttagattttatgattcctgggaatccacagtaaaaggaaagaagtgcattgttttggtgactgaacttatgacgtctggaacacttaaaacgtatctgaaaaggtttaaagtgatgaagatcaaagttctaagaagctggtgccgtcagatccttaaaggtcttcagtttcttcatactcgaactccacctatcattcaccgcgatcttaaatgtgacaacatctttatcaccggccctactggctcagtcaagattggagacctcggtctggcaaccctgaagcgggcttcttttgccaagagtgtgataggtaccccagagttcatggcccctgagatgtatgaggagaaatatgatgaatccgttgacgtttatgcctttgggatgtgcatgcttgagatggctacatctgaatatccttactcggagtgccaaaatgctgcgcagatctaccgtcgcgtgaccagtggggtgaagccagccagttttgacaaagtagcaattcctgaagtgaaggaaattattgaaggatgcatacgacaaaacaaagatgaaagatattccatcaaagaccttttgaaccatgccttcttccaagaggaaacaggagtacgggtagaattagcagaggaagatgatggagaaaaaatagccataaaattatggctacgtattgaagatattaagaaattaaagggaaaatacaaagataatgaagctattgagttttcttttgatttagagagagatgtcccagaagatgttgcacaagaaatggtagagtctgggtatgtctgtgaaggtgatcacaagaccatggctaaagctatcaaagacagagtatcattaattaagaggaaacgagagcagcggcagttggtacgggaggagcaagaaaaaaaaaagcaggaagagagcagtctcaaacagcaggtagaacaatccagtgcttcccagacaggaatcaagcagctcccttctgctagcaccggcatacctactgcttctaccacttcagcttcagtttctacacaagtagaacctgaagaacctgaggcagatcaacatcaacaactacagtaccagcaacccagtatatctgtgttatctgatgggacggttgacagtggtcagggatcctctgtcttcacagaatctcgagtgagcagccaacagacagtttcatatggttcccaacatgaacaggcacattctacaggcacagtcccagggcatataccttctactgtccaagcacagtctcagccccatggggtatatccaccctcaagtgtggcacaggggcagagccagggtcagccatcctcaagtagcttaacaggggtttcatcttcccaacccatacaacatcctcagcagcagcagggaatacagcagacagcccctcctcaacagacagtgcagtattcactttcacagacatcaacctccagtgaggccactactgcacagccagtgagtcagcctcaagctccacaagtcttgcctcaagtatcagctggaaaacagcttccagtttcccagccagtaccaactatccaaggcgaacctcagatcccagttgcgacacaaccctcggttgttccagtccactctggtgctcatttccttccagtgggacagccgctccctactcccttgctccctcagtaccctgtctctcagattcccatatcaactcctcatgtgtctacggctcagacaggtttctcatcccttcccatcacaatggcagctggcattactcagcctctgctcacgttggcttcatctgctacaacagctgcgatcccgggggtatcaactgtggttcctagtcagcttccaacccttctgcagcctgtgactcagctgccaagtcaggttcacccacagctcctacaaccagcagttcagtccatgggaataccagctaaccttggacaagctgctgaggttccactttcctctggagatgttctgtaccagggcttcccacctcgactgccaccacagtacccaggagattcaaatattgctccctcttccaacgtggcttctgtttgcatccattctacagtcctatcccctcccatgccgacagaagtactggctacacctgggtactttcccacagtggtgcagccttatgtggaatcaaatcttttagttcctatgggtggtgtaggaggacaggttcaagtgtcccagccaggagggagtttagcacaagcccccactacatcctcccagcaagcagttttggagagtactcagggagtctctcaggttgctcctgcagagccagttgcagtagcacagccccaagctacccagccgaccactttggcttcctctgtagacagtgcacattcagatgttgcttcaggtatgagtgatggcaatgagaacgtcccatcttccagtggaaggcatgaaggaagaactacaaaacggcattaccgaaaatctgtaaggagtcgctctcgacatgaaaaaacttcacgcccaaaattaagaattttgaatgtttcaaataaaggagaccgagtagtagaatgtcaattagagactcataataggaaaatggttacattcaaatttgacctagatggtgacaaccccgaggagatagcaacaattatggtgaacaatgactttattctagcaatagagagagagtcgtttgtggatcaagtgcgagaaattattgaaaaagctgatgaaatgctcagtgaggatgtcagtgtggaaccagagggtgatcagggattggagagtctacaaggaaaggatgactatggcttttcaggttctcagaaattggaaggagagttcaaacaaccaattcctgcgtcttccatgccacagcaaataggcattcctaccagttctttaactcaagttgttcattctgcgggaaggcggtttatagtgagtcctgtgccagaaagccgattacgagaatcaaaagttttccccagtgaaataacagatacagttgctgcctctacagctcagagccctggaatgaacttgtctcactctgcatcatcccttagtctacaacaggccttttctgaacttagacgtgcccaaatgacagaaggacccaacacagcacctccaaactttagtcatacaggaccaacatttccagtagtacctcctttcttaagtagcattgctggagtcccaaccacagcagcagccacagcaccagtccctgcaacaagcagccctcctaatgacatttccacatcagtaattcagtctgaggttacagtgcccactgaagaggggattgctggagttgccaccagcacaggtgtggtaacttcaggtggtctccccataccacctgtgtctgaatcaccagtactttccagcgtagtttcaagtatcacaatacctgcagttgtctcaatatctactacatccccgtcacttcaagtccccacatccacatctgagatcgttgtttctagtacagcactgtatccttcagtaacagtttcagcaacttcagcctctgcagggggcagtactgctaccccaggtcctaagcctccagctgtagtatctcagcaggcagcaggcagcactactgtgggagccacattaacatcagtttctaccaccacttcattcccaagcacagcttcacagctgtccattcagcttagcagcagtacttctactcctactttagctgaaaccgtggtagttagcgcacactcactagataagacatctcatagcagtacaactggattggctttctccctctctgcaccatcttcctcttcctctcctggagcaggagtgtctagttatatttctcagcctggtgggctgcatcctttggtcattccatcagtgatagcttctactcctattcttccccaagcagcaggacctacttctacacctttattaccccaagtacctagtatcccacccttggtacagcctgttgccaatgtgcctgctgtacagcagacactaattcatagtcagcctcaaccagctttgcttcccaaccagccccatactcattgtcctgaagtagattctgatacacaacccaaagctcctggaattgatgacataaagactctagaagaaaagctgcggtctctgttcagtgaacacagctcatctggagctcagcatgcctctgtctcactggagacctcactagtcatagagagcactgtcacaccaggcatcccaactactgctgttgcaccaagcaaactcctgacttctaccacaagtacttgcttaccaccaaccaatttaccactaggaacagttgctttgccagttacaccagtggtcacacctgggcaagtttctaccccagtcagcactactacatcaggagtgaaacctggaactgctccctccaagccacctctaactaaggctccggtgctgccagtgggtactgaacttccagcaggtactctacccagcgagcagctgccaccttttccaggaccttctctaacccagtcccagcaacctctagaggatcttgatgctcaattgagaagaacacttagtccagagattatcacagtgacttctgcggttggtcctgtgtccatggcggctccaacagcaatcacagaagcaggaacacagcctcagaagggtgtttctcaagtcaaagaaggccctgtcctagcaactagttcaggagctggtgtttttaagatgggacgatttcaggtttctgttgcagcagacggtgcccagaaagagggtaaaaataagtcagaagatgcaaagtctgttcattttgaatccagcacctcagagtcctcagtgctatcaagtagtagtccagagagtaccttggtgaaaccagagccgaatggcataaccatccctggtatctcttcagatgtgccagagagtgcccacaaaactactgcctcagaggcaaagtcagacactgggcagcctaccaaggttggacgttttcaggtgacaactacagcaaacaaagtgggtcgtttctctgtatcaaaaactgaggacaagatcactgacacaaagaaagaaggaccagtggcatctcctccttttatggatttggaacaagctgttcttcctgctgtgataccaaagaaagagaagcctgaactgtcagagccttcacatctaaatgggccgtcttctgacccggaggccgcttttttaagtagggatgtggatgatggttccggtagtccacactcgccccatcagctgagctcaaagagccttcctagccagaatctaagtcaaagccttagtaattcatttaactcctcttacatgagtagcgacaatgagtcagatatcgaagatgaagacttaaagttagagctgcgacgactacgagataaacatctcaaagagattcaggacctgcagagtcgccagaagcatgaaattgaatctttgtataccaaactgggcaaggtgccccctgctgttattattcccccagctgctcccctttcagggagaagacgacgacccactaaaagcaaaggcagcaaatctagtcgaagcagttccttggggaataaaagcccccagctttcaggtaacctgtctggtcagagtgcagcttcagtcttgcacccccagcagaccctccaccctcctggcaacatcccagagtccgggcagaatcagctgttacagccccttaagccatctccctccagtgacaacctctattcagccttcaccagtgatggtgccatttcagtaccaagcctttctgctccaggtcaaggaaccagcagcacaaacactgttggggcaacagtgaacagccaagccgcccaagctcagcctcctgccatgacgtccagcaggaagggcacattcacagatgacttgcacaagttggtagacaattgggcccgagatgccatgaatctctcaggcaggagaggaagcaaagggcacatgaattacgagggccctggaatggcaaggaagttctctgcacctgggcaactgtgcatctccatgacctcgaacctgggtggctctgcccccatctctgcagcatcagctacctctctaggtcacttcaccaagtctatgtgccccccacagcagtatggctttccagctaccccatttggcgctcaatggagtgggacgggtggcccagcaccacagccacttggccagttccaacctgtgggaactgcctccttgcagaatttcaacatcagcaatttgcagaaatccatcagcaaccccccaggctccaacctgcggaccacttag

SEQ ID NO: 2015 - protein, 2382 aa, Homo sapiens
MSGGAAEKQSSTPGSLFLSPPAPAPKNGSSSDSSVGEKLGAAAADAVTGRTEEYRRRRHTMDKDSRGAAATTTTTEHRFFRRSVICDSNATALELPGLPLSLPQPSIPAAVPQSAPPEPHREETVTATATSQVAQQPPAAAAPGEQAVAGPAPSTVPSSTSKDRPVSQPSLVGSKEEPPPARSGSGGGSAKEPQEERSQQQDDIEELETKAVGMSNDGRFLKFDIEIGRGSFKTVYKGLDTETTVEVAWCELQDRKLTKSERQRFKEEAEMLKGLQHPNIVRFYDSWESTVKGKKCIVLVTELMTSGTLKTYLKRFKVMKIKVLRSWCRQILKGLQFLHTRTPPIIHRDLKCDNIFITGPTGSVKIGDLGLATLKRASFAKSVIGTPEFMAPEMYEEKYDESVDVYAFGMCMLEMATSEYPYSECQNAAQIYRRVTSGVKPASFDKVAIPEVKEIIEGCIRQNKDERYSIKDLLNHAFFQEETGVRVELAEEDDGEKIAIKLWLRIEDIKKLKGKYKDNEAIEFSFDLERDVPEDVAQEMVESGYVCEGDHKTMAKAIKDRVSLIKRKREQRQLVREEQEKKKQEESSLKQQVEQSSASQTGIKQLPSASTGIPTASTTSASVSTQVEPEEPEADQHQQLQYQQPSISVLSDGTVDSGQGSSVFTESRVSSQQTVSYGSQHEQAHSTGTVPGHIPSTVQAQSQPHGVYPPSSVAQGQSQGQPSSSSLTGVSSSQPIQHPQQQQGIQQTAPPQQTVQYSLSQTSTSSEATTAQPVSQPQAPQVLPQVSAGKQLPVSQPVPTIQGEPQIPVATQPSVVPVHSGAHFLPVGQPLPTPLLPQYPVSQIPISTPHVSTAQTGFSSLPITMAAGITQPLLTLASSATTAAIPGVSTVVPSQLPTLLQPVTQLPSQVHPQLLQPAVQSMGIPANLGQAAEVPLSSGDVLYQGFPPRLPPQYPGDSNIAPSSNVASVCIHSTVLSPPMPTEVLATPGYFPTVVQPYVESNLLVPMGGVGGQVQVSQPGGSLAQAPTTSSQQAVLESTQGVSQVAPAEPVAVAQPQATQPTTLASSVDSAHSDVASGMSDGNENVPSSSGRHEGRTTKRHYRKSVRSRSRHEKTSRPKLRILNVSNKGDRVVECQLETHNRKMVTFKFDLDGDNPEEIATIMVNNDFILAIERESFVDQVREIIEKADEMLSEDVSVEPEGDQGLESLQGKDDYGFSGSQKLEGEFKQPIPASSMPQQIGIPTSSLTQVVHSAGRRFIVSPVPESRLRESKVFPSEITDTVAASTAQSPGMNLSHSASSLSLQQAFSELRRAQMTEGPNTAPPNFSHTGPTFPVVPPFLSSIAGVPTTAAATAPVPATSSPPNDISTSVIQSEVTVPTEEGIAGVATSTGVVTSGGLPIPPVSESPVLSSVVSSITIPAVVSISTTSPSLQVPTSTSEIVVSSTALYPSVTVSATSASAGGSTATPGPKPPAVVSQQAAGSTTVGATLTSVSTTTSFPSTASQLSIQLSSSTSTPTLAETVVVSAHSLDKTSHSSTTGLAFSLSAPSSSSSPGAGVSSYISQPGGLHPLVIPSVIASTPILPQAAGPTSTPLLPQVPSIPPLVQPVANVPAVQQTLIHSQPQPALLPNQPHTHCPEVDSDTQPKAPGIDDIKTLEEKLRSLFSEHSSSGAQHASVSLETSLVIESTVTPGIPTTAVAPSKLLTSTTSTCLPPTNLPLGTVALPVTPVVTPGQVSTPVSTTTSGVKPGTAPSKPPLTKAPVLPVGTELPAGTLPSEQLPPFPGPSLTQSQQPLEDLDAQLRRTLSPEIITVTSAVGPVSMAAPTAITEAGTQPQKGVSQVKEGPVLATSSGAGVFKMGRFQVSVAADGAQKEGKNKSEDAKSVHFESSTSESSVLSSSSPESTLVKPEPNGITIPGISSDVPESAHKTTASEAKSDTGQPTKVGRFQVTTTANKVGRFSVSKTEDKITDTKKEGPVASPPFMDLEQAVLPAVIPKKEKPELSEPSHLNGPSSDPEAAFLSRDVDDGSGSPHSPHQLSSKSLPSQNLSQSLSNSFNSSYMSSDNESDIEDEDLKLELRRLRDKHLKEIQDLQSRQKHEIESLYTKLGKVPPAVIIPPAAPLSGRRRRPTKSKGSKSSRSSSLGNKSPQLSGNLSGQSAASVLHPQQTLHPPGNIPESGQNQLLQPLKPSPSSDNLYSAFTSDGAISVPSLSAPGQGTSSTNTVGATVNSQAAQAQPPAMTSSRKGTFTDDLHKLVDNWARDAMNLSGRRGSKGHMNYEGPGMARKFSAPGQLCISMTSNLGGSAPISAASATSLGHFTKSMCPPQQYGFPATPFGAQWSGTGGPAPQPLGQFQPVGTASLQNFNISNLQKSISNPPGSNLRTT

SEQ ID NO: 2016 - DNA, 3109 bp, Homo sapiens
ggcgtttctgctcctcgctgcgccggcgaccccggacccggcacccgtgacccctcgcgctgcctgcggcctcgcgccgaggcctgccccgggagagaccgtccatgccgtccaaggcggagaatctgcggccctccgagccggccccgcagccgccggaagggaggacgctccaaggacagcttcccggcgctccgccggcccagcgcgcggggtccccacccgatgctccgggctccgagagccccgcgcttgcctgcagcactccggccacgcccagcggcgaggacccgccagcccgagcagcacccatcgccccgcggccccccgccaggcctcgactggagcgagccctgtccctggacgacaagggctggaggaggaggcgttttcgaggcagccaggaggacctggaagcccggaatgggaccagtccctccaggggctcagtgcagagcgagggccccggggcccccgcccacagctgctccccgccctgcctgagcacctccttgcaggaaatccccaagtcccgcggggtcctgagcagtgagagagggagcccgtcctcggggggtaaccctctctctggggtggccagcagctccccgaacctcccgcacagagacgccgccgtggcggggagctcgcccaggctgcccagcctgctgcccccgcgcccaccgcctgccctgagcctggacatcgcctccgactccctgaggacagcaaacaaggtcgactcggatcttgcagactacaagctccgcgcgcagccgctcctggtgcgggcccacagcagcctgggccccggccggccgcggagccccctggcctgcgacgactgttcccttcgctcggccaaatcctccttcagcctcctggcgcccatccgcagcaaggacgtccgcagcaggagttacctggagggcagcctcctggccagcggggccctgttgggggcggatgagctggcccgctacttcccagaccggaacgtggcactcttcgtggccacctggaacatgcagggccagaaggagctcccgcccagcctggacgagttcctgctcccagccgaggccgactatgcccaggacctgtatgtcatcggggtccaggagggctgttctgacacgcgggagtgggagactcgtctgcaggagacgctgggcccgcactatgtgctgctgtcctcggcggcccacggcgtgctctacatgtcgctcttcatccgcagggacctcatctggttctgctcagaggtggagtgctccacggtgaccacacgcatcgtgtctcagatcaagaccaagggggccttgggcatcagcttcaccttttttggcacttccttcctcttcatcacgtcccacttcacctcaggtgacgggaaggtggcggagcggctgctggactacaccaggactgtacaagccctggtcctgcccagaaatgtgcccgacaccaacccctatcgctccagcgcagcggacgtcaccacccgcttcgatgaggtgttctggtttggagacttcaacttccgcctgagtggcgggcgcacagtcgtggacgccctcctgtgccagggcctggtggtggacgtgccggcgctgctgcagcacgaccagctcatccgggagatgcggaaagggtccatcttcaagggcttccaggagccggacatccacttcctcccatcatacaagtttgacatcgggaaggacacgtacgacagcacctccaagcagaggacgccctcatacacggaccgcgtcttgtacagaagccgccacaagggtgacatctgtcctgtgagctactcttcctgccccgggatcaagacgtccgaccaccgccctgtgtatggcctcttccgggtgaaagtgaggccggggcgagacaacattccgttggcagctggcaaatttgatagagaactgtacttactaggaattaaaagacggatttcgaaggagattcagaggcagcaagcactacagagtcagaactccagcaccatctgctccgtttcttgaagtttgctgaacgaggactcacagctgcaacgtggggtgattgtattgatcaaaacccactgggaaggacaaagagtttgccgcctttcggggatccgagggactgtggcgaccgtgcctctgtgccagcgtcccaggaaggaagccaaccctgagcgagcctgtcctctgtggcaggtccacacggtgtgggtgggcagggcttggacccccgtctccatggcaggtccatacagcatgggtggcagggtttggacccgcccagcagcaccacggaccccagccactctcgggggcagacgtcagaatccgttcctgagcagctcctgtgccctgggggcagtcacagagccccccaacacccccgtgctctgcaccagcctctccctccacacccgaagcaggcgtccatctgtgtcctcctggcagcccctcaaacacacaccaccccatgtcacacgggtatccagagcaaggctggatctgggctaggtgacccctggggcctcagacctctgagtgggccccagagcccagctgaggaagccacacagcctccaggacgtggcacggttcccctccacttggctgcaagtcgcctgccatggggcgaggaggcctgcaccccagtataagggcctccccagctgagtaagaagctgcttcccctcctctcataggccaagcctattgtgtgaaaccatctcatggtcttggtgacgtagaccatttttgaaaccgtctcatggtcttggtgacgtagaccgtttgcttctttaactccagccgcggaatgacattagtggaaccgggctagggaactgctggaagttcaggatgccaccaccttgaacacctaggccagggatccccaccatgtcccgggtttctttcttcgagagtatagaaccgttcattcttgctttgtgtcccattccatctcttgaaaaaatgtagtctttgaatgtgtgaaaatctagggacattcaatctagtcttttaaattatttttccatatttatatttttaaataaatgcatatattgagtcttaaaaaaaaaaaaaaaaaa

SEQ ID NO: 2017 - protein, 644 aa, Homo sapiens
MPSKAENLRPSEPAPQPPEGRTLQGQLPGAPPAQRAGSPPDAPGSESPALACSTPATPSGEDPPARAAPIAPRPPARPRLERALSLDDKGWRRRRFRGSQEDLEARNGTSPSRGSVQSEGPGAPAHSCSPPCLSTSLQEIPKSRGVLSSERGSPSSGGNPLSGVASSSPNLPHRDAAVAGSSPRLPSLLPPRPPPALSLDIASDSLRTANKVDSDLADYKLRAQPLLVRAHSSLGPGRPRSPLACDDCSLRSAKSSFSLLAPIRSKDVRSRSYLEGSLLASGALLGADELARYFPDRNVALFVATWNMQGQKELPPSLDEFLLPAEADYAQDLYVIGVQEGCSDTREWETRLQETLGPHYVLLSSAAHGVLYMSLFIRRDLIWFCSEVECSTVTTRIVSQIKTKGALGISFTFFGTSFLFITSHFTSGDGKVAERLLDYTRTVQALVLPRNVPDTNPYRSSAADVTTRFDEVFWFGDFNFRLSGGRTVVDALLCQGLVVDVPALLQHDQLIREMRKGSIFKGFQEPDIHFLPSYKFDIGKDTYDSTSKQRTPSYTDRVLYRSRHKGDICPVSYSSCPGIKTSDHRPVYGLFRVKVRPGRDNIPLAAGKFDRELYLLGIKRRISKEIQRQQALQSQNSSTICSVS

SEQ ID NO: 2018 - DNA, 781 bp, Homo sapiens
cgtgcaccctgagccggagctgcccagtcgccgcgggaccggggccgctggggtctggacgggggtcgccatgatccgctttatcctcatccagaaccgggcaggcaagacgcgcctggccaagtggtacatgcagtttgatgatgatgagaaacagaagctgatcgaggaggtgcatgccgtggtcaccgtccgagacgccaaacacaccaactttgtggagttccggaactttaagatcatttaccgccgctatgctggcctctacttctgcatctgtgtggatgtcaatgacaacaaactggcttacctggagggcattcacaacttcgtggaggtcttaaacgaatatttccacaatgtctgtgaactggacctggtgttcaacttctacaaggtttacacggtcgtggacgagatgttcctggctggcgaaatccgagagaccagccagacgaaggtgctgaaacagctgctgatgctacagtccctggagtgagggcaggcgagcaccccaccccggccccggcccctcctggaatcgcctgctcgcttccccttcccaggcccgtggccaacccagcagtccttccctcaactgcctaggaggaagggacccagctgggtctgggccacaagggaggagacttcaccccacttcctctgggccctggctgtgggcagaggccaccgtgtgtgtcccgagtaaccgtgccgttgtcgtgtgattccataagcgtctgtgcgtggagtccccaataaacctgtggtcctgcctggc

SEQ ID NO: 2019 - protein, 142 aa, Homo sapiens
MIRFILIQNRAGKTRLAKWYMQFDDDEKQKLIEEVHAVVTVRDAKHTNFVEFRNFKIIYRRYAGLYFCICVDVNDNKLAYLEGIHNFVEVLNEYFHNVCELDLVFNFYKVYTVVDEMFLAGEIRETSQTKVLKQLLMLQSLE

SEQ ID NO: 2020 - DNA, 667 bp, Homo sapiens
cgtgcaccctgagccggagctgcccagtcgccgcgggaccggggccgctggggtctggacgggggtcgccatgatccgctttatcctcatccagaaccgggcaggcaagacgcgcctggccaagtggtacatgcagtttgatgatgatgagaaacagaagctgatcgaggaggtgcatgccgtggtcaccgtccgagacgccaaacacaccaactttgtggaggtcttaaacgaatatttccacaatgtctgtgaactggacctggtgttcaacttctacaaggtttacacggtcgtggacgagatgttcctggctggcgaaatccgagagaccagccagacgaaggtgctgaaacagctgctgatgctacagtccctggagtgagggcaggcgagcaccccaccccggccccggcccctcctggaatcgcctgctcgcttccccttcccaggcccgtggccaacccagcagtccttccctcaactgcctaggaggaagggacccagctgggtctgggccacaagggaggagacttcaccccacttcctctgggccctggctgtgggcagaggccaccgtgtgtgtcccgagtaaccgtgccgttgtcgtgtgattccataagcgtctgtgcgtggagtccccaataaacctgtggtcctgcctggc

SEQ ID NO: 2021 - protein, 104 aa, Homo sapiens
MIRFILIQNRAGKTRLAKWYMQFDDDEKQKLIEEVHAVVTVRDAKHTNFVEVLNEYFHNVCELDLVFNFYKVYTVVDEMFLAGEIRETSQTKVLKQLLMLQSLE

SEQ ID NO: 2022 - DNA, 2917 bp, Homo sapiens
ggcacgagggcggcggccgcgatgagccttcagcctgccgggcaggggacgtgaacatggatgaccctaagaaggaagacattcttcttttggccgatgaaaaatttgacttcgatctttcattgtcttcttcgagtgcaaatgaagatgatgaagtcttcttcggaccctttggacataaagaaagatgtattgctgccagcttggaattaaataatccggttcccgaacagcctccgttgcccacatctgagagtccctttgcctggagccctctggccggggagaagttcgtggaggtgtacaaagaagctcacttactggctttacacattgagagcagcagccggaaccaggcagcccaagctgccaagcctgaagaccctcggagccagggcgtggaaagattcatacaggagtcaaaattaaaaataaacctctttgagaaagaaaaggaaatgaagaaaagccccacgtctcttaaaagggagacatactacctgtcagacagccccttgctggggccccctgtgggtgagcctcggctcttggcctcctccccggccctgcccagctctggtgcccaggcccgcctcacccgggcgccggggcctccgcactctgctcatgctttgcccagggaatcatgcactgctcatgctgcaagtcaggcagcgactcagaggaagcccgggaccaaattgctgctgcctcgagcggcctctgttagaggaagaagcatccctggggctgcggagaagcccaagaaagagattccagctagtccttccaggacaaaaatcccagctgagaaggaatcccaccgggatgttctccctgacaaacctgccccgggtgctgtcaatgtgccggccgccggaagccacttgggccagggcaagcgggcgatccctgttccaaacaagttggggctgaagaagaccctgttaaaagcacccggctctaccagcaatctcgcaaggaagtcctcctcggggcctgtttggagcggggcatccagtgcgtgcacatccccagcagtgggcaaagctaaatcaagtgaatttgcaagtattcctgcaaatagctcccggcctctgtcaaacatcagcaagtcaggcagaatgggacccgccatgctgcggccagctctgcctgcaggccctgtgggggcatcctcctggcaggccaagcgggtcgatgtttctgagctggcagcggagcagctcacggcacccccctcagcatcccccacccaaccccagactccggaaggtggcggccagtggctgaactccagttgcgcttggtcagaatcttctcaattgaataagactagaagtatcagacggcgagattcctgtctaaattccaagacaaaggttatgcctactcctacaaatcaatttaaaattcctaagttttctattggtgactccccggacagctcaacaccaaagctttcgcgggcacagcggccgcagtcgtgcacgtcagttggcagggtcactgtccacagcaccccggttagacgctcatctgggccagcaccacaaagcctgctgagcgcacggcgtgtgtcagccttgcccacacccgccagccggcgctgctctggccttccaccgatgacccccaaaacgatgcccagggccgtgggctctcccctgtgtgtgccagctcggagacgttcctctgagccccgcaagaactctgcaatgagaactgaaccaacaagggagagcaacagaaagacagattccaggctggtggatgtgtcccctgacaggggttctcctccttcccgtgtgcctcaggcacttaacttttctccagaggaaagcgattctactttctccaaaagtactgccacagaagtagctcgggaggaagccaagccgggtggagatgcagcccctagtgaggctcttcttgtagatatcaaactggaaccactcgcggtcactccagatgctgcaagccagcccctcattgaccttcctctcatcgacttctgcgataccccagaagcacacgtggctgtaggatctgaaagcaggcctctgatcgacctcatgacaaacactccagacatgaataaaaatgtggccaaaccttcaccggtggtgggacagctcatagacctgagctcccctctgatccagctgagccctgaggctgacaaggagaacgtggattccccactcctcaagttctaagccgaaccaaatcctttgccttgaaagaacagccctaaagtggttttcaaccctcagaaacaagctttaggctggtcgcagtggcttacacttgtaaccctagaacttgggaggctgaggtgggcggattacttgagcccaggagttcgggaccagcctgggaaatatagtgaaactcctgtccctacaaaaagtacaaaaattagccgggtgtggtagtgcatgcctgtagtcccagctacttgggaggctgaagtgggaggatggcctgagctcaaggagatgcaggctgcagtgggctgtgattgtgccactgcactccagcctgggcaccaatgtgagaacctgtcttggaaaaaaaaaaaaaaagaaacatgttttagtagaagttttatttgaaaaagaaaaataagcataaatatattcccagtgctggagagggtgggctgagggactggggccagcacggaccacccaaggcctctgcttcccgccgccaccctcctcgctgccattctctgggctggaatgtgaagcctcagtcactctaaatgaagaattttcttttgaatgttttgtatgtaaaatagcaagtggctatttttaaagttaagtttgtataaatagttagatattctagatttacattaaattgtaaaataaatggacttattgaagcataaaaaaaaaaaaaaaaa

SEQ ID NO: 2023 - protein, 720 aa, Homo sapiens
MDDPKKEDILLLADEKFDFDLSLSSSSANEDDEVFFGPFGHKERCIAASLELNNPVPEQPPLPTSESPFAWSPLAGEKFVEVYKEAHLLALHIESSSRNQAAQAAKPEDPRSQGVERFIQESKLKINLFEKEKEMKKSPTSLKRETYYLSDSPLLGPPVGEPRLLASSPALPSSGAQARLTRAPGPPHSAHALPRESCTAHAASQAATQRKPGTKLLLPRAASVRGRSIPGAAEKPKKEIPASPSRTKIPAEKESHRDILPDKPAPGAVNVPAAGSHLGQGKRAIPVPNKLGLKKTLLKAPGSTSNLARKSSSGPVWSGASSACTSPAVGKAKSSEFASIPANSSRPLSNISKSGRMGPAMLRPALPAGPVGASSWQAKRVDVSELAAEQLTAPPSASPTQPQTPEGGGQWLNSSCAWSESSQLNKTRSIRRRDSCLNSKTKVMPTPTNQFKIPKFSIGDSPDSSTPKLSRAQRPQSCTSVGRVTVHSTPVRRSSGPAPQSLLSARRVSALPTPASRRCSGLPPMTPKTMPRAVGSPLCVPARRRSSEPRKNSAMRTEPTRESNRKTDSRLVDVSPDRGSPPSRVPQALNFSPEESDSTFSKSTATEVAREEAKPGGDAAPSEALLVDIKLEPLAVTPDAASQPLIDLPLIDFCDTPEAHVAVGSESRPLIDLMTNTPDMNKNVAKPSPVVGQLIDLSSPLIQLSPEADKENVDSPLLKF

SEQ ID NO: 2024 - DNA, 3443 bp, Homo sapiens
agcgggcagagtctgcagtgcggagggggcgggaagtccaggccccgcactcgatccacgctggctccctacggaggcccacctactcgaggcccaccgactcctactgcaatcagtactatgcgatcgtcctagagagtccattcagctgcacttccgcctcagtatggcatcacagctgcaagtgttttcgcccccatcagtgtcgtcgagtgccttctgcagtgcgaagaaactgaaaatagagccctctggctgggatgtttcaggacagagtagcaacgacaaatattatacccacagcaaaaccctcccagccacacaagggcaagccaactcctctcaccaggtagcaaatttcaacatccctgcttacgaccagggcctcctcctcccagctcctgcagtggagcatattgttgtaacagccgctgatagctcgggcagtgctgctacatcaaccttccaaagcagccagaccctgactcacagaagcaacgtttctttgcttgagccatatcaaaaatgtggattgaaacgaaaaagtgaggaagttgacagcaacggtagtgtgcagatcatagaagaacatccccctctcatgctgcaaaacaggactgtggtgggtgctgctgccacaaccaccactgtgaccacaaagagtagcagttccagcggagaaggggattaccagctggtccagcatgagatcctttgctctatgaccaatagctatgaagtcttggagttcctaggccgggggacatttggacaggtggctaagtgctggaagaggagcaccaaggaaattgtggctattaaaatcttgaagaaccacccctcctatgccagacaaggacagattgaagtgagcatcctttcccgcctaagcagtgaaaatgctgatgagtataattttgtccgttcatacgagtgctttcagcataagaatcacacctgccttgtttttgaaatgttggagcagaacttatatgattttctaaagcaaaacaaatttagcccactgccactcaagtacatcagaccaatcttgcagcaggtggccacagccttgatgaagctcaagagtcttggtctgatccacgctgaccttaagcctgaaaacatcatgctggttgatccagttcgccagccctaccgagtgaaggtcattgactttggttctgctagtcacgtttccaaagctgtgtgctcaacctacttacagtcacgttactacagagctcctgaaattattcttgggttaccattttgtgaagctattgatatgtggtcactgggctgtgtgatagctgagctgttcctgggatggcctctttatcctggtgcttcagaatatgatcagattcgttatatttcacaaacacaaggcttgccagctgaatatcttctcagtgccggaacaaaaacaaccaggtttttcaacagagatcctaatttggggtacccactgtggaggcttaagacacctgaagaacatgaactggagactggaataaaatcaaaagaagctcggaagtacatttttaattgcttagatgacatggctcaggtgaatatgtctacagacctggagggaacagacatgttggcagagaaggcagaccgaagagaatacattgatctgttaaagaaaatgctcacaattgatgcagataagagaattacccctctaaaaactcttaaccatcagtttgtgacaatgactcaccttttggattttccacatagcaatcatgttaagtcttgttttcagaacatggagatctgcaagcggagggttcacatgtatgatacagtgagtcagatcaagagtcccttcactacacatgttgccccaaatacaagcacaaatctaaccatgagcttcagcaatcagctcaatacagtgcacaatcaggccagtgttctagcttccagttctactgcagcagctgctactctttctctggctaattcagatgtctcactactaaactaccagtcagctttgtacccatcatctgctgcaccagttcctggagttgcccagcagggtgtttccttgcagcctggaaccacccagatttgcactcagacagatccattccaacagacatttatagtatgtccacctgcgtttcaaactggactacaagcaacaacaaagcattctggattccctgtgaggatggataatgctgtaccaattgtaccccaggcaccagctgctcagccactacagattcagtcaggagttctcacgcagggaagctgtacaccactaatggtagcaactctccaccctcaagtagccaccatcacacagcagtatgcggtgccctttactctgagctgcgcagccggccggccggcgctggttgaacagactgccgctgtactgcaggcgtggcctggagggactcagcaaattctcctgccttcaacttggcaacagttgcctggggtagctctacacaactctgtccagcccacagcaatgattccagaggccatggggagtggacagcagctagctgactggaggaatgcccactctcatggcaaccagtacagcactatcatgcagcagccatccttgctgactaaccatgtgacattggccactgctcagcctctgaatgttggtgttgcccatgttgtcagacaacaacaatccagttccctcccttcgaagaagaataagcagtcagctccagtctcttccaagtcctctctagatgttctgccttcccaagtctattctctggttgggagcagtcccctccgcaccacatcttcttataattccttggtccctgtccaagatcagcatcagcccatcatcattccagatactcccagccctcctgtgagtgtcatcactatccgaagtgacactgatgaggaagaggacaacaaatacaagcccagtagctctggactgaagccaaggtctaatgtcatcagttatgtcactgtcaatgattctccagactctgactcttctttgagcagcccttattccactgataccctgagtgctctccgaggcaatagtggatccgttttggaggggcctggcagagttgtggcagatggcactggcacccgcactatcattgtgcctccactgaaaactcagcttggtgactgcactgtagcaacccaggcctcaggtctcctgagcaataagactaagccagtcgcttcagtgagtgggcagtcatctggatgctgtatcacccccacagggtatcgagctcaacgcggggggaccagtgcagcacaaccactcaatcttagccaggtaagtgctatgggctactgccttctgtttgggccctgcactgttgttactttctggagaaccctgcttctggctggatgctgaataaagccaaatgaagccccttttgtgtcaaacaaaaaaaaaaaaaaaa

SEQ ID NO: 2025 - protein, 1075 aa, Homo sapiens
MASQLQVFSPPSVSSSAFCSAKKLKIEPSGWDVSGQSSNDKYYTHSKTLPATQGQANSSHQVANFNIPAYDQGLLLPAPAVEHIVVTAADSSGSAATSTFQSSQTLTHRSNVSLLEPYQKCGLKRKSEEVDSNGSVQIIEEHPPLMLQNRTVVGAAATTTTVTTKSSSSSGEGDYQLVQHEILCSMTNSYEVLEFLGRGTFGQVAKCWKRSTKEIVAIKILKNHPSYARQGQIEVSILSRLSSENADEYNFVRSYECFQHKNHTCLVFEMLEQNLYDFLKQNKFSPLPLKYIRPILQQVATALMKLKSLGLIHADLKPENIMLVDPVRQPYRVKVIDFGSASHVSKAVCSTYLQSRYYRAPEIILGLPFCEAIDMWSLGCVIAELFLGWPLYPGASEYDQIRYISQTQGLPAEYLLSAGTKTTRFFNRDPNLGYPLWRLKTPEEHELETGIKSKEARKYIFNCLDDMAQVNMSTDLEGTDMLAEKADRREYIDLLKKMLTIDADKRITPLKTLNHQFVTMTHLLDFPHSNHVKSCFQNMEICKRRVHMYDTVSQIKSPFTTHVAPNTSTNLTMSFSNQLNTVHNQASVLASSSTAAAATLSLANSDVSLLNYQSALYPSSAAPVPGVAQQGVSLQPGTTQICTQTDPFQQTFIVCPPAFQTGLQATTKHSGFPVRMDNAVPIVPQAPAAQPLQIQSGVLTQGSCTPLMVATLHPQVATITQQYAVPFTLSCAAGRPALVEQTAAVLQAWPGGTQQILLPSTWQQLPGVALHNSVQPTAMIPEAMGSGQQLADWRNAHSHGNQYSTIMQQPSLLTNHVTLATAQPLNVGVAHVVRQQQSSSLPSKKNKQSAPVSSKSSLDVLPSQVYSLVGSSPLRTTSSYNSLVPVQDQHQPIIIPDTPSPPVSVITIRSDTDEEEDNKYKPSSSGLKPRSNVISYVTVNDSPDSDSSLSSPYSTDTLSALRGNSGSVLEGPGRVVADGTGTRTIIVPPLKTQLGDCTVATQASGLLSNKTKPVASVSGQSSGCCITPTGYRAQRGGTSAAQPLNLSQVSAMGYCLLFGPCTVVTFWRTLLLAGC

SEQ ID NO: 2026 - DNA, 9016 bp, Homo sapiens
gaggcggtggcggcggaggcggcaccgattgctgtgtcggccccagtgcggccgaagtcgcggtagagcgtagccccacgcccctcccccgtccgcgccctccctctttccctggggatggagaaggcgacggttccggtggcggcggcgacggctgcagaaggagaagggagccccccggcggtggcggctgtggcgggcccccccgcggcggcggaggtcggcggcggcgttggcggcagcagcagagctcgctcggcctcgtctcctcgtgggatggtgcgagtctgcgacctgctcctgaagaagaagccgccgcagcagcagcaccacaaggccaagcgtaaccggacttgccgaccccccagcagcagcgaaagcagcagcgacagcgacaacagcggcggcggtggaggcggcggtggaggcggaggtggcggcggcggcaccagcagtaacaacagcgaggaagaagaggacgacgacgacgaggaagaggaggtttctgaggtggagtctttcattttggatcaggatgatttggaaaatccaatgctggaaacagcttccaagttgctcttatcaggtactgctgatggtgcagacctcaggacagtagatccagaaacacaggctagactggaagctttactagaagctgcaggaataggaaaattgtccacggctgatggtaaagcctttgcagatcctgaagtacttcggaggttgacatcgtctgttagttgtgcgttggatgaagctgctgctgcacttacccgtatgagagctgaaagcacagcaaatgcagggcagtcggacaaccgcagtttggcagaagcctgttcagaaggagatgtaaatgctgtgcgaaagttactcattgaagggcgaagtgtaaatgaacacacagaggaaggggagagcctcctttgtttagcttgttctgctggatactatgagcttgcacaggttttgttggcaatgcatgcaaatgtggaagataggggaatcaaaggtgacattacacctttaatggctgctgctaatggaggacatgtcaaaattgtgaagttgctgctagctcataaagcagatgttaatgcacagtcttcaacaggcaatacagcacttacatatgcttgtgctggaggctatgtagatgttgtaaaggtgctcttggaatccggtgctagtattgaggaccataatgaaaatggtcatacccctcttatggaagctggaagtgctggacatgtggaagtagccagattgctgctagaaaatggggctggcattaatacgcattctaatgaatttaaagagagtgcccttaccttagcttgttacaaaggacacttagagatggtgcgatttcttttggaagcaggcgcggatcaagagcataaaacagatgaaatgcacactgctctgatggaggcttgcatggatggccatgttgaagtagctaggttacttcttgacagcggtgcccaagtgaacatgcctgctgattcatttgagtcaccattaactttggctgcatgtggtgggcatgtggaacttgcggctttacttattgaaagaggagctagcctggaagaggtcaatgatgaaggttatacaccattgatggaagcagctcgagaaggacatgaagaaatggtggcattacttcttggtcaaggagcaaatatcaatgcacagacagaagaaactcaagaaactgccttgactctggcttgctgtggaggctttctggaagtggcagactttctaattaaggcaggagccgatatagaactagggtgttctacccctttaatggaagctgctcaagagggtcatttggagttagttaaatacttattagctgcaggagctaacgttcatgcaacaacagcaacaggggatacagcactaacatatgcctgtgaaaatggtcatactgatgtagcagatgtcttacttcaggcaggcgcagatctggaacatgaatctgaaggtggaagaactcctttaatgaaagctgcaagagctggtcatgtttgtactgttcagttcttaattagtaaaggagcgaatgtgaatagaaccacagctaataatgaccatactgtactgtccctggcttgtgcagggggtcatctggcagtggtggaactacttttggctcatggggcagatcctactcaccgtttgaaagatggctcaactatgttgatagaagcagcaaaaggtggccatacaagtgttgtttgctatctcttggattatcctaataacttgctttcagcccctccaccagatgtcactcagttaactcccccatcccacgatttaaatagggctcctcgtgtaccagttcaagcactgcccatggttgttccacctcaggagcctgacaaaccacctgccaatgttgccaccactcttcccatcaggaataaagctgcttctaaacaaaagtccagcagccatttgccagcaaacagccaggatgtacagggttacatcaccaatcagtctccagagagcattgtagaagaggctcagggaaagttaacagaactggaacagaggataaaagaagccatagaaaagaatgcacagctgcagtccttggaactggctcatgctgaccaacttaccaaggagaagatcgaggagctcaacaaaacaagggaggaacaaattcagaagaaacaaaagattttggaggaactacagaaagtagaacgagagttacaactgaaaactcagcagcagctaaaaaagcagtatctagaggttaaagctcaaagaattcaacttcagcaacagcagcaacagtcttgccaacacctgggattactaactcctgttggagttggagagcagctttctgagggagactatgcacggttacagcaagtggatcctgttttacttaaagatgaaccccagcagactgctgctcagatgggttttgcgccaatccagcctctggcgatgcctcaagctttgcctctggcggcaggtcccttgcctccagggtccatcgcaaatcttacagaactgcaaggagtgatagttggacagccagtactgggccaagcacagttggcagggctggggcaaggaattctgacagaaacacaacaagggttaatggtagccagccctgctcagaccctcaatgacacgctggatgacatcatggcagtcagtggaagagcatctgcaatgtcaaacactcctacccacagtattgctgcatccatttcccaacctcagactccaactccaagtcctatcatctctccttcagccatgcttcctatctaccctgccattgatattgatgcacagactgagagtaatcatgacacggcgctaacacttgcctgtgctggtggccacgaggaactggtacaaacactgctagagagaggagctagtatagagcaccgagacaagaaaggttttactccactcatcttggctgccacagctggtcatgttggtgttgtggaaatattgctggacaatggtgcagacattgaagcccagtctgaaagaaccaaggacacaccactctccttggcttgttctgggggaagacaggaggtggtggagctattgttagctcgaggggcaaataaagagcacaggaatgtttctgattacacacctctaagtctggctgcttctggtggctatgtgaacatcatcaaaatattactaaatgcaggagctgagattaactctagaactggtagcaaattgggcatctctcctctgatgttagcagctatgaatgggcatacagctgctgttaagctcctgttagacatgggctctgacataaatgctcagatagaaaccaatcggaacactgcccttactttagcctgcttccaaggaagaactgaagtggttagtcttctgcttgatagaaaagcaaatgttgaacacagagctaagactggtctcacaccactaatggaagctgcctctggtggatatgcggaggtgggccgagttcttttggataaaggtgctgatgttaatgcccctccagttccctcctcaagagatacagctttaaccatagcagcagataaagggcattacaaattctgtgagcttcttattggcaggggagctcatattgatgtacgtaacaagaaggggaacactccattgtggctagcagcaaatggtggacacctcgatgtggttcagttactggtgcaagcaggtgcagatgtggatgcagcagataaccgcaagataactcctcttatggcagcatttagaaagggtcatgtgaaggtggtgcgctacttagtcaaagaagtcaatcagtttccatcagattctgaatgtatgagatacatagcaaccatcactgataaggagatgctgaagaagtgtcatctttgtatggagtcaatagtacaagccaaagatagacaggctgctgaagcaaacaaaaacgccagcattttgttagaggagttagacttggaaaagttaagggaagaaagtcggaggctggctttggctgcgaaaagagaaaaaagaaaagagaagagaaggaagaaaaaggaagaacaaagaaggaaactagaagaaattgaagccaaaaataaagagaactttgaactccaagctgctcaagaaaaagaaaagcttaaagttgaagatgagcctgaagtcttgacagaacctccaagtgccacaaccactactaccataggtatatctgcaacctggacaactttggcaggttctcatggtaaaagaaataataccataactacaaccagttcaaagaggaaaaacaggaaaaataaaattactccagaaaacgttcaaattatatttgatgatccactaccaatttcatacagtcagccagagaaggtgaatggagagtccaagagcagcagtaccagcgagagtggggacagtgataacatgaggatttccagctgcagcgatgaaagtagtaacagcaacagcagtcgtaagagtgacaatcattcaccagctgtggtcactaccactgtgagcagcaaaaagcagccatcagttcttgttacatttccaaaggaagagagaaaatctgtttctggcaaggcttcaataaaattgtcagaaactatcagtgaagggaccagtaattctctatctacttgtacaaaatctggtccatctcccctttcttctccaaatgggaagttaacagtagcaagtcctaagcgtgggcaaaagagggaagaaggatggaaagaagttgtaagaaggtcaaagaaagtatctgttccatcaactgtgatatccagagtgattggaagaggaggctgtaatatcaatgctattcgggagtttactggtgcacacatagatattgataaacagaaagacaagactggagaccggataatcactataaggggtggcactgaatcaacaagacaagcaactcaattgattaatgctttgatcaaggatccagacaaagaaattgatgaacttattccaaagaatcgtttgaaaagctcctcagcaaattccaaaatagggtcatcagcacctaccaccactgctgctaacacttccttaatgggaattaaaatgacaactgtagctctgtcatcaacatctcaaactgccacagcactcactgtgcctgcaatttcttctgcatccactcacaaaaccattaagaacccagtgaataatgtgaggcctggttttccagtttctcttccattagcatatcctcctccacagtttgcacatgctttgcttgctgctcagactttccagcagatccgtccaccaaggttgcccatgacccactttggaggtacttttccaccagctcaatccacttggggtccgtttcctgtcaggcctttgagccctgccagagctactaactcgcctaagcctcacatggtgcctcgccatagcaatcagaatagcagtggttctcaggtgaattcagcaggttctttaacttcaagcccaacaactacaaccagttcatcagcttcaacggtgcctggtacatctacaaatggcagtccaagttcaccttctgtccgaaggcagctttttgtcacagttgtgaagacatccaatgccaccacaacaacagtcacaaccacggcaagcaacaacaacactgcacccacaaatgccacatatcctatgcctactgccaaagaacactatccagtatcatccccatcttccccatcaccaccagcccagccaggaggggtttctagaaacagccctttggattgtggatcagcatctccaaataaagtggcatcttcctccgaacaggaagcaggtagtccaccagtagtagaaacaacaaacactagacctccaaacagcagcagttcttctgggagttcatcagctcattctaatcagcaacaacctccgggatctgtttctcaggaaccaagaccacctcttcagcagtctcaggttcctcccccggaagttagaatgactgttcctcctttagcaacaagttctgctccagtggcggtgccttctactgccccagtgacttaccctatgcctcagacaccaatgggatgcccccagcctactcctaaaatggaaacccctgctattagaccaccccctcatggcacaactgcccctcacaagaattcagcttcagtgcaaaattcatctgttgcagtcctcagtgtcaatcacattaaaagacctcacagtgttccctcttctgtccagctaccttcgaccttaagtacacaaagtgcttgtcagaattcagtacatccagcaaataagcctattgctcccaatttcagtgcccccttaccatttgggccctttagcacattgtttgaaaacagccctacttctgctcatgccttctggggaggatctgttgtttcatctcagtcaacaccagaatctatgctatcaggaaaatcctcatatttgccaaattcagatcctttacatcagtctgatacttccaaagctccaggttttagaccaccattacagagacctgctccaagtccctcaggtattgtcaatatggactcgccatatggttctgtaacaccttcttcaacacatttgggaaactttgcttcaaacatttcaggaggtcagatgtacggacctggggcaccccttggaggagcacccgcagctgctaactttaacagacaacatttttccccgcttagtttgttgactccgtgttcatcagcatcaaatgattcttctgcacagtcagtatcctcgggagttcgtgcaccatctcctgccccatcatcagtaccgttagggtcagaaaagcccagcaatgtgtctcaggacaggaaagttccagtccctattgggactgaacgttctgcacgtatcaggcaaactggaacgtcagctccatctgttattgggagcaatttgtctacatcagtaggacatagtggcatctggtcctttgaagggattggtggcaatcaagacaaagtagactggtgtaaccctgggatgggaaatcctatgatccacagaccgatgtctgacccaggagtattttcacaacatcaagcaatggagcgagatagtacaggaattgtaactccttctggtacattccatcagcatgttcctgcaggctacatggactttcctaaagttgggggtatgcctttttctgtgtatgggaatgcaatgattcctccagtagcacctatccctgatggtgctggaggacccatatttaatggccctcatgctgcagacccttcttggaactcactgataaagatggtttccagctccacggaaaataatggccctcaaacggtgtggactggaccctgggcacctcacatgaacagtgtgcatatgaaccagcttggctgatgaggatcagcttgttagcctgcagattccttttcatttggaggaaatcacaagtggccgaaaaaaaaaattatgctcccaaatcattctactgatgtgcttgactgaagtgtgtaggctttttgcagaagatcttactaactgacctattttctgtgaacatttgtgactgcccattccccatcatcatccgttttaccttagttagcatttttcttatcatttttctttttttctttccctcttcccctttggacataactttctgttgaagctgttctttggctggttggttttagtactgtaaactgcttctgagcaaacacggaaatttagcaaaattatgtaaacttgatcctgaagttttagaatggcaaataaatgtacaattgtttacataacagaaaaggctaagcagaaagtaaatttcaatatgtcagtatagaggctctactttatgtagacttaaattaatgtgagatatgtaccttcatattcagaaatctggatgtttccttcatacattaaactattaataagcataacttttctactggtgtaatttaagtataaagtaaaataatgggcattatcattggatgtttccccacattggcttttaaaatacccatcttgctttctttttggtttatttgtagcaaggcacatatagaagaagaaatttctggcttttccatgttgttttattaccttttctcacttttaaaactaatacagacttatctcctcactcctttttctctccttacctttaccactaataccagtaaaattatctttctgatagtgaaaaggttctgtcaagattttcactgtaatggctgctacagagatggaccatcttcatcatcaccagtggtttcttctaattataaaatgtttaaactttctgagaatttaaaaagccaccactgttcccagtcagcatatacaagctcttaatattctgtttattaaataattcaatgtactattttatattggatgatattgattcttaacattggcttttcagtcatcaacagtcaacataaaaatttcaattttcagtaaaaaaaaaaaaaaaaaa

SEQ ID NO: 2027 - protein, 2602 aa, Homo sapiens
MEKATVPVAAATAAEGEGSPPAVAAVAGPPAAAEVGGGVGGSSRARSASSPRGMVRVCDLLLKKKPPQQQHHKAKRNRTCRPPSSSESSSDSDNSGGGGGGGGGGGGGGGTSSNNSEEEEDDDDEEEEVSEVESFILDQDDLENPMLETASKLLLSGTADGADLRTVDPETQARLEALLEAAGIGKLSTADGKAFADPEVLRRLTSSVSCALDEAAAALTRMRAESTANAGQSDNRSLAEACSEGDVNAVRKLLIEGRSVNEHTEEGESLLCLACSAGYYELAQVLLAMHANVEDRGIKGDITPLMAAANGGHVKIVKLLLAHKADVNAQSSTGNTALTYACAGGYVDVVKVLLESGASIEDHNENGHTPLMEAGSAGHVEVARLLLENGAGINTHSNEFKESALTLACYKGHLEMVRFLLEAGADQEHKTDEMHTALMEACMDGHVEVARLLLDSGAQVNMPADSFESPLTLAACGGHVELAALLIERGASLEEVNDEGYTPLMEAAREGHEEMVALLLGQGANINAQTEETQETALTLACCGGFLEVADFLIKAGADIELGCSTPLMEAAQEGHLELVKYLLAAGANVHATTATGDTALTYACENGHTDVADVLLQAGADLEHESEGGRTPLMKAARAGHVCTVQFLISKGANVNRTTANNDHTVLSLACAGGHLAVVELLLAHGADPTHRLKDGSTMLIEAAKGGHTSVVCYLLDYPNNLLSAPPPDVTQLTPPSHDLNRAPRVPVQALPMVVPPQEPDKPPANVATTLPIRNKAASKQKSSSHLPANSQDVQGYITNQSPESIVEEAQGKLTELEQRIKEAIEKNAQLQSLELAHADQLTKEKIEELNKTREEQIQKKQKILEELQKVERELQLKTQQQLKKQYLEVKAQRIQLQQQQQQSCQHLGLLTPVGVGEQLSEGDYARLQQVDPVLLKDEPQQTAAQMGFAPIQPLAMPQALPLAAGPLPPGSIANLTELQGVIVGQPVLGQAQLAGLGQGILTETQQGLMVASPAQTLNDTLDDIMAVSGRASAMSNTPTHSIAASISQPQTPTPSPIISPSAMLPIYPAIDIDAQTESNHDTALTLACAGGHEELVQTLLERGASIEHRDKKGFTPLILAATAGHVGVVEILLDNGADIEAQSERTKDTPLSLACSGGRQEVVELLLARGANKEHRNVSDYTPLSLAASGGYVNIIKILLNAGAEINSRTGSKLGISPLMLAAMNGHTAAVKLLLDMGSDINAQIETNRNTALTLACFQGRTEVVSLLLDRKANVEHRAKTGLTPLMEAASGGYAEVGRVLLDKGADVNAPPVPSSRDTALTIAADKGHYKFCELLIGRGAHIDVRNKKGNTPLWLAANGGHLDVVQLLVQAGADVDAADNRKITPLMAAFRKGHVKVVRYLVKEVNQFPSDSECMRYIATITDKEMLKKCHLCMESIVQAKDRQAAEANKNASILLEELDLEKLREESRRLALAAKREKRKEKRRKKKEEQRRKLEEIEAKNKENFELQAAQEKEKLKVEDEPEVLTEPPSATTTTTIGISATWTTLAGSHGKRNNTITTTSSKRKNRKNKITPENVQIIFDDPLPISYSQPEKVNGESKSSSTSESGDSDNMRISSCSDESSNSNSSRKSDNHSPAVVTTTVSSKKQPSVLVTFPKEERKSVSGKASIKLSETISEGTSNSLSTCTKSGPSPLSSPNGKLTVASPKRGQKREEGWKEVVRRSKKVSVPSTVISRVIGRGGCNINAIREFTGAHIDIDKQKDKTGDRIITIRGGTESTRQATQLINALIKDPDKEIDELIPKNRLKSSSANSKIGSSAPTTTAANTSLMGIKMTTVALSSTSQTATALTVPAISSASTHKTIKNPVNNVRPGFPVSLPLAYPPPQFAHALLAAQTFQQIRPPRLPMTHFGGTFPPAQSTWGPFPVRPLSPARATNSPKPHMVPRHSNQNSSGSQVNSAGSLTSSPTTTTSSSASTVPGTSTNGSPSSPSVRRQLFVTVVKTSNATTTTVTTTASNNNTAPTNATYPMPTAKEHYPVSSPSSPSPPAQPGGVSRNSPLDCGSASPNKVASSSEQEAGSPPVVETTNTRPPNSSSSSGSSSAHSNQQQPPGSVSQEPRPPLQQSQVPPPEVRMTVPPLATSSAPVAVPSTAPVTYPMPQTPMGCPQPTPKMETPAIRPPPHGTTAPHKNSASVQNSSVAVLSVNHIKRPHSVPSSVQLPSTLSTQSACQNSVHPANKPIAPNFSAPLPFGPFSTLFENSPTSAHAFWGGSVVSSQSTPESMLSGKSSYLPNSDPLHQSDTSKAPGFRPPLQRPAPSPSGIVNMDSPYGSVTPSSTHLGNFASNISGGQMYGPGAPLGGAPAAANFNRQHFSPLSLLTPCSSASNDSSAQSVSSGVRAPSPAPSSVPLGSEKPSNVSQDRKVPVPIGTERSARIRQTGTSAPSVIGSNLSTSVGHSGIWSFEGIGGNQDKVDWCNPGMGNPMIHRPMSDPGVFSQHQAMERDSTGIVTPSGTFHQHVPAGYMDFPKVGGMPFSVYGNAMIPPVAPIPDGAGGPIFNGPHAADPSWNSLIKMVSSSTENNGPQTVWTGPWAPHMNSVHMNQLG

SEQ ID NO: 2028 - DNA, 6734 bp, Homo sapiens
cccagttgtctgcgggctgcggggagctaagtccccagattggaggaggctggctctggtcttcgatgcacaggagtggccgttatggaacgcagcagcagcgtgcagggtcaaagacagccggccccccatgtcagtggtctaggatggccagtgaaggcaccaacatcccaagtcctgtggtgcgccagattgacaagcagtttctgatttgcagtatatgcctggaacggtacaagaatcccaaggttctcccctgtctgcacactttctgcgagaggtgcctgcagaactacattcctgcccacagtttaaccctctcctgcccagtgtgccgccagacctccatcctgcccgagaaaggggtggccgcgctccagaacaatttcttcatcacaaacctgatggacgtgctgcagcgaactccaggcagcaacgctgaggagtcttccatcctggagacagtcactgctgtggctgcgggaaagcctctctcttgcccaaaccacgatgggaatgtgatggaattttactgccagtcctgtgagactgccatgtgtcgggagtgcacggagggggagcacgcagagcaccccacagttccactcaaggatgtggtggaacagcacaaggcctcgctccaggtccagctggatgctgtcaacaaaaggctcccagaaatagattctgctcttcagttcatctctgaaatcattcatcagttaaccaaccaaaaggccagcatcgtggatgacattcattccacctttgatgagctccagaagactttaaatgtgcgcaagagtgtgctgcttatggaattggaggtcaactatggcctcaaacacaaagtcctccagtcgcagctggatactctgctccaggggcaggagagcattaagagctgcagcaacttcacagcgcaggccctcaaccatggcacggagaccgaggtcctactggtgaagaagcagatgagcgagaagctgaacgagctggccgaccaggacttccccttgcacccgcgggagaacgaccagctggatttcatcgtggaaaccgaggggctgaagaagtccatccacaacctcgggacgatcttaaccaccaacgccgttgcctcagagacagtggccacgggcgaggggctgcggcagaccatcatcgggcagcccatgtccgtcaccatcaccaccaaggacaaagacggtgagctgtgcaaaaccggcaacgcctacctcaccgccgaactgagcacccccgacgggagcgtggcagacggggagatcctggacaacaagaacggcacctatgagtttttgtacactgtccagaaggaaggggactttaccctgtctctgagactctatgaccagcacatccgaggcagcccgtttaagctgaaagtgatccgatccgctgatgtgtctcccaccacagaaggcgtgaagaggcgcgttaagtccccggggagcggccacgtcaagcagaaagctgtgaaaagacccgcaagcatgtacagcactggaaaacgaaaagagaatcccatcgaagacgatttgatctttcgagtgggtaccaaaggaagaaataaaggagagtttacaaatcttcagggggtagctgcatctacaaatggaaagatattaattgcagacagtaacaaccaatgtgtgcagatattttccaatgatggccagttcaaaagtcgttttggcatacggggacgctctccggggcagctgcagcggcccacaggagtggctgtacatcccagtggggacataatcattgccgattatgataataaatgggtcagcattttctcctccgatgggaaatttaagacaaaaattggatcaggaaagctgatgggacccaaaggagtttctgtggaccgcaatgggcacattattgttgtggacaacaaggcgtgctgcgtgtttatcttccagccaaacgggaaaatagtcaccaggtttggtagccgaggaaatggggacaggcagtttgcaggtccccattttgcagctgtaaatagcaataatgagattattattacagatttccataatcattctgtcaaggtgtttaatcaggaaggagaattcatgttgaagtttggctcaaatggagaaggaaatgggcagtttaatgctccaacaggtgtagcagtggattcaaatggaaacatcattgtggccgactggggaaacagcaggatccaggtttttgatgggagtggatcatttttgtcctacattaacacatctgctgacccactctatggcccccaaggcctggccctaacttcagatggtcatgttgtggttgcagactctggaaatcactgtttcaaagtctatcgatacttacagtaatggtgggcaggtggatacccgcttccatggtcttgcactataaactggaatggatttctcaatgcgggaccagattatgactagagtttttatgccagaaggaatcattggtgaactttccaaggttatttctgaatgtaacaatttccttaaaaatgacttatccaatttctgtatttcacctttagggttaaaaaaaactcttctactgaatctataaaaactgcagttttacatctgtgaactatggcttaagggacaggatttatgtagctaaactaattttgcaaatcaaacagacacttaaaaaaactagcatatgtaaaggtattcgttaatcctgtgaatggtagcttttgcacagaacttccaaaagcaaaacaaaaacaaaatctattgtagttatatacttcatttaacctaggtcacaagacccagggaatcttctaacctcacttttacagtaggtattactcttgtgacatttttttggttatcaacaactaaatataaattactttggaaaaagtaaggctgtcttgcaaaatgatcccagctctgattagcagccctctggagttcagaacttaagtatcagtgcaaatttctcaacctttctgggttagacaaagatccttttttgtgtgttcttttcaccacccctttggctcaccttgtatcagcaaacaaagtacttcttcagggaaacctgaaatttctaatgccttgaaaagcatattacaaaagtaatgctaccttttgggaaacaaactgccccgttaactccagatcattgcactggaatgtaatcaagaaagttagtcatgttttatgtaccatgttttcacacgtgtctcttctcttcgacttcctgaaagcgaaagctttacctcctgcaaatgtcagcacatgtagtaggacaccagtatcctaggacagagagccataagtagccctttggaggactgatggtgtcaaccaaaggcatgtgattgattaatgattcccccttagaaagcaagtgttaccaaagttgtgttatcttgaaagcattacaggtaagggcatgttatggttatttatcattgtttaatgaatagtagaggtgtcaagggactatgtatacatgattagggtaagatagaatgtattatatatatatatatatatacacacacacatatatatagctgaatctttggtgtattgaaataggcagcactctgaaagacagaagcttcgtccagccactcttcagcacattcctttactaagcagtttaaagccgtcctagtggagcaagccctaaagcagatttaatttttgccattttccaagaatgacggtggtggcttttagtcagaaaatggccttctgtgctttcaaaaaaaaaacaaaaaaaaaaccacacacacacataaaaaacccaacaggtcaaaataaaagttgaacttgagttacatttaatttaaatataaatgcattttgagaaatgttaagaacaatttagtcaatcgttcatctgtcattggtactgtaaaataagctgtggtctatttccactgtttaattttctactcagttctaccaaataggatgtcatgtttgacatttttgatagtgactttggggtcttcttcactgaaagcaccttagaactgtactataagaaaacatttcccctatgtataattatatgaatgtgatgtttattgcttattaatttataattcagtcattctctatataggacttcttaaaatttagaagggaaatctagctacttcaaattgtctgttaaatttattatgcccaaatcaacctctgaaaaaaggtttttccaggaagatttacatttaggtttaatatttttttagttaggtagagttttaaaaaatacttgagcctgtccgtgataaagctataaaattcaataactttttagaatgttaaatgaagacactgtttcctaacatcagtgagatacatctttgaatttaaacattcatatttactgagtacctactaggtaccaagtactcttttaggcactggaaatacagtgatggacaaaacaggtaaaaaatcgctgccccctcagagctgacattctggggtgggaatttcattttgccacgtactaacgttctgcacaaaagacaggctagactcttgtctagattgtttaaaagaaacttttcaaattggttacattaattttagtttattttcacaagtaaaaatggctttttatttagattctttctgtcccaggctgttgatcttaaaactagttgatttaaagagtttttttgcacaacatttcaattatatttgtgaacttagaaattaacttacaatctaaccagccatcatatcatatcctatcaggctagatatctcaatagtagactgaatacaaagctaattttttttacatgtcaatattggcacaaactggaatgaaagaatagtttgattcagacctgctccactatgtgttgctaaaacacatgctatgagcactcgaggaaacactatattttttccaaaaaatatgtgattatatatgttaaagtatagataacatttcacacttggatacatatgtgcatttactgtatttcttggtaagcatatttttgggggaaagtgctgctgatatgatacaagtagacaaaatttaaatgaaattttgtcacattctatggaaaatggtttctggtaaactgagaaggatattaaaataagtggcttttttctgggctaccattattgtttgatttctctttgtcaagtgtatagaacctgtcatacattcatgataagtagcactgaaaaattactcattcaaatttcccctgggcacgtaaggcaaaatattgccggttgggatttcaaggtcagtgacgacgcatttcctcccagtacagaccccccagccccccttgctggacatggggaggcagagagtcacttgaccatccagaaatacatgactacaagtcctttatgactgtttgccattttttttaatggtacttagtattttgatcaaactttagtctccagaactaaacaagtccctaagtttccttattttaatttactgtgactagatttgaagcaaataaatactccagatccatgcagctagaacacacttgcttccactactaaatatacagggtatgtcctaacatggagttaactggaatagcagtacactagcaagtatctgtgaatccttagcactgacgggttaacagaaatgctttggtaatacctacttagttaattggaggaagtagtaaataaacattaggtaatctgcagattacttcaaatgggaaaaatctttttgtagactctatagtaccctctctattcactagcttctgaaaagggaggagtatttttagtttgacaatttaataatttaaaaacaagacatctccaggtaggaaaaaatgaaagctatttcatgcaaacattatctaatttagcttaaaagtgaaagtggtaatactgttggtttctgtaaatgttgcagggttttaaactttataattactttaatatttttgataactagaaatctagtattgccataaaggaaactaagtgcccatcaaagatttgtttggtataaataaagaattatttgttttgttttcaatgacagtaagctacaaatcatgatgcttaaaaactttctaaagatgaattgtgtggcagtgattggtctgtttgtggagaatgtatgaaagctattaatattctagaatagattaataaattggctatgttgttccaatgaatgtacagcacttccattaacttttgaaagcaacacagccttaaactcaatgcttttgctttatgacatgggaatgttctgtcatcaatggagtgtattcttgtaatagaattctttatatcgttctcaattctatagactttcaagcctatgtatgaatatgaaggggtttttttttttttgctttgttttctttttagattttgtacattccatctttataggtctgtttcatatgttttatgtatagaacactaagtcttgcactctctgacattgatactgatatattctcgtcatttgttcttttatgaatcaaaatgttgactgcctatttaaagaaaagaatgaacgctgtgcatcaaagtgtttgtatgttcgtagctacatacgtaccacagtattttggatgctttagtctacaatgaaactttcaattaattctgtcttgaaacataggagaaacaggattcatgtgtatctctttaccatgcacaaaatctcaaatcattataataaagcttgttttctcc

SEQ ID NO: 2029 - protein, 744 aa, Homo sapiens
MASEGTNIPSPVVRQIDKQFLICSICLERYKNPKVLPCLHTFCERCLQNYIPAHSLTLSCPVCRQTSILPEKGVAALQNNFFITNLMDVLQRTPGSNAEESSILETVTAVAAGKPLSCPNHDGNVMEFYCQSCETAMCRECTEGEHAEHPTVPLKDVVEQHKASLQVQLDAVNKRLPEIDSALQFISEIIHQLTNQKASIVDDIHSTFDELQKTLNVRKSVLLMELEVNYGLKHKVLQSQLDTLLQGQESIKSCSNFTAQALNHGTETEVLLVKKQMSEKLNELADQDFPLHPRENDQLDFIVETEGLKKSIHNLGTILTTNAVASETVATGEGLRQTIIGQPMSVTITTKDKDGELCKTGNAYLTAELSTPDGSVADGEILDNKNGTYEFLYTVQKEGDFTLSLRLYDQHIRGSPFKLKVIRSADVSPTTEGVKRRVKSPGSGHVKQKAVKRPASMYSTGKRKENPIEDDLIFRVGTKGRNKGEFTNLQGVAASTNGKILIADSNNQCVQIFSNDGQFKSRFGIRGRSPGQLQRPTGVAVHPSGDIIIADYDNKWVSIFSSDGKFKTKIGSGKLMGPKGVSVDRNGHIIVVDNKACCVFIFQPNGKIVTRFGSRGNGDRQFAGPHFAAVNSNNEIIITDFHNHSVKVFNQEGEFMLKFGSNGEGNGQFNAPTGVAVDSNGNIIVADWGNSRIQVFDGSGSFLSYINTSADPLYGPQGLALTSDGHVVVADSGNHCFKVYRYLQ

SEQ ID NO: 2030 - DNA, 3049 bp, Homo sapiens
agccccggcgcctataaatcgcattccctcccgcgcccccctttttagcatatttgatcactttgattctctgttcttttctctccgcggtgtgtgtgtgcgtgcgcgcgtgtgtgttttcttcttctcctcctcctctccccgagttgcctcctttctccgggtgccgtactgccttttttcccctctttcattctttctctccgtctttttctcccccctctgcgcacgaaggatgtgcttctaggtggtgatctgccctcctctctctcttttatcatttctcccccgccgccggcgagttgactctttccctatgtgtgtgaggcggcggcggcagcagcagcagcagcggctccggcggcggcagcagcggcagcagcgacttcagcggcggcggcggcgctagacgcagcggctccgggcccgacccggcggcttcggggcgccctcccgcgccctcttgcaccctcgcacacacaaaaggcggcgcgccggagcccgagacccggggagccgccgccgccccgccgccgcccgcagccaggggagcaggaagtccggacgcagcccccatagatatggcaatggtagtcagcacgtggcgcgacccccaggacgaggtgcccggctcacagggcagccaggcctcgcaggcgccgcccgtgcccggcccgccgcccggcgccccgcacacgccacagacgcccggccaagggggcccagccagcacgccagcccagacggcggccggtggccagggcggccctggcggcccgggtagcgacaagcagcagcagcagcaacacatcgagtgcgtggtgtgcggagacaagtcgagcggcaagcactacggccagttcacgtgcgagggctgcaagagcttcttcaagcgcagcgtgcggaggaacctgagctacacgtgccgcgccaaccggaactgtcccatcgaccagcaccatcgcaaccagtgccagtactgccgcctcaaaaagtgcctcaaagtgggcatgagacgggaagcggtgcagaggggcaggatgccgccgacccagccgacccacgggcagttcgcgctgaccaacggggatcccctcaactgccactcgtacctgtccggatatatttccctgctgttgcgcgcggagccctatcccacgtcgcgcttcggcagccaatgcatgcagcccaacaacatcatgggtatcgagaacatttgcgaactggccgcgaggatgctcttcagcgccgtcgagtgggcccggaacatccccttcttccccgacctgcagatcacggaccaggtggccctgcttcgcctcacctggagcgagctgtttgtgttgaatgcggcgcagtgctccatgcccctccacgtcgccccgctcctggccgccgccggcctgcatgcttcgcccatgtccgccgaccgggtggtcgcctttatggaccacatacggatcttccaagagcaagtggagaagctcaaggcgctgcacgttgactcagccgagtacagctgcctcaaggccatagtcctgttcacctcagatgcctgtggtctctctgatgtagcccatgtggaaagcttgcaggaaaagtctcagtgtgctttggaagaatacgttaggagccagtaccccaaccagccgacgagattcggaaagcttttgcttcgcctcccttccctccgcaccgtctcctcctcagtcatagagcaattgtttttcgtccgtttggtaggtaaaacccccatcgaaaccctcatccgggatatgttactgtccggcagcagttttaactggccgtatatggcaattcaataaataaataaaataagaagggggagtgaaacagagaaagaaaaggcaaaagactggtttgtttgcttaatttccttctgttaagaaaggatataaaaggatgttacaagtttgctaaaagaagagaggggaagaatttaatggactgtgaatttcaaaaaaaaaaaaaagactgtcaaatgaacttttacagaatgcattaaaaaaaaaaaaactcctgtgtcggtcagaacaacttgctacttatcatttttgtataaaaaggaaattagtctttttctttttttggtaaatttttgaaaaatattgctaaaagtgcatttaaggagattgggagacaattagcagaatggagaaagtaagtcttttttttttccaaattattaattgtcctgtgtctatgtacctctagctgttcttttttgtacttttctggttccaaaccagtttattctgtggttctataataagttttgatataatcttggcttcttaaaaactgtgtatcattaaaatatatgttctgcaagaattaaaactgagtccatgaaaataccataggaagacataaaactttaaaaggcaactcaaagatgatggaaacgcacttacaagtggtgaccaaaatttttaggtgaagtcgagcactctaattagagaactggaggaaccacatataacacttaacttcccctaccctgcccctccccaaaagaaaccatgacaaacctagcttttaaaaaatattttaagaaagagaatgaactgtggaatttattggcagccaaggaatgtgtccaagacacatgctgaggttttgaataaaaagtgaacttttgtaatttgaattgggtcccgcttagttcttgaattgttatgaaaatcctatatctgtttgtatatttgcaaaccctttgtattataattgttgatattttccctttttaaaaaataccattgaaatcagcatgacaaaaataacactgttggcacttataggtaacgtgattgattcagtatcttagagtttacagtttgtgttttaaaaaaactgaaggtttttcttttaagtgcaacatttctgtatactgtaaaagttataataactgaactgtttggtcgagtctttgtgtgttatattccaaggaaaattgaaagtattcagaaattaaaatattatttgatatctgaaaaaaaaaaaaaaaaaaaaaaaaaaaaaaaaaaaa

SEQ ID NO: 2031 - protein, 414 aa, Homo sapiens
MAMVVSTWRDPQDEVPGSQGSQASQAPPVPGPPPGAPHTPQTPGQGGPASTPAQTAAGGQGGPGGPGSDKQQQQQHIECVVCGDKSSGKHYGQFTCEGCKSFFKRSVRRNLSYTCRANRNCPIDQHHRNQCQYCRLKKCLKVGMRREAVQRGRMPPTQPTHGQFALTNGDPLNCHSYLSGYISLLLRAEPYPTSRFGSQCMQPNNIMGIENICELAARMLFSAVEWARNIPFFPDLQITDQVALLRLTWSELFVLNAAQCSMPLHVAPLLAAAGLHASPMSADRVVAFMDHIRIFQEQVEKLKALHVDSAEYSCLKAIVLFTSDACGLSDVAHVESLQEKSQCALEEYVRSQYPNQPTRFGKLLLRLPSLRTVSSSVIEQLFFVRLVGKTPIETLIRDMLLSGSSFNWPYMAIQ

SEQ ID NO: 2032 - DNA, 4863 bp, Homo sapiens
ccacgcgtccggccagctggagaggttcagcttggagaaggagagtcttcagcaggaagtaaggacgctgaagagcaaagtgggcgagctcaacgagcagctgggaatgctcatggagaccatccaagccaaggacgaggtcatcatcaagctcagcgagggcgagggcaacgggcctcctcccaccgtggcgcccagctccccttcggttgtgcctgttgccagggaccagctggaactggacaggctgaaagataatctacaggggtacaaaacccaaaacaaatttctaaataaggagattttggaactctcagctctacgaagaaatgcagaaaggagagagagggatctgatggcaaagtattctagcctggaagccaagctctgccagatagaaagtaaatacctgatattgctccaagaaatgaagacaccagtgtgctcagaagaccaggggcccacccgggaggtcatagcccagttgctggaggatgctctgcaggttgagagccaagagcagccggagcaagcatttgttaaacctcatcttgtcagtgaatatgatatttatgggttcaggactgtacctgaggatgatgaggaagagaaattggttgccaaggtccgcgcgttggatctgaagactctctacctcacagaaaaccaggaagtctccactggggtcaagtgggaaaactattttgcaagtacagtgaacagggagatgatgtgctctccagagttaaaaaacctcatccgtgcgggcattccccacgagcaccgttccaaggtgtggaagtggtgtgtggaccgtcacaccaggaagttcaaggacaacactgagcctggccacttccagaccttgctgcagaaggcgctggagaaacagaacccagcctccaagcagattgagctggacttgctgcgaactctgcccaacaacaaacattactcctgccccacctcagaaggcatacagaagttacgcaatgtcctcctcgccttctcctggcggaatccagatatcggctactgtcaaggcctaaacaggttggtggcagtggccctcctgtacctggaacaagaagatgctttctggtgtctcgttaccatagtggaagttttcatgcctcgagactattatacaaagactcttttaggatcccaggtggaccagcgggtgttcagagaccttatgagtgagaagctgcctcggttgcatggccactttgaacagtacaaagtcgactacactctcatcactttcaactggtttctggtggtatttgtggatagtgtcgttagtgacatcctctttaaaatatgggactctttcctttatgaaggaccaaaggttattttccgttttgctctggcactttttaagtacaaggaagaggagattttgaaattgcaagattcgatgtctatatttaagtatctccgctacttcactcgcactatccttgatgctaggaagctgatcagtatctcctttggggacctgaaccctttccccctacgccagatccggaaccgacgcgcctaccacttggagaaagtccggctggagctgaccgagctggaggccatccgtgaggacttcctgcgtgagcgggacaccagccctgacaagggtgagctggtcagtgacgaggaggaggatacctgagtgggctcgggatgctgctcttccttccttcacaaccaaagtgtgcccaaagggtgaaagtgcacttaaaagccagaatgtaacgtgtgtgtcctctggggatctgctgggcagatgtcccaagccaggctgcccttcctcatttcccactgtgcggggggcaggggtgggaggtctaatctgtttacaaccatttccgtgccatgcttttggttacacgtatctcagtcacgctttctgcctggttggtggatcctcaggcttaccagtggctatttgcaagagcctgtttccagcctccgtcagcctgtcggtgctctgaccctctgaaaccttgctttgctgggcatctccccatattctctctcctgtacatagtgggcagtggtgtgtggttttgaatggcagtgctataaaggatgccagctgtgctttaggcacctgtaggccagagggttgctgcctcaggcataaggttggtatgaaaaggggctgccttagaaaagcaggcacatcccttgttcagaaatggccactgtaggaaagcctgtgaacctcccaccagtggctttaagctgccagccatgccccatttctagaatagcctttgctcttccacacgcaacccttccatcagtgtcttccagcctgcatggggagggcctggctgcccagacacccaccctcacttctcatggccagcctgtgtttgcagatcactgggctgctctgtccccagcttgccccgtgccaggcatggctctgtgagattctgtggaatgcccttcttgacttgtggaaatcattcaccaagtacgatgggatgggattccaagtaaacagtggaccgtcatattgcaaagcaggcccacgcctgggctggccttggttgaggggatggaggaatgttttcgggggtgctttgcagggcagtggtgcagccgcagcgtgaacgctcttggacagctgaaaaccatggcctccttggggatggccagtgctcctggtgtctccacctgcctgggttgtgcaggaggccggctgccagtgcctggggctgggaaacttttttgcttggggcaggcttgggtgagctctcccagatgtgtgcccaccccaccactgcctggaacatccttgttctctgccaggatgcaggggcactgttgcctctgacacagcagtttctgggaactcagaggactgcctttctgaaggctggggagaggctttgagcaaggagcttgtttttgcttaatcgctctagaccatccctgatgcgtagatgtgagaggatgttttctggcacagtgttatgaaaatacaagataaatgatctcagtggaatgtttcatattacccgaaaaaaactggaaatcatcctttgttgtgaacacactgagactaagaattgaagcaatgcagttttaagaagtatttttcctattttttgctgtcaactttttggcaatgccacggcaaagttggtgtttcagcacatgctagagtgagctccggcttcgtgtctttaaccaactccactaatgtttcactgggtagacggagctggcctctatatttagccagaagcctttgcctcttttcaggcatcaaaaatgggttttgtcattgtctttgtctttgagagcagcagtttgaggtctgactccttcagttgtcctgtgagctgggcgttgcagtctgctcgaatcaagtgttggaaaccccccacccctcagcccatcgtgaaacgacagctgtcagcctggggggcggctgctgaggaggtgcagcaggaatggggctgggccctgaggttttactttccgagccaatggcccctggaacatgccagcacacactgccatgtcctggggctaagagctgcctttagggacaggctcgtgttgtccagtttgccctgagagatgcacctgaccaggggcccgtcgtggctgcaacccacggtggtatgttagtgtttccaggcagttgtcagcagctgccgggtagtgtgtgtgtgcgacagcaggagagttcctggaggaaagggactggggacactttctcagaggttctcctgcctggaatcaagtgatgcgtgtccagaaggcaagagagggcggctccgcctggttaaagtttgggaacgggacggagccaactcctccttccaggactgtgggccccactcttttgcgctaacacttcccctccctcgggtcactgaggaaagagctgctctgtcccctccagtgccctgaaggtccctggcctccactggctgccatggcagggggcccttctgacaggggctgccccaagctgctgttcctcctctgaaccttcaccccaacacccagcccgtggcccctgcaagggggaccctgccagctgggaaacccaaaggcctgtccaaacgtgcgcaccaggaccgaggggagctccctcccaacacctgctaggaattgccaacttttaaatggatggggttttttatgggttgaacctctgttaatacttttgtacactctcactacagtttatatttttataggctattttctcaaggtgtttctagattccacatatctattttatataacaagttattatgttatgtgtgtgactcccttgtgtgtatctgtgccagcctcagcctccgagttgcttttccctctggccctgactctcactgactcaccgatgtgatgtgcaggcccacttcttaccccagatagcctcgggcgctgcctgtagtcatgctgacagctgtacagtagccgccaagactgctgacagctggagacggttctggtttcaactacggtatattgatatcggaagtattctagacagatcctcggttgggttttctagctacatgtttgtattgcacagatccccacctgccatcctatagtgttgtcttcctgtgtgttccggggcttctgggcagctgggcctgcccggggaagtccttgcaggtgggaggccatacagagacccactgtgtgccactgagcgtcccactgctgctgggcaactggaggactgcagggggcgccaggtgactctctccttttatatcacagcagctcctgtgctgaccttcaagttacgttttggaactgtaatactaaaggaagaaataaactactaatttgtataataaaaaaaaaaaaaaa

SEQ ID NO: 2033 - protein, 415 aa, Homo sapiens
MKTPVCSEDQGPTREVIAQLLEDALQVESQEQPEQAFVKPHLVSEYDIYGFRTVPEDDEEEKLVAKVRALDLKTLYLTENQEVSTGVKWENYFASTVNREMMCSPELKNLIRAGIPHEHRSKVWKWCVDRHTRKFKDNTEPGHFQTLLQKALEKQNPASKQIELDLLRTLPNNKHYSCPTSEGIQKLRNVLLAFSWRNPDIGYCQGLNRLVAVALLYLEQEDAFWCLVTIVEVFMPRDYYTKTLLGSQVDQRVFRDLMSEKLPRLHGHFEQYKVDYTLITFNWFLVVFVDSVVSDILFKIWDSFLYEGPKVIFRFALALFKYKEEEILKLQDSMSIFKYLRYFTRTILDARKLISISFGDLNPFPLRQIRNRRAYHLEKVRLELTELEAIREDFLRERDTSPDKGELVSDEEEDT

SEQ ID NO: 2034 - DNA, 859 bp, Homo sapiens
  misc_feature (3)..(12): n is a, c, g, or t
  misc_feature (57)..(57): n is a, c, g, or t
  misc_feature (63)..(63): n is a, c, g, or t
  misc_feature (156)..(156): n is a, c, g, or t
  misc_feature (355)..(355): n is a, c, g, or t
  misc_feature (367)..(369): n is a, c, g, or t
  misc_feature (403)..(403): n is a, c, g, or t
  misc_feature (432)..(434): n is a, c, g, or t
  misc_feature (440)..(441): n is a, c, g, or t
  misc_feature (445)..(446): n is a, c, g, or t
  misc_feature (469)..(469): n is a, c, g, or t
  misc_feature (472)..(472): n is a, c, g, or t
  misc_feature (497)..(497): n is a, c, g, or t
  misc_feature (502)..(502): n is a, c, g, or t
  misc_feature (505)..(506): n is a, c, g, or t
  misc_feature (511)..(511): n is a, c, g, or t
  misc_feature (521)..(521): n is a, c, g, or t
  misc_feature (536)..(536): n is a, c, g, or t
  misc_feature (541)..(543): n is a, c, g, or t
  misc_feature (556)..(557): n is a, c, g, or t
  misc_feature (562)..(562): n is a, c, g, or t
  misc_feature (568)..(568): n is a, c, g, or t
  misc_feature (570)..(570): n is a, c, g, or t
  misc_feature (572)..(573): n is a, c, g, or t
  misc_feature (579)..(583): n is a, c, g, or t
  misc_feature (585)..(586): n is a, c, g, or t
  misc_feature (595)..(596): n is a, c, g, or t
  misc_feature (600)..(601): n is a, c, g, or t
  misc_feature (603)..(604): n is a, c, g, or t
  misc_feature (607)..(607): n is a, c, g, or t
  misc_feature (610)..(616): n is a, c, g, or t
  misc_feature (618)..(618): n is a, c, g, or t
  misc_feature (620)..(622): n is a, c, g, or t
  misc_feature (625)..(626): n is a, c, g, or t
  misc_feature (630)..(630): n is a, c, g, or t
  misc_feature (633)..(634): n is a, c, g, or t
  misc_feature (637)..(638): n is a, c, g, or t
  misc_feature (640)..(641): n is a, c, g, or t
  misc_feature (648)..(658): n is a, c, g, or t
  misc_feature (660)..(667): n is a, c, g, or t
  misc_feature (670)..(671): n is a, c, g, or t
  misc_feature (675)..(696): n is a, c, g, or t
  misc_feature (699)..(858): n is a, c, g, or t
ttnnnnnnnnnnctctatccagaggctaaggaaacatagagtttgggccttggaacngttacngccttgtcctagagttgtcctgatcaggcttggggcctagttacagattagtcctaaagaattgcattaacttaaaaaaaatcaaaccttggnaagagctaaaataatttggagatatctttgcccttgacttgtagacgacatctaagaggatgaagaaaggagagtctaagtgagactctggcctacttcctaacaatgtcttggaagtgggatgatggtaaaggagaaaggccacagtccaatccctctgccttcagatagggaactcaaatcctgaaattactgtttnctttctggcctnnnctcctggttagaggaggaagcggaaagtagtttngagtaatactttgtccatattaccccccnnnggtttnngggnntctggcccctctaccaatagggnagnagcctcctgccctggatgggtattnagggnggnnttggnccaacaggtncccagagggtacatnctccnnncttgggagagatnntcccnaccatntngnngaaagnnnnnannactctcccnncccnncnnccnccnnnnnnngnannncanntggnttnnccnntnnctcaaannnnnnnnnnncnnnnnnnnttnnaaannnnnnnnnnnnnnnnnnnnnnaannnnnnnnnnnnnnnnnnnnnnnnnnnnnnnnnnnnnnnnnnnnnnnnnnnnnnnnnnnnnnnnnnnnnnnnnnnnnnnnnnnnnnnnnnnnnnnnnnnnnnnnnnnnnnnnnnnnnnnnnnnnnnnnnnnnnnnnnnnnnnnnnnnnnnnnnnnnnnnnc

SEQ ID NO: 2035 - DNA, 5585 bp, Homo sapiens
gcctttgctaaattgctgaataagaagatggttgagtcacctccttcgcttaaacttgtcctcattggaggttgtcgtaacaaagatgatgaacttagggtaaaccaactgagaaggctgtctgaggatttaggagttcaagaatatgtggaatttaaaataaacattccatttgatgaattaaagaattatttgtctgaagcaacaattggtctgcataccatgtggaacgagcattttgggattggagttgtggagtgtatggcagctggcacaattatccttgcacacaattcggggggcccaaagcttgacattgtggttcctcacgaaggagatataactggctttctggctgagagtgaagaagactatgctgaaactatcgctcacattctttccatgtctgcagaaaagagactccaaatcagaaaaagtgctcgtgcatctgtaagcagattctctgatcaggaatttgaagtgacattcctatcatctgtggaaaagttatttaagtaatgccatatctgtaaaattaaagatattttatataaactggttaaacaccttcatatgtaaatatttttctaaattcaatctcatttgtcaaatcattttactttagaaaacagacaaaatttccttttagaataaaaggaagtgttgaaaagaaaatggatgactagccttcggcttccattcttggtatacatgagagaggctggctgctgagatgaatgtgaaccaggttgcagagaatctggctttgagccaccaggaagaactagtggatttgccaaaaaactaccccttgagtgaaaatgaagatgagggggacagtgatggagagagaaagcatcaaaagcttctggaagcaatcatttcccttgatggaaagaataggcggaaattggctgagaggtctgaggctagtctgaaagtgtcagagttcagtgtcagttctgaaggatcaggagaaaagctgggccttgcagatctgcttgagcccgttaaaacttcatcttctttggccactgtaaaaaagcaactgaatagagtcaaatcaaagaaggtggtggagttacctcttaacaaagaaaaaattgaacagatccacagagaagtagcattcagtaaaacctcacaggtcctctccaaatgggaccctatcatcctgaagaaccagcaggcagagcagctggtttttcccctggggaaggagcagccagccattgctcccattgaacatgcgctcagtggctggaaggcaagaactcccctggagcaggaaatttttaacctcctccataagaacaagcagccagtgacagatcctttactgactcccatggaaaaggcctctctccaagccatgagcctggaagaggcaaagatgcaccgagcagagcttcagagggctcgggctctgcagtcctactatgaggccaaggctcgaaaagagaagaaaatcaaaagtaaaaagtatcacaaagtcgtgaagaaaggaaaggccaagaaagccttaaaagagtttgagcagctacagaaggttaatccaactgtggcactggaagaaatggaaaaaattgaaaatgccagaatgatggaaagaatgagccttaagcaccaaaacagtgggaaatgggccaagtcaaaggcaattatggccaaatatgacctggaggctcgccaagctatgcaggaacagttggccaagaacaaagaactgacacagaaactccaggtagcctctgagagtgaggaagaggagggaggcacagaagtggaagaactccttgtccctcatgtagcgaatgaagtgcagatgaatgtggacggaccgaatccctggatgttcaggagctgcaccagtgacaccaaagaggctgcaacacaggaggaccctgagcaagtgccagagcttgcagctcatgaggtttctgcaagtgaggcagaagaaagaccagtggcagaggaagaaattttgttgagagaatttgaggaaaggcaatcccttagaaaaagatctgagctcaaccaggatgctgagccagcaagcagtcaagaaacaaaagattctagcagccaggaggtgctgtccgaattgagggcactatctcagaaattgaaggaaaaacatcagtccaggaagcaaaaagcaagttcagaggggactgttccccaggtccagagagaggaacctgccccagaagaagcggaacccctattgctacagaggtcagagagagtacaaactctggaagagctagaagagctgggaaaagaagattgttttcaaaataaggagcttcccagacctgtgttagaaggacagcagtcagagaggaccccaaataatcggcctgatgcccctaaggagaagaaagagaaggagcaactgatcaacctacagaacttcctgaccacacagtctccttccgtgaggtctttggcagttcccacaataatagaggagctggaagatgaagaggagagagaccaaaggcagatgataaaggaagcttttgctggggatgatgtcatcagagatttcttgaaagagaagagggaagctgtggaggcgagtaagccaaaggacgtggacctgacactacctggctggggcgagtggggtggtgtgggcctaaagcccagtgccaagaaaagacgccagtttctcattaaagcccctgagggtcctccaagaaaagataagaatttgccaaatgtgattatcagtgagaagcgcaacatccacgcagcagctcatcaggtacaagtgcttccatatccatttacccaccatcggcaatttgaaaggaccatccagacccctataggatccacatggaacacccagagggctttccaaaagctgactactcccaaggtcgtcaccaagccaggccatatcattaagcccataaaagcagaggatgtgggctaccagtcttcctcaaggtcagacctgcctgtcatacagaggaatccaaaacgaatcaccacacgtcacaataaagaagaaaaactgtaggttgtgtagctggagaagtgacagtcaggggccctgattccacttcctttggtccagttttactctgctacagggtggattccaaaactggctcagcacattgcatgtagttgagccacattttttaaaaaaagaaaatggatgaccattaattgactagcattttagaattgatcagacattagaacacagaaaaattctagtacatttaaattctaaacaatacagtggatgacccttttgaatatacctaatgatttccttaaaaaagaaattttaaacagacttgtttaatcgtgttctcaaagcatacagtcaagaggtgggactgactgatgctttataggtgtgtgtagggtggtagaggccaaggtgctgccagcaatcctttccatactaggtactggtgaaaattgtttttgtttatgctgtcagcacatttgtgtgggtctctcattgtcccttaacagtgccgcatctcagcctggaagtcagctttaagtcattcaagagaacctcaggctgtttttctgacagtgatgatatgatatacagatacatccacagggtatctattaccagcataatgcattgtaagatggcaaggtggcattttgaaagagcgctgggcaagcagttagcacatctgggcctaccttcagcttcttcatttacaaacttctgaccttttgacactaaagctgctcctttatctttctgagtctcagattcttcatctgtaatctggagttgttaattccagtccttactaccttttagagttggaatgagatggaaagtagatgaaactactttgaaaattacgacagttaagggctgggtgcggtgtctcacacctgtaatcccagcactttgggaggccgagatgggtggatcatgaggtcagcagttgagaccagccaaagtgctgggtgcggtgtctcacacctgtaatcccagcactttgggaggccgagatgggtggatcatgaggtcagcagttgagaccagcctgaacaacatggtgaaaccctgtctgtactaaaaatacaaaaaaattagctgggcctggtggcaggcacctgtaatcccagctacttgggagactgaggcaggagaattgcttgaaactggaaggcagaggttgcagtgagccaagattgtgccactgcactctagcctgggcaataagcaaaactccatctcaaaaaagaaaaaaaggaaaaagaaaattatgagagttacttaaaggtaacatcacatactaaatgtcttctataatcctatatttattaatgcattacaactctgtagattgttagttactaggccagtagctaggaattggtataaatttaatgcaccttctatcctgaataactagcatggaaaagtgaatatatgtgtgagcagatatggctataaagacctatagcttttgcactttatgcatatataatcaatcctttctagttcagtgaattgaccccatccacaggctgattcatctttgtgttaaggggcaaatgaaacggtatattatttctttgcagtctcctctcagtcattcatcaatgtggccagcttatctactcccaattatgttgttgatacatctccaagccatctgtcatcagatcaaaaagcagcaaacagagggtcagtcacaggatgttctgacacaccattgtaactttttgttagagatgatcccatttagaaaaagactggtagaaattggagtgaaaggaaccctacagattagcccagttctctcttattttcagctttacagacaagaacaatttaaatctaaagaatttagtagattccttcagtgtcacaaagctgtttcatgaaagaatcaagattataacctggatattctgactcctggcccagtgctttttcttactttgtagctacactttgaagtaagattcaaactgttatccactcaattgccttattcctgaggatgtagtcaaggaagaaaaagttttctggaattccgtaaattatattttaagcttatttcttcaaaattattttcatatatcacagatatatcattggaagatataatttgcatatatgttcattatcagtgttcctaatttggtattacatgtattctatttttttctgaatgatagcatgaaaagtgtcaaagtggtttgtccgctagcgtctgtctgcagaactttcaggatgactattaattcctctcagatgtcatttttgagtggtccaagcctgctgttttgaacccacagcagtggagatttgtattcttatttacagttgtgtactataaagtgtgtgttacataggttttgtgtaataattatttgtaaatattatttagatttgtatttagacatgatttatatctaatatagatacaaagtctgtgtctaaatattatttaaagaagtgatttttcattctcttggattctttccagtgtggtgccttttatatgcctcacatagtctccttgttctcctactaatattcccaagctccatatgccaattaaagaagaaac

SEQ ID NO: 2036 - protein, 766 aa, Homo sapiens
MNVNQVAENLALSHQEELVDLPKNYPLSENEDEGDSDGERKHQKLLEAIISLDGKNRRKLAERSEASLKVSEFSVSSEGSGEKLGLADLLEPVKTSSSLATVKKQLNRVKSKKVVELPLNKEKIEQIHREVAFSKTSQVLSKWDPIILKNQQAEQLVFPLGKEQPAIAPIEHALSGWKARTPLEQEIFNLLHKNKQPVTDPLLTPMEKASLQAMSLEEAKMHRAELQRARALQSYYEAKARKEKKIKSKKYHKVVKKGKAKKALKEFEQLQKVNPTVALEEMEKIENARMMERMSLKHQNSGKWAKSKAIMAKYDLEARQAMQEQLAKNKELTQKLQVASESEEEEGGTEVEELLVPHVANEVQMNVDGPNPWMFRSCTSDTKEAATQEDPEQVPELAAHEVSASEAEERPVAEEEILLREFEERQSLRKRSELNQDAEPASSQETKDSSSQEVLSELRALSQKLKEKHQSRKQKASSEGTVPQVQREEPAPEEAEPLLLQRSERVQTLEELEELGKEDCFQNKELPRPVLEGQQSERTPNNRPDAPKEKKEKEQLINLQNFLTTQSPSVRSLAVPTIIEELEDEEERDQRQMIKEAFAGDDVIRDFLKEKREAVEASKPKDVDLTLPGWGEWGGVGLKPSAKKRRQFLIKAPEGPPRKDKNLPNVIISEKRNIHAAAHQVQVLPYPFTHHRQFERTIQTPIGSTWNTQRAFQKLTTPKVVTKPGHIIKPIKAEDVGYQSSSRSDLPVIQRNPKRITTRHNKEEKL

SEQ ID NO: 2037 - DNA, 2749 bp, Homo sapiens
gcacaaacaagctggagcagcccagaggacaagaattttgggcagatttgaatgccatgaacgtgtatgaaacaactgaatttgaccaactacgaaggctgtccacaccaccctctagcaatgtcaactctatttaccacacagtctggaaattcttctgtagggaccactttggatggagagagtatcccgagtctgtcattcgattgattgaagaagccaactctcggggtctgaaagaggttcgatttatgatgtggaataaccactacatcctccacaattcattcttcaggagagagataaaaaggagacccctcttccgctcctgttttatactgcttccatatttacagacacttggtggggttcccacacaagctcctccacctcttgaagcaacttcatcatcacaaattatctgcccagatggggtcacttcagcaaacttttaccctgaaacttgggtttatatgcatccatctcaggacttcatccaagtccctgtttctgcagaggataaaagttatcggatcatttacaatctttttcataagactgtgcctgagtttaaatacagaattttgcagatattgagagtccaaaaccagtttctttgggagaaatataaaaggaaaaaggaatatatgaacaggaaaatgtttggccgtgacaggataataaatgagagacatttatttcatggaacatcccaggatgtggtagatggaatctgcaaacacaactttgaccctcgagtctgtggaaagcatgctacaatgtttggacaaggcagttattttgcaaagaaggcaagctactctcataacttttctaagaagtcctccaaaggagtccacttcatgtttctggccaaagtgctgacgggcagatacacaatgggcagtcatggcatgagaaggcccccgccagtcaatcctggcagtgtcaccagtgacctttatgactcttgtgtggataatttctttgagcctcagatttttgtcatttttaatgatgaccagagttacccttattttgttatccaatatgaagaagtcagtaacactgtttccatttgaaaaatcttggtactgctaaattatttgatatgaactcaatccagcatttgtagcaggttttgaatgggtgggactgggtggggaacagcattggacattaatagggcacttttcagacccattttttaaagtgctagaaaatgcttttttttaaaaaaaaatacaagttttaaaatgaccacttactctttaattatttactaattgctagtgtactcagtgtggaaaagactacagattacacactcttttcattcacacttgtacatatagacagcaatgttattaggagcattaaattaaaaaactgaacagcctaatttaaatgtggcttgggcctggtagaagtttgaccaaatggaatggaggctgtgagcaatgtgaggattctatttatttatttacgtttgataaaacttactggaactagtactaccatgcgtattccctgtccaaagcatcactgctttggtatagtataagttcatgaaattctggtgggtagaaagaaatttttatttctatcagcagtactaaaatgtatcagccaaccagagaacatcagtgactttaacttctgcagagtttgccccagaattcagagttctatttagaggaagttaaaacaacaacaaaaaacaaccatttgaaaaatttttgtcaccagcaaaacttttcactaattagtgatatgaaatgtgatttttgtgttgttaaacttcagctttggaaaactcagtctctttcattatcatccattccaatttgaaggagttgggcagctaatttggttaaaggcagtcttgagggttagaagtattacttccttttcgggttccagacctagcttgtgactgaaagttttagaaaaaggaagtacatctatagccgaattgataaggttattactgtgttttgcacaaagtatattagcaaaagtatttgctggaattattggtagatggcagtcccactcctacacctgctttgtcagatacagctgggttccctggctgactctgtaccttacttacactacttacttaatagaaacacaaacttggaaattgtgccagtggtccagctggagcacaacgtttggtgaatatgctgtttcctcagttcagagaggtagcaactaggtaaactccttataaaaagcaaatacctggatttacaaaagtgaaagtagttgttcacaaaagaattcgccatggaattctttcagttaccaagctctcctggtaatgtttgtggttatatcatttacacaaaacttttcaggaacttctgtgttgtttaagcaagatgtatctgtactgatgtctcagtgaatcagtctgtttattaagcacttatcagggcttccacacacttatttattttgccctagttaatcctgttgtttgctgccattggcatgaaatggccaactgtggctgttacagttctttcattcaattataacttgtaaaccagtgactcctaatctttttcaagttaagacaccttaccattgcttatttggttttatgagacttgttcctttttttctccctaaggaaaaagaaagctttatgacatatttatttttttaataaaactaagcaaaaataaaaaaaaaaaaaaaaaaaaaaaaaaaaaaaaaaaaaaaaaaaaaaaaaaaa

SEQ ID NO: 2038 - protein, 359 aa, Homo sapiens
TNKLEQPRGQEFWADLNAMNVYETTEFDQLRRLSTPPSSNVNSIYHTVWKFFCRDHFGWREYPESVIRLIEEANSRGLKEVRFMMWNNHYILHNSFFRREIKRRPLFRSCFILLPYLQTLGGVPTQAPPPLEATSSSQIICPDGVTSANFYPETWVYMHPSQDFIQVPVSAEDKSYRIIYNLFHKTVPEFKYRILQILRVQNQFLWEKYKRKKEYMNRKMFGRDRIINERHLFHGTSQDVVDGICKHNFDPRVCGKHATMFGQGSYFAKKASYSHNFSKKSSKGVHFMFLAKVLTGRYTMGSHGMRRPPPVNPGSVTSDLYDSCVDNFFEPQIFVIFNDDQSYPYFVIQYEEVSNTVSI

SEQ ID NO: 2039 - DNA, 3250 bp, Homo sapiens
ggagtcaggaatggagagaagggtaatggtgttacctcttattgtggaaacctgttgagatcacagagaatatactgacggcataaaagggcagaaccatagcagggtgcgcgctgctgtagttgccttccatggatctataggagagcaagtcctccaggagaagaagtcctcaccagtgaacggagacctctctgaactaagaataccatggccacgtcagccccactacggagcctggaagaggaggtgacctgctccatctgtcttgattacctgcgggaccctgtgaccattgactgtggccacgtcttctgccgcagctgcaccacagacgtccgccccatctcagggagccgccccgtctgcccactctgcaagaagccttttaagaaggagaacatccgacccgtgtggcaactggccagcctggtggagaacattgagcggctgaaggtggacaagggcaggcagccgggagaggtgacccgggagcagcaggatgcaaagttgtgcgagcgacaccgagagaagctgcactactactgtgaggacgacgggaagctgctgtgcgtgatgtgccgggagtcccgggagcacaggccccacacggccgtcctcatggagaaggccgcccagccccacagggaaaaaatcctgaaccacctgagtaccctaaggagagacagagacaaaattcagggcttccaggcaaagggagaagctgatatcctggccgcgctgaagaagctccaggaccagaggcagtacattgtggctgagtttgagcagggtcatcagttcctgagggagcgggaggaacacctgctggaacagctggcgaagctggagcaggagctcacggagggcagggagaagttcaagagccggggcgtcggggagcttgcccggctggccctggtcatctccgaactggagggcaaggcgcagcagccagctgcagagctcatgcaggacacgagagacttcctaaacaggtatccacggaagaagttctgggttgggaaacccattgctcgagtggttaaaaaaaagaccggagaattctcagataaactcctctctctgcaacgaggcctgagggaattccaggggaagctgctgagagacttggaatataagacagtgagcgtcaccctggacccacagtcggccagtgggtacctgcagctgtcagaggactggaagtgcgtgacctacaccagcctgtacaagagtgcctacctgcacccccagcagtttgactgtgagcctggggtgctgggcagcaagggcttcacctggggcaaggtctactgggaagtggaagtggagagggagggctggtctgaggatgaagaagagggggatgaggaggaagagggagaagaggaggaggaggaagaggaggccggctatggggatggatatgacgactgggaaacggacgaagatgaggaatcgttgggcgatgaagaggaagaagaggaggaggaagaggaggaagttctggaaagctgcatggtgggggtggctagagactctgtgaagaggaagggagacctctccctgcggccagaggatggcgtgtgggcgctgcgcctctcctcctccggcatctgggccaacaccagccccgaggctgagcttttcccagcactgcggccccggagagtgggcatcgccctggattatgaagggggcaccgtgactttcaccaacgcagagtcacaggaactcatctacaccttcactgccaccttcacccggcgcctggtccccttcctgtggctcaagtggccaggaacacgcctcctgctaagaccctgagccctgacatctgcccccagccccaaccctcagatgcttcacttctttggaattccaggactctcaatggggggacgggatgcctggcctaagcacctggagcaggggaccccatatccactggtagccacctccccattgctgtggccccctgaaatctcactcagtgctgttgctccatctactgccctaatggggctcttttcccacctcctgctggtttcccgagggaacttctgaccctggagtccatgagggctcctttcctttttgaccacgaccttggccctagctctgcactctctggaataagggcccgatgcagcattttcttgcccagtgtggcaagacctcagaaaaaccagtcaattacgcctaagatcattttgctgtccttaaaccccccaggttccttcttgcacaaatccactctgctgcccaccttccctggcattttaaacagacctaccccaccccaactcagagttaagcatacatggcaatgctgaaaataaacaaaatccactgaggcttcccaggccatttaaagcctggagtaccagcgcatatcatctcatggggtccagagtggagtccaggcttctctgaaaccagggctgagcatatttccatagccaaggaggtgggactccctggagctatctgtggtcttagggaaggatccagacatacacggctttggggtacaagctgtgatcactgatcaataaattatctctagattggtccttgtgaggggagttttaagaatccagaacatcttgctcttgatcagcacatccaaaaacaccaagacaaacatccagtggagcagaacctctcctgcctcgggagttctgaccgggttccccagcagggtgttaagcctctgtctctggccctaccagcatccaggttccactttcctaggagagagtggagatgggaagacagggaaaggaaggcagcaggaggccacaagcccaccaggtcttcatgtcaagagagggagtaacatgtcttctcattgcccacggacccaacctctgtccaggtgcccctcatcatcacagtttaacacaagctcccctgctccagccaaattgatctcccagtcttgtccttacccattccaagtgctctgccagcccctgttcatccaagttttaagtcctccaccctgttataagagactgttccaacggctctgggcctcagtggtcacttgaccaccattgtctcagagctgcccactttgtgtgtgtcacatgctgcctgagtcacatgtacatcttatttctgcctctagttttgtaagctcctggagggcggataacatcttatactactcttgtattctcatggcacctagtgcagtgctgggcacagagtaggtgctcaataaagacttgttgaatga

SEQ ID NO: 2040 - protein, 539 aa, Homo sapiens
MATSAPLRSLEEEVTCSICLDYLRDPVTIDCGHVFCRSCTTDVRPISGSRPVCPLCKKPFKKENIRPVWQLASLVENIERLKVDKGRQPGEVTREQQDAKLCERHREKLHYYCEDDGKLLCVMCRESREHRPHTAVLMEKAAQPHREKILNHLSTLRRDRDKIQGFQAKGEADILAALKKLQDQRQYIVAEFEQGHQFLREREEHLLEQLAKLEQELTEGREKFKSRGVGELARLALVISELEGKAQQPAAELMQDTRDFLNRYPRKKFWVGKPIARVVKKKTGEFSDKLLSLQRGLREFQGKLLRDLEYKTVSVTLDPQSASGYLQLSEDWKCVTYTSLYKSAYLHPQQFDCEPGVLGSKGFTWGKVYWEVEVEREGWSEDEEEGDEEEEGEEEEEEEEAGYGDGYDDWETDEDEESLGDEEEEEEEEEEEVLESCMVGVARDSVKRKGDLSLRPEDGVWALRLSSSGIWANTSPEAELFPALRPRRVGIALDYEGGTVTFTNAESQELIYTFTATFTRRLVPFLWLKWPGTRLLLRP

SEQ ID NO: 2041 - DNA, 1451 bp, Homo sapiens
aggggcgctccggccagtgattggctggaggtttgttaactattcatgagggggcgggccgagcggggcggcctttgttaagcagcgagggcgcgaccgcgggtactctgctgccggcttctcggagcggcgctgggcgaccagagcagggtcgagatgtcctacatcccgggccagccggtcaccgccgtggtgcaaagagttgaaattcacaagctgcgtcaaggtgagaacttaatcctgggtttcagcattggaggtggaatcgaccaggacccttcccagaatcccttctctgaagacaagacggacaagggtatttatgtcacacgggtgtctgaaggaggccctgctgaaatcgctgggctgcagattggagacaagatcatgcaggtgaacggctgggacatgaccatggtcacacacgaccaggcccgcaagcggctcaccaagcgctcggaggaggtggtgcgtctgctggtgacgcggcagtcgctgcagaaggccgtgcagcagtccatgctgtcctagcagccaccaccatctgcgactcctgcctgccgcctctctgtacagtaacgccacttccacactctgtccccatctggcttctgctgaccgctgggccccagctcagaagggctatagctggtcccagaggcctggcctggccttccttcccttctcccatccctggcctggggcctctgggaccagctttctctcctggacaccgaggattggaaataagggcctggagctgagtagtagccagtctgctgtgaccacaggctcaggtccgaccctgctgcttggccacagcagtggctgggcaagtgggaaccactatctcttgggagcccccaaaagctgggaaatgctggaggaaccaggcctttcccgcttttgcctggctgcagggttcggctccgcccctgccccccagccctcgtgtgtccacaccgcagtgcctctgcccctcgggggactggacacacatcctgccagaggcgctacgaagctttgcccagatgaagccaggtgggctccgcgttcactcccactctcccgaggggtgctggcctccccagggtttgccttcttacggatttagacgaggttcgaggctcacctatcagggcagctctcaggattgtcattttcctctttgcctgtgggtttaacttttgtatttttttaatcacaagtttgatacaaaatgtttttatcgtactctttggagatgcccattctacttttgaatttagcttttactaattcgcatctggaagctcagcaagtgcacaagccttactttggttaccgtggaaaccactgccgcccctccccgatgtggtgcgctcaataaaaatgctggaattcaaaaaaaaaaaaaaaaaaaaaaaaaaaaaaaaaaaaaaaaaaaaaaaaaaaaaaaaaaaaaaaaaaaa

SEQ ID NO: 2042 - protein, 124 aa, Homo sapiens
MSYIPGQPVTAVVQRVEIHKLRQGENLILGFSIGGGIDQDPSQNPFSEDKTDKGIYVTRVSEGGPAEIAGLQIGDKIMQVNGWDMTMVTHDQARKRLTKRSEEVVRLLVTRQSLQKAVQQSMLS

SEQ ID NO: 2043 - DNA, 2725 bp, Homo sapiens
gttacgcgcagccccgcccccgcggcctcgtcgctcctgctgaggcggtagccgcttttcgtcgactcttaccggttggctgggccagctgcgccgcggctcacagctgacgatgggggaccccagcaagcaggacatcttgaccatcttcaagcgcctccgctcggtgcccactaacaaggtgtgttttgattgtggtgccaaaaatcccagctgggcaagcataacctatggagtgttcctttgcattgattgctcagggtcccaccggtcacttggtgttcacttgagttttattcgatctacagagttggattccaactggtcatggtttcagttgcgatgcatgcaagtcggaggaaacgctagtgcatcttccttttttcatcaacatgggtgttccaccaatgacaccaatgccaagtacaacagtcgtgctgctcagctctatagggagaaaatcaaatcgctcgcctctcaagcaacacggaagcatggcactgatctgtggcttgatagttgtgtggttccacctttgtcccctccaccaaaggaggaagatttttttgcctctcacgtttctcctgaggtgagtgacacagcgtgggcatcagcaatagcagaaccatcttctttaacatcaaggcctgtggaaaccactttggaaaataatgaaggtggacaagagcaaggaccaagtgtggaaggtcttaatgtaccaacaaaggctactttagaggtatcctctatcataaaaaagaaaccaaatcaagctaaaaaaggccttggggccaaaaaaggaagtttgggagctcagaaactggcaaacacatgctttaatgaaattgaaaaacaagctcaagctgcggataaaatgaaggagcaggaagacctggccaaggtggtatctaaagaagaatcaattgtttcatcattacgattagcctataaggatcttgaaattcaaatgaagaaagacgaaaagatgaacattagtggcaaaaaaaatgttgactcagacagactcggcatgggatttggaaattgcagaagtgttatttcacattcagtgacttcagatatgcagaccatagagcaggaatcacccattatggcaaaaccaagaaaaaagtataatgatgacagtgacgattcatattttacttccagctcaaggtactttgacgagccagtggagttaaggagcagttctttctctagctgggatgacagttcagattcctattggaaaaaagagaccagcaaagatactgaaacagttctgaaaaccacaggctattcagacagacctactgctcgccgcaagccagattatgagccagttgaaaatacagatgaggcccagaagaagtttggcaatgtcaaggccatttcatcagatatgtattttggaagacaatcccaggctgattatgagaccagggcccgcctagagaggctgtcggcaagttcctccataagctcggctgatctgttcgaggagccgaggaagcagccagcagggaactacagcctgtccagtgtgctgcccaacgcccccgacatggcgcagttcaagcagggagtgagatcggttgctggaaaactctccgtctttgctaatggagtcgtgacttcaattcaggatcgctacggttcttaatactgaagtcatgatgtgtatttcctggagaaattcctctttaaatgaacaagtaaccacatctcaggcggcagtgaagtccagatagttttgcagattgttttgctactttttcatatggtatatgtttctgatttttaatatttcttttgagaaattctgagttctgatgtaggagctttcctgtgatttctgtttcacgttccttcctgtcacaccctcctttggcgtctctgtgtatatccttgctttattttcttggaacctttgatttcaacactgagggcctggagacctcggctcctcctgctcctgaaccaggaggcttcatgtgggggaggaggagaggtctccatgtgacacatgggctcagggctgccagaatcagcggatgctggatgggcctgcagaaacaacactcaccacacacacttccttcaaaagaccaaaagtgactggtgtctcgtgtgacagattgcttcatttatgtttctacatagtaaggtgactgccaaataatatttgaagtcatctgtctctttgtaaattattttatatgacctataaatttaaaaatgtttttcagtgagtgcttttaacaaacttaagcttctgccctgccaagggaattaatgttatcttgtgaaaggtgttgctgtttgaattgatgagaaatggaagatgagaactccctaagagttctcataataaatcatctcatcacaaatcaatacggtatacagagttaaagtggaatgaggtaagaagatacagctacagaaaatagttgcgtgtatgggagaacagtcattgtaattgggtagttttgttaataaatatttttaaatcttgcttttcagaaattaccgaatgtgtataaacaaataaagaaaaataatttagctgtgttttagacagcattagaatatattgttcagcacagtaaaatatatttgaaatttgataagccaaaaatgtggttttgaatgaatattttgtgaatctttcttaaaagctcaaatttgtagacttctaaatagaataaacacttgcagcagatgg

SEQ ID NO: 2044 - protein, 516 aa, Homo sapiens
MGDPSKQDILTIFKRLRSVPTNKVCFDCGAKNPSWASITYGVFLCIDCSGSHRSLGVHLSFIRSTELDSNWSWFQLRCMQVGGNASASSFFHQHGCSTNDTNAKYNSRAAQLYREKIKSLASQATRKHGTDLWLDSCVVPPLSPPPKEEDFFASHVSPEVSDTAWASAIAEPSSLTSRPVETTLENNEGGQEQGPSVEGLNVPTKATLEVSSIIKKKPNQAKKGLGAKKGSLGAQKLANTCFNEIEKQAQAADKMKEQEDLAKVVSKEESIVSSLRLAYKDLEIQMKKDEKMNISGKKNVDSDRLGMGFGNCRSVISHSVTSDMQTIEQESPIMAKPRKKYNDDSDDSYFTSSSRYFDEPVELRSSSFSSWDDSSDSYWKKETSKDTETVLKTTGYSDRPTARRKPDYEPVENTDEAQKKFGNVKAISSDMYFGRQSQADYETRARLERLSASSSISSADLFEEPRKQPAGNYSLSSVLPNAPDMAQFKQGVRSVAGKLSVFANGVVTSIQDRYGS

SEQ ID NO: 2045 - DNA, 5733 bp, Homo sapiens
ggggacattttggattaaccttatgtaggttgccagctaatgaattgtaattgatttcaatcttagctgataaatctaattggtaatttatagaacaaatatttgataagctcctattaattgtcaccccaccaagcggacagctaacatgaattgcacttcactgcagctttagagatcggtttaggctgagacattgcgcctgccttaggttgctgacttctttatttcagagctctggagacacctagtttgaaaaatgttattctgtttttttgtgagaacttagtaaacaagaaaatactcttgagtgaaatgcaatgtatttcttttgtaatcagtgcatttgaaaattcaagccagcatattcctagtagatggaagcaaaattaagttgtctttgtagaaaatgaagagcctttcttccagcaaaaatccctgctgtatgcaatagccctgattaaccctctcccttctgcatgtttcccatattacagacttgagactgtcctcattcccatatgtaatagacatccaaagaatttcaattgctttgttgaacttttactaatgatcttgtttttattttctctcttgtttttggtttttcaccattgatattgtatttagaaggtttcaggtgggtgaaacctcctattccatgcgtaaggtgcctcgctgaagggagctcgaggcctggatctagggcagacacacaacctcctcctcctcttccagcaaggaacgcaccgaaaagtcacatgatgagaaatatggtaacgggtttgtaactgccacagcaaaacaatttgcctccatgcctgaatcttctgtcttgtggcttcagaaacagcttaaaataattttatttacaagcaagttatgtaagagaatgttttatactatagccacaattctgtcaaagataagtaaaagttaattgatattaaaaattattagagataatttacttagtaaaagcttctaactcttcttgttgttcattttttttccttttttcttctttgtttggattgcagcattctgctcttctgatgatgcgctgtgaccctgcagtagcgcaaaggctgcgcagcgttaatgcgcattgcgtgcgaatgaacccctgtgaacggttgactagatgagtaatctgattgactggctccctcagtcctattctgtagcctttttggataaaattgggttttaacatacctcgagtccaactaatctcattaaacaaatattctccatgggcctgtctagtagattaatggatctggttggccgtttgctgcgtctaggggtgttctatgtagcgcagcagttcgcagcgattgcgcagtgcgatgctgttaggttgcgcaagcgatgtttgcgctcgcattacagggacctcaacctaggtgcaatcctgtcatgtgaggtttcagcttcagtcctccttgggagacggggcattgtgagaatgtaacttaaagcctggctttatgatatcctacttggcagaaagacatttttctcctcagtagcatagttttgatgttagtgaggaacattgttgaagagcagcatttcccaaaatgtgtttcatagtattctaataaaatgcccaatgaaagaagagttccatggtcaactaagttcagggaaccctgttacactattaaaggcttagggaagtccagtaaagaaacctattttccgaatttatttgatcatgaactccttttttttcagccatacctcttaacacctcatagaacacacttccggaaacagtgggggtaggaaaactcggcctcaagttgcgccctctaggtagcacttgaaaacatgacaagggcccgtagttgtttggataagagaactccagcatagagccttatagcaactgacttcccagttaagtcccagtgtaagggttggtctttggttggcagaactgaacatggtggtttgcacttgggttctggtggcgcaggcgcaggagcagccagctgtggcagcgcattagttttggcgcaagcgagcctatgctgcagggtcacttttggctggtcagagaaggaataatgatatcaccttcttccccccctccccccaatcttttttttttccctttacaaattttcccctttccctttacctcctttccctcccatcttctttcattaacccctcctaaggcatgttatttgaaagcaattgagacgcaaccgaactttgcagtagcttggagtaatcttggctgtgttttcaatgcacaaggggaaatttggcttgcaattcatcactttgaaaaggctgtcacccttgacccaaactttctggatgcttatatcaatttaggaaatgtcttgaaagaggcacgcatttttgacagagctgtggcagcttatcttcgtgccctaagtttgagtccaaatcacgcagtggtgcacggcaacctggcttgtgtatactatgagcaaggcctgatagatctggcaatagacacctacaggcgggctatcgaactacaaccacatttccctgatgcttactgcaacctagccaatgctctcaaagagaagggcagtgttgctgaagcagaagattgttataatacagctctccgtctgtgtcccacccatgcagactctctgaataacctagccaatatcaaacgagaacagggaaacattgaagaggcagttcgcttgtatcgtaaagcattagaagtcttcccagagtttgctgctgcccattcaaatttagcaagtgtactgcagcagcagggaaaactgcaggaagctctgatgcattataaggaggctattcgaatcagtcctacctttgctgatgcctactctaatatgggaaacactctaaaggagatgcaggatgttcagggagccttgcagtgttatacgcgtgccatccaaattaatcctgcatttgcagatgcacatagcaatctggcttccattcataaggattcagggaatattccagaagccatagcttcttaccgcacggctctgaaacttaagcctgattttcctgatgcttattgtaacttggctcattgcctgcagattgtctgtgattggacagactatgatgagcgaatgaagaagttggtcagtattgtggctgaccagttagagaagaataggttgccttctgtgcatcctcatcatagtatgctatatcctctttctcatggcttcaggaaggctattgctgagaggcacggcaacctgtgcttagataagattaatgttcttcataaaccaccatatgaacatccaaaagacttgaagctcagtgatggtcggctgcgtgtaggatatgtgagttccgactttgggaatcatcctacttctcaccttatgcagtctattccaggcatgcacaatcctgataaatttgaggtgttctgttatgccctgagcccagacgatggcacaaacttccgagtgaaggtgatggcagaagccaatcatttcattgatctttctcagattccatgcaatggaaaagcagctgatcgcatccatcaggatggaattcatatccttgtaaatatgaatggctatactaagggcgctcgaaatgagctttttgctctcaggccagctcctattcaggcaatgtggctgggataccctgggacgagtggtgcgcttttcatggattatattatcactgatcaggaaacttcgccagctgaagttgctgagcagtattccgagaaattggcttatatgccccacactttttttattggtgatcatgctaatatgttccctcacctgaagaaaaaagcagtcatcgattttaagtccaatgggcacatttatgacaatcggatagttctgaatggcatcgacctcaaagcatttcttgatagtctaccagatgtgaaaattgtcaagatgaagtgtcctgatggaggagacaatgcagatagcagtaacacagctcttaatatgcctgttattcctatgaatactattgcagaagcagttattgaaatgattaaccgaggacagattcaaataacaattaatggattcagtattagcaatggactggcaactactcagatcaacaataaggctgcaactggagaggaggttccccgtaccattattgtaaccacccgttctcagtacgggttaccagaagatgccatcgtatactgtaactttaatcagttgtataaaattgacccttctactttgcagatgtgggcaaacattctgaagcgtgttcccaatagtgtactctggctgttgcgttttccagcagtaggagaacctaatattcaacagtatgcacaaaacatgggcctgccccagaaccgtatcattttttcacctgttgctcctaaagaggaacacgtcaggagaggccagctggctgatgtctgcttggacactccactctgtaatgggcacaccacagggatggatgtcctctgggcagggacccccatggtgactatgccaggagagactcttgcttctcgagttgcagcatcccagctcacttgcttaggttgtcttgagcttattgctaaaaacagacaagaatatgaagacatagctgtgaagctgggaactgatctagaatacctgaagaaagttcgtggcaaagtctggaagcaaagaatatctagccctctgttcaacaccaaacaatacacaatggaactagagcggctctatctacagatgtgggagcattatgcagctggcaacaaacctgaccacatgattaagcctgttgaagtcactgagtcagcataaataaagactgcacaggagaattacccctaaaaaaaaaaaaaaaaaagggcggccgagggaactagataacatacttcttacttgtctgtacagtaccttgttgcagatgggtgatatataatggtaatagaatagcacagccagacttgcttcctgcatggtagggagagacacaaaagatgggaaactgcttttccacaaggaatctccgtagaattttgcggcgaccagatggtgcataggtctggaaggtctgatctcccttggtcttccatgggatggttagtgtggaggggagatatagattgtccggccgctttgtgattccatggattgattcagtcttctggatttttttttctttatattttgggtactggagcttttaaaaatgtttggtttcaggtatttttattcatgtgaagtgtatatgattctcttgagataaggttttaagctaaaatgttactccctgttttagtttctgaactctgacagattgacagggactttgctggtgtagtctttttataggttttataaaccacttgagcctatatcagtcgttttagtgtctgacctaatatttggagctatcagtgctttgttgatttagatgatgactcaagattttttctggtccatttcccatttccttttcttccctgacccccataccctcacccttaaaattctcctgtaactcaactaacaaaatcaagcctgattcaaaacatcctagggtgttttaaacacaccatctggtgccaaatgaagatttttaggagtgattactaattatcaagggcacagttgtggtactgtcattgataataatatagtttttttttttttcctaaaaaaaaaaaaaaaaaaaaaaaaaaaaaaaaaaaaaaaaaataaaaaaaaaaaaaaaaaaaaaaaaaaaaac

SEQ ID NO: 2046 - protein, 920 aa, Homo sapiens
MLQGHFWLVREGIMISPSSPPPPNLFFFPLQIFPFPFTSFPSHLLSLTPPKACYLKAIETQPNFAVAWSNLGCVFNAQGEIWLAIHHFEKAVTLDPNFLDAYINLGNVLKEARIFDRAVAAYLRALSLSPNHAVVHGNLACVYYEQGLIDLAIDTYRRAIELQPHFPDAYCNLANALKEKGSVAEAEDCYNTALRLCPTHADSLNNLANIKREQGNIEEAVRLYRKALEVFPEFAAAHSNLASVLQQQGKLQEALMHYKEAIRISPTFADAYSNMGNTLKEMQDVQGALQCYTRAIQINPAFADAHSNLASIHKDSGNIPEAIASYRTALKLKPDFPDAYCNLAHCLQIVCDWTDYDERMKKLVSIVADQLEKNRLPSVHPHHSMLYPLSHGFRKAIAERHGNLCLDKINVLHKPPYEHPKDLKLSDGRLRVGYVSSDFGNHPTSHLMQSIPGMHNPDKFEVFCYALSPDDGTNFRVKVMAEANHFIDLSQIPCNGKAADRIHQDGIHILVNMNGYTKGARNELFALRPAPIQAMWLGYPGTSGALFMDYIITDQETSPAEVAEQYSEKLAYMPHTFFIGDHANMFPHLKKKAVIDFKSNGHIYDNRIVLNGIDLKAFLDSLPDVKIVKMKCPDGGDNADSSNTALNMPVIPMNTIAEAVIEMINRGQIQITINGFSISNGLATTQINNKAATGEEVPRTIIVTTRSQYGLPEDAIVYCNFNQLYKIDPSTLQMWANILKRVPNSVLWLLRFPAVGEPNIQQYAQNMGLPQNRIIFSPVAPKEEHVRRGQLADVCLDTPLCNGHTTGMDVLWAGTPMVTMPGETLASRVAASQLTCLGCLELIAKNRQEYEDIAVKLGTDLEYLKKVRGKVWKQRISSPLFNTKQYTMELERLYLQMWEHYAAGNKPDHMIKPVEVTESA

SEQ ID NO: 2047 - DNA, 1755 bp, Homo sapiens
atggccggcggcgtggacggccccatcgggatcccgttccccgaccacagcagcgacatcctgagtgggctgaacgagcagcggacgcagggcctgctgtgcgacgtggtgatcctggtggagggccgcgagttccccacgcaccgctcggtgctggccgcctgcagccagtacttcaagaagctgttcacgtcgggcgccgtggtggaccagcagaacgtgtacgagatcgacttcgtcagcgccgaggcgctcaccgcgctcatggacttcgcctacacggccacgctcaccgtcagcacagccaacgtgggtgacatcctcagcgccgcccgcctgctggagatccccgccgtgagccacgtgtgcgccgacctcctggaccggcagatcctggcggccgacgcgggcgccgacgccgggcagctggaccttgtagatcaaattgatcagcgcaacctcctccgcgccaaggagtacctcgagttcttccagagcaaccccatgaacagcctgccccccgcggccgccgccgccgctgccagcttcccgtggtccgcctttggggcgtccgatgatgacctggatgccaccaaggaggccgtggccgccgctgtggccgccgtggccgcgggcgactgcaacggcttagacttctatgggccgggccccccggccgagcggcccccgacgggggacggggacgagggcgacagcaacccgggtctgtggccagagcgggatgaggacgcccccaccgggggtctctttccgccgccggtggccccgccggccgccacgcagaacggccactacggccgcggcggagaggaggaggccgcctcgctgtcggaggcggcccccgagccgggcgactctccgggcttcctgtcgggagcggccgagggcgaggacggggacgggcccgacgtggacgggctggcggccagcacgctgctgcagcagatgatgtcatcggtgggccgggcgggggccgcggcgggggacagcgacgaggagtcgcgggccgacgacaagggcgtcatggactactacctgaagtacttcagcggcgcccacgacggcgacgtctacccggcctggtcgcagaaggtggagaagaagatccgagccaaggccttccagaagtgccccatctgcgagaaggtcatccagggcgccggcaagctgccgcgacacatccgcacccacacgggcgagaagccctacgagtgcaacatctgcaaggtccgcttcaccaggcaggacaagctgaaggtgcacatgcggaagcacacgggcgagaagccgtacctgtgccagcagtgcggcgccgcctttgcccacaactacgacctgaagaaccacatgcgcgtgcacacgggcctgcgcccctaccagtgcgacagctgctgcaagaccttcgtccgctccgaccacctgcacagacacctcaagaaagacggctgcaacggcgtcccctcgcgccgcggccgcaagccccgcgtccggggcggggcgcccgaccccagcccgggggccaccgcgacccccggcgcccccgcccagcccagctcccccgacgcccggcgcaacggccaggagaagcactttaaggacgaggacgaggacgaggacgtggccagccccgacggcttgggccggttgaatgtagcgggcgccggtggaggaggtgacagcggaggtggccccggggccgccaccgacggtaacttcacagccggactcgcctaa

SEQ ID NO: 2048 - protein, 584 aa, Homo sapiens
MAGGVDGPIGIPFPDHSSDILSGLNEQRTQGLLCDVVILVEGREFPTHRSVLAACSQYFKKLFTSGAVVDQQNVYEIDFVSAEALTALMDFAYTATLTVSTANVGDILSAARLLEIPAVSHVCADLLDRQILAADAGADAGQLDLVDQIDQRNLLRAKEYLEFFQSNPMNSLPPAAAAAAASFPWSAFGASDDDLDATKEAVAAAVAAVAAGDCNGLDFYGPGPPAERPPTGDGDEGDSNPGLWPERDEDAPTGGLFPPPVAPPAATQNGHYGRGGEEEAASLSEAAPEPGDSPGFLSGAAEGEDGDGPDVDGLAASTLLQQMMSSVGRAGAAAGDSDEESRADDKGVMDYYLKYFSGAHDGDVYPAWSQKVEKKIRAKAFQKCPICEKVIQGAGKLPRHIRTHTGEKPYECNICKVRFTRQDKLKVHMRKHTGEKPYLCQQCGAAFAHNYDLKNHMRVHTGLRPYQCDSCCKTFVRSDHLHRHLKKDGCNGVPSRRGRKPRVRGGAPDPSPGATATPGAPAQPSSPDARRNGQEKHFKDEDEDEDVASPDGLGRLNVAGAGGGGDSGGGPGAATDGNFTAGLA

SEQ ID NO: 2049 - DNA, 1078 bp, Homo sapiens
tccaagctgagctgagggcccgcggcggccgcggccggtgcatgtgcggctgctggatgcggaggcggcggcgacggcgcggatcggcaggatgttagggcagcagcagcagcaactgtactcgtcggccgcgctcctgaccggggagcggagccggctgctcacctgctacgtgcaggactaccttgagtgcgtggagtcgctgccccacgacatgcagaggaacgtgtctgtgctgcgagagctggacaacaaatatcaagaaacgttaaaggaaattgatgatgtctacgaaaaatataagaaagaagatgatttaaaccagaagaaacgtctacagcagcttctccagagagcactaattaatagtcaagaattgggagatgaaaaaatacagattgttacacaaatgctcgaattggtggaaaatcgggcaagacaaatggagttacactcacagtgtttccaagatcctgctgaaagtgaacgagcctcagataaagcaaagatggattccagccaaccagaaagatcttcaagaagaccccgcaggcagcggaccagtgaaagccgtgatttatgtcacatggcaaatgggattgaagactgtgatgatcagccacctaaagaaaagaaatccaagtcagcaaagaaaaagaaacgctccaaggccaagcaggaaagggaagcttcacctgttgagtttgcaatagatcctaatgaacctacatactgcttatgcaaccaagtgtcttatggggagatgataggatgtgacaatgaacagtgtccaattgaatggtttcacttttcatgtgtttcacttacctataaaccaaaggggaaatggtattgcccaaagtgcaggggagataatgagaaaacaatggacaaaagtactgaaaagacaaaaaaggatagaagatcgaggtagtaaaggccatccacattttaaagggttatttgactattatataatccgtttgctttcagaaaatgttttagggtaaatgcataagactatgcaataattattaatcattagtattaatggtgtattaaaagttgttgtactttg

SEQ ID NO: 2050 - protein, 280 aa, Homo sapiens
MLGQQQQQLYSSAALLTGERSRLLTCYVQDYLECVESLPHDMQRNVSVLRELDNKYQETLKEIDDVYEKYKKEDDLNQKKRLQQLLQRALINSQELGDEKIQIVTQMLELVENRARQMELHSQCFQDPAESERASDKAKMDSSQPERSSRRPRRQRTSESRDLCHMANGIEDCDDQPPKEKKSKSAKKKKRSKAKQEREASPVEFAIDPNEPTYCLCNQVSYGEMIGCDNEQCPIEWFHFSCVSLTYKPKGKWYCPKCRGDNEKTMDKSTEKTKKDRRSR

SEQ ID NO: 2051 - DNA, 3244 bp, Homo sapiens
ggctgtgggtgccgctgagcaagatggagctgtctgcagtgggcgagcgggtcttcgcggccgaatccatcatcaaacggcggatccgaaagggacgcatcgagtacctggtgaaatggaaggggtgggcgatcaagtacagcacttgggagcccgaggagaacatcctggactcgcggctcattgcagccttcgaacaaaaggagagggagcgtgagctgtatgggcccaagaagaggggacccaaacccaaaactttcctcctgaaggcgcgggcccaggccgaggccctccgcatcagtgatgtgcatttctctgtcaagccgagcgccagtgcctcctcgcccaagctgcactccagcgcagccgtgcaccggctcaagaaggacatccgccgctgccaccgtatgtcccgccgtcccctgccccgcccggacccgcaggggggcagccccggactgcgcccgcccatttcgcccttctcggagacggtgcgcatcatcaaccgcaaggtgaagccgcgggagcccaagcggaaccgcatcatcctgaacctgaaggtgatcgacaagggcgctggcggcgggggcgccgggcagggggccggggcgctggcccgccccaaagtcccctcgcggaaccgcgttataggcaagagcaagaagttcagcgagagcgtcctgcgtacacagatccgccacatgaagttcggcgcctttgcgctgtacaagcctccgcccgcccccctggtagccccgtcccccggcaaggctgaggcctcagccccgggccctgggctacttctggccgcccccgccgccccctacgacgcccgcagctctggctcctccggctgcccctcgcctacaccacagtcctctgaccccgacgacacgctccccaagctcctccccgagaccgtgagcccatccgcccccagctggcgcgagccggaggtgctcgacctgtccctccctcccgagtcggcagccaccagcaagcgggcaccgcctgaggtcacagctgctgccggcccggcacctcccacggcccctgagcccgccggtgcctcctccgagcccgaggctggggactggcgccccgagatgtcaccctgctccaatgtggtcgtcaccgatgtcaccagcaacctcctgacggtcacaatcaaggaattctgcaaccctgaggatttcgagaaggtggctgctggggtagcaggcgccgctgggggcggtggcagcattggggcgagcaagtgagggggctccaccaaggaggggggcttgggggggccctcctgcccgaagtcatactcttgctcccaccccacccttgcccccagccctctctccctgtgctttgcttgtctcaaatggctcggtgttgacccagggatggggctgggtagttggggtcccagaaagccgggggtaggggccaccctggaatggggcaggggaagggcacaccccctgcccatgcatggtagcccactgggtggtttctggaaagccctagaaactagggttcctctgccccttccacatcccacctgtctctctagcttgcttcctgctctcctgtgcggcgtctgatttctcggtgctaacctggcagctgtggggcccttaggagccccccaccgagggtggacacagtccctttccttcctgcagatgcctaggcaggaggagggcttcctgcctgtttggcaaagtcccaggcagaggccaaggatgaggcctgactcggctcctccctccacatcagccagggcatcagaagttgggccagggcggggtcttccctgctcgattttggacgaggcctaagtagaccccctatgccctgccccagccctggctctttcctaaccccctcaacggtgggaggaactggcagagggtgcgcctggccacagcctccccgcatctaaaggccccttcagttcttgaccaaaggtgctacgagaacctgccgtggaaacttccagttgtgcgtctgccccactcgctgtgtttgtccgtgggttcatacatgcattgggtgctaggccccaggctgccgggtggcaccctttacagttcctttgaacaggggcattgaaggcctggactgcctctcgcctcagtaggcctggggaccaggcttgggtctggaggtttgctgtggaagtcaccaggcctcccctcctggcccaggtgtgctgggggcaccgtgccccccacccccctgccctcctcagggtggtcagcccaacctgtcggaccttcacttcacatcatggtggggaccgagatagagagggagaccccattccaagctccctcttcctcccggtgtttggggaggatgctgaagaatccattcccgagggcctcccggcttgtcccagcccctcttttgcttctgaccacggaggctttctcacagcccagcctgcctgaagcaaaggaggctcccgtgtcctgggcagcttctgtttccctctgctgcctgggagctgaggcacccgtgccagtggcagaggccacagccccagccttaggccaggccctgggagggcaggcaggcaaaggggagaccagagggtctgtgttctccaggagaatgagggtgttggtcccagaattgggaccggggccccgctggccagccctgggccacttcccgggtctccattgtgcgtgggtggcgtgttccaggcgtggctggagctggcttcctggctgtgctgccatgggcccctccctcagaagcacgttggcaggaggccgatcagaaccctagcgcctttggtcctaagaatgggaggctgccttccttcccaatctccctgccagggcccacagcgtggccctagccctcccctccccgggatgtagaacggggaccctcgcagggttggggcgggggctgatactcctcggcccctccctaccctgccctgtgtgttggctttgtggccgtccaagtgccaattggcttttcgcccaaataagggctggtatttctcctctgtccttggaggtgatttccccctgaccccctcccccaggtgagtgaccacctgggtgccagttacaggtgtttccagagaccatagaaatgtgttttcctgagagttcgtgtcattcgtgacttttttgtaaagaagttgtgttttcagaggtgattttatgacaggaaagtgaaagaattagttttgcaaaaaaacaaaaacaaaaaaaaaaaaaaaaaa

SEQ ID NO: 2052 - protein, 412 aa, Homo sapiens
MELSAVGERVFAAESIIKRRIRKGRIEYLVKWKGWAIKYSTWEPEENILDSRLIAAFEQKERERELYGPKKRGPKPKTFLLKARAQAEALRISDVHFSVKPSASASSPKLHSSAAVHRLKKDIRRCHRMSRRPLPRPDPQGGSPGLRPPISPFSETVRIINRKVKPREPKRNRIILNLKVIDKGAGGGGAGQGAGALARPKVPSRNRVIGKSKKFSESVLRTQIRHMKFGAFALYKPPPAPLVAPSPGKAEASAPGPGLLLAAPAAPYDARSSGSSGCPSPTPQSSDPDDTLPKLLPETVSPSAPSWREPEVLDLSLPPESAATSKRAPPEVTAAAGPAPPTAPEPAGASSEPEAGDWRPEMSPCSNVVVTDVTSNLLTVTIKEFCNPEDFEKVAAGVAGAAGGGGSIGASK

SEQ ID NO: 2053 - DNA, 4279 bp, Homo sapiens
caacggcggcgacggcggcagcgacggatcctcctcctcccttattcccttgctcctctttcttccttttcttttcctttccggccgggcctcgtccactttccctaacggcggcctcgatcctacgtaaaggcatgacttcctggcaccacagggaaaatcgggtgcaagcccagaaactatttccccaccaccacttgttgaaaaactgatttgaaggcatctccggggttgaacaaacggaaagtgccaggatttgatgcgtctctggtttcgctctggagaccattccctgctaagtatcaagacgaaaaaaaactggaaactaatccgaaccatatttatttagagtcagaatggagcgatttgtagtaacagcaccacctgctcgaaaccgttctaagactgccttgtatgtgactcccctggatcgagtcactgagtttggaggtgagctgcatgaagatggaggaaaactcttctgcacttcttgcaatgtggttctgaatcatgttcgcaagtctgccattagtgaccacctcaagtcaaagactcataccaagaggaaggcagaatttgaagagcagaatgtgagaaagaagcagaggcccctaactgcatctcttcagtgcaacagtactgcgcaaacagagaaagtcagtgttatccaggactttgtgaaaatgtgcctggaagccaacatcccacttgagaaggctgatcacccagcagtccgtgctttcctatctcgccatgtgaagaatggaggctccatacctaagtcagaccagctacggaggcatatcttcctgatggatatgagaatgagaatcaactcctcaactcacgagattgttgactaggaggttaccaccattgtgatcaagataaatgtggagtattaaagttatgtgttgattgtgtggttcatttttgtatttatttcatttaaaatcatgtgacgcagaatagttttgcaatgtgtatatagttgcaggcaaaaaaaaaaccacctcactgcaaaacttattgttaattttagtcaccaatggtataaagcaaaacctaggtttagagtgtgctaggatacctgaaacctgatggttatctttaaaattaatggtttttctcctgaaatgtttgtgcatggaagaactgccctgcttttttaccctgttgccatgtatgattattccttgtgagattacttaattacttggattgaagactagcctattgaagctgctgccaggcaacaccacttaacagtaacttaaaggaattattttctttagaggatcctcttcaaaaaggaagggatagtggaaaactgttcttatatcttcagatccctagcagaaatgactgtttatttcaaactatgttttacttgtatatgatgtagtcaccttaactatctttcaattccatacttcccccgcccccattttaaaggcttattgttgtattttgtagcagcttcaagtgaccaaaagactaaaatctttcaacgtcaatgccaaaagccaaggggaattttgcagtgataggattttagtctcttactatgaatactaatttcgaaccatagctttcattttaagcatcatcttgaatttctaaacttttttctatgtcttggtgttaaaagatttcaagattggcatttttacttaaacagacattttatggttgagttttctctttattatagagaattagtaatctttttttggctgacagatcagataaaattactttctattcattaatttttctctacaactttatgagtttatctaggtgaatagtctagactagaaacaagtttactttatctgctttgcctctggtggtacaaggtttttaacatggattgtaaacaattgtctagaaattctggcaggttttttgtattggagatctggcagtatcctgcataactttgggtgaggaaattgttctcttaaagatcagccatgttcaggaaatgatctctgtttgaacctcactatcctgtaaggttatccaagtagcttagcccagctaagttctatcagagacccaaattatattttttaaaaatttaacagctggaaacttggactagagctttaataaaaaatcttaaattctttgaaattcaagttaaaaatacttatatatttctattacaaagcagtgacaaatgatgccctgtgtgacttggagttatctttgacttttaccacaaatcttcatttataaaagaaaaagccaaagtgaaaaaaagttagattgtgtatttttcagtaacagctttccatgtcttaagatttttttacagacttaagtttctaattcaggttgtcaaactggccatttgacttcagagatttgttttcattaaaaaataagcctgccgccaaaataaatcacttatcaaaatgtgaactgttttcctcatgttcagttatgttaaagtagtatgataaatgcatgcctagagtagtgctctcgttgatgaagcacatgtatgaggagaccagcagcaaaacataaccatatgtgttttgcgtttacttcctctagaaaagaatttgcaggcaaccatgtttaatttgaactatctaagatggtagattttagaagctaggaataattgagttttatagcactattttcagaatacaaaaagatacacaatcattctgttttttgaaattccatgtgattcaaactgttccctattatttgggtattaatttgcactaatagcaaaatgtaatggcagatcagctttgagagtggacctaagcagtaaactggatgatgttgcattagaaaaacatcaataattcatatttaagttttagtagttactactgatttgataatcacttaaattttatatatcttaatgtattttttcagactcctaattaattcccacattcactgtaactaggggcatagtccattctgttaggattatatcctctccttagaaatgttttccatcctgttgtggggatttggtattaatgtttcttcattgattatggaacttttgttccctgaagctagttaactgtgtctaaagttaaataaatacagcagaatgattgttttagcctgctcgaactgatacaaatccctgaaaccatgattggcatatgttagataacaaatgaggatgtctaagaggcatatgctgctttggaggtgtagtgaacgtgtgtacagaagttttcaatcttaactatatagtgttagtgtgatgctatactattggaaaaatagcagcttttttctattttataagttgtatgcataaacataagatttgtaatgtttcatttataaactgccttcttcaacacatgttaatagtgttttctcaaagtattgatagtatgtcctccagaatttcacaatatgcttacagtaaatatttcctagcttgttgaaatgttcaattctttgttggctttcttcttgattctgtgggggtgtataacaagcctgaaggacattgtaatcatttcttacaaggtgaaaattaagaaagattgtgtatgagagcctatatagttgttttatccattatcatctttgattaagactttaaaaaaatgctatttccagttaatgcatttggccctattgaattttcagggaccagaaaacattaaaaagttctgcatcttataatggtaaccaattaagcttgagattgttctgaaagtatcaattgctttaaaactgttgtaagtacagttggcaagatctccaagctgaaacttacacgttaaaacttttgcctgtaagaatttgcacatgaatgttaatggaaaacacaaaactttagatggcccaaaacaaaagccacaaacagttcatcatttggtgcttagtctttgtaagggctctctgtggtttgacttactccagctaccgttaaatgagggcaaatcaccttaaaacatgttcatttgattcataacaaggaaaattgggtctatgattttttgccaatcttagcctaaaagaaattgctttagcttctggtcagcactgattaaaatgtgaatagtgaagtggctatcctaaactggtttatctccacccacactatcatagattccttaggtaaatacaattcttatctagtggtattctacttgtattcagaatactgtattaaaattttactatttcatttttaaaaaaaaaaaaaaaaaaaaaaaacaaaaaaaaacaaaaaaaaaaaaaaaaaacaaaaaaaaaaaaaaaaaaa

SEQ ID NO: 2054 - protein, 168 aa, Homo sapiens
MERFVVTAPPARNRSKTALYVTPLDRVTEFGGELHEDGGKLFCTSCNVVLNHVRKSAISDHLKSKTHTKRKAEFEEQNVRKKQRPLTASLQCNSTAQTEKVSVIQDFVKMCLEANIPLEKADHPAVRAFLSRHVKNGGSIPKSDQLRRHIFLMDMRMRINSSTHEIVD

SEQ ID NO: 2055 - DNA, 2932 bp, Homo sapiens
gctccgcgccgagggctggaggatgcgttccctggggtccggacttatgaaaatatgcatcagtttaatactgtcttggaattcatgagatggaagcataggtcaaagctgtttggagaaaatcagaagtacagttttatctagccacatcttggaggagtcgtaagaaagcagtgggagttgaagtcattgtcaagtgcttgcgatcttttacaagaaaatctcactgaatgatagtcatttaaattggtgaagtagcaagaccaattattaaaggtgacagtacacaggaaacattacaattgaacaatgactcagctatacatttacatcagattattgggagcctatttgttcatcatttctcgtgttcaaggacagaatctggatagtatgcttcatggcactgggatgaaatcagactccgaccagaaaaagtcagaaaatggagtaaccttagcaccagaggataccttgccttttttaaagtgctattgctcagggcactgtccagatgatgctattaataacacatgcataactaatggacattgctttgccatcatagaagaagatgaccagggagaaaccacattagcttcagggtgtatgaaatatgaaggatctgattttcagtgcaaagattctccaaaagcccagctacgccggacaatagaatgttgtcggaccaatttatgtaaccagtatttgcaacccacactgccccctgttgtcataggtccgttttttgatggcagcattcgatggctggttttgctcatttctatggctgtctgcataattgctatgatcatcttctccagctgcttttgttacaaacattattgcaagagcatctcaagcagacgtcgttacaatcgtgatttggaacaggatgaagcatttattccagttggagaatcactaaaagaccttattgaccagtcacaaagttctggtagtgggtctggactacctttattggttcagcgaactattgccaaacagattcagatggtccggcaagttggtaaaggccgatatggagaagtatggatgggcaaatggcgtggcgaaaaagtggcggtgaaagtattctttaccactgaagaagccagctggtttcgagaaacagaaatctaccaaactgtgctaatgcgccatgaaaacatacttggtttcatagcggcagacattaaaggtacaggttcctggactcagctctatttgattactgattaccatgaaaatggatctctctatgacttcctgaaatgtgctacactggacaccagagccctgcttaaattggcttattcagctgcctgtggtctgtgccacctgcacacagaaatttatggcacccaaggaaagcccgcaattgctcatcgagacctaaagagcaaaaacatcctcatcaagaaaaatgggagttgctgcattgctgacctgggccttgctgttaaattcaacagtgacacaaatgaagttgatgtgcccttgaataccagggtgggcaccaaacgctacatggctcccgaagtgctggacgaaagcctgaacaaaaaccacttccagccctacatcatggctgacatctacagcttcggcctaatcatttgggagatggctcgtcgttgtatcacaggagggatcgtggaagaataccaattgccatattacaacatggtaccgagtgatccgtcatacgaagatatgcgtgaggttgtgtgtgtcaaacgtttgcggccaattgtgtctaatcggtggaacagtgatgaatgtctacgagcagttttgaagctaatgtcagaatgctgggcccacaatccagcctccagactcacagcattgagaattaagaagacgcttgccaagatggttgaatcccaagatgtaaaaatctgatggttaaaccatcggaggagaaactctagactgcaagaactgtttttacccatggcatgggtggaattagagtggaataaggatgttaacttggttctcagactctttcttcactacgtgttcacaggctgctaatattaaacctttcagtactcttattaggatacaagctgggaacttctaaacacttcattctttatatatggacagctttattttaaatgtggtttttgatgcctttttttaagtgggtttttatgaactgcatcaagacttcaatcctgattagtgtctccagtcaagctctgggtactgaattgcctgttcataaaacggtgctttctgtgaaagccttaagaagataaatgagcgcagcagagatggagaaatagactttgccttttacctgagacattcagttcgtttgtattctacctttgtaaaacagcctatagatgatgatgtgtttgggatactgcttattttatgatagtttgtcctgtgtccttagtgatgtgtgtgtgtctccatgcacatgcacgccgggattcctctgctgccatttgaattagaagaaaataatttatatgcatgcacaggaagatattggtggccggtggttttgtgctttaaaaatgcaatatctgaccaagattcgccaatctcatacaagccatttactttgcaagtgagatagcttccccaccagctttattttttaacatgaaagctgatgccaaggccaaaagaagtttaaagcatctgtaaatttggactgttttccttcaaccaccattttttttgtggttattatttttgtcacggaaagcatcctctccaaagttggagcttctattgccatgaaccatgcttacaaagaaagcacttcttattgaagtgaattcctgcatttgatagcaatgtaagtgcctataaccatgttctatattctttattctcagtaacttttaaaagggaagttatttatattttgtgtataatgtgctttatttgcaaatcaccc

SEQ ID NO: 2056 - protein, 532 aa, Homo sapiens
MTQLYIYIRLLGAYLFIISRVQGQNLDSMLHGTGMKSDSDQKKSENGVTLAPEDTLPFLKCYCSGHCPDDAINNTCITNGHCFAIIEEDDQGETTLASGCMKYEGSDFQCKDSPKAQLRRTIECCRTNLCNQYLQPTLPPVVIGPFFDGSIRWLVLLISMAVCIIAMIIFSSCFCYKHYCKSISSRRRYNRDLEQDEAFIPVGESLKDLIDQSQSSGSGSGLPLLVQRTIAKQIQMVRQVGKGRYGEVWMGKWRGEKVAVKVFFTTEEASWFRETEIYQTVLMRHENILGFIAADIKGTGSWTQLYLITDYHENGSLYDFLKCATLDTRALLKLAYSAACGLCHLHTEIYGTQGKPAIAHRDLKSKNILIKKNGSCCIADLGLAVKFNSDTNEVDVPLNTRVGTKRYMAPEVLDESLNKNHFQPYIMADIYSFGLIIWEMARRCITGGIVEEYQLPYYNMVPSDPSYEDMREVVCVKRLRPIVSNRWNSDECLRAVLKLMSECWAHNPASRLTALRIKKTLAKMVESQDVKI

SEQ ID NO: 2057 - DNA, 1873 bp, Homo sapiens
agggatcccaccccttctctgtgttttcactctgaagctctacacaactttacacctgaatgaacgccaaacctctatggatatataaagggaagcttgaggaggaatttcacagttacagtgcagaagcagaagcaaaagaattaaccagctcttcagtcaagcaaatcctctactcaccatgcttcctcctgccattcatttctatctccttccccttgcatgcatcctaatgaaaagctgtttggcttttaaaaatgatgccacagaaatcctttattcacatgtggttaaacctgttccagcacaccccagcagcaacagcacgttgaatcaagccagaaatggaggcaggcatttcagtaacactggactggatcggaacactcgggttcaagtgggttgccgggaactgcgttccaccaaatacatctctgatggccagtgcaccagcatcagccctctgaaggagctggtgtgtgctggcgagtgcttgcccctgccagtgctccctaactggattggaggaggctatggaacaaagtactggagcaggaggagctcccaggagtggcggtgtgtcaatgacaaaacccgtacccagagaatccagctgcagtgccaagatggcagcacacgcacctacaaaatcacagtagtcactgcctgcaagtgcaagaggtacacccggcagcacaacgagtccagtcacaactttgagagcatgtcacctgccaagccagtccagcatcacagagagcggaaaagagccagcaaatccagcaagcacagcatgagttagaactcagactcccataactagacttactagtaaccatctgctttacagatttgattgcttggaagactcaagcctgccactgctgttttctcacttgaaagtatatgctttctgctttgatcaaacccagcaagctgtcttaagtatcaggaccttctttgggaatagtttttccttttcaagtttttcaagatgtaggtatatccatgaatgcaatttgcatttaaattccacgtatcctgtagttttaattcctcattgttcttaaaagactgttgatactataaacatcagtgaatcattatattttaaaacagaaaagggcttctcagataccctccatctactggcccatcccctctcctaaacaaaactccttcaaaacaggttaaaaaaaatatgttgtcatgaatcttcacagtaacatttcagaaaggtgcttttttggtactcttcatgggaacagtttagcagccatgagtgatcttcctttgaaagagaatgaaagaccctgtgacatttcacttcaaaaataagccctgtagctctttacggtcgcatagtataaaattataccctgcatgctgaccctcgcttggaatggaatgccagaaatgcatggcagcagctaataagtaaagctgattaactatttatttgtcaatgttattatttaatgagctttcacatgtgatttgtttcaaaactttaattttttaatgttttgaaactttttcatggacctaaatattttcctatatgatttgtggttgattagaaatatgaaatacatgttgtagatatgtaaaatgaatattttagtctccttattacatatatgttcatggtgaactttatcaatagtatggatctttttaaatcaataagatgctttgtaaagttgaaataagtaatactttcttgtttaatctgtgcaatcagaaggtgtcttgaccttcaattcaattggtttcttttaacaaaaataaacactgctaaaagttattgttgttgcctctaacatgtataaagggtgcaaaaattgtagaataaatgtataagggtaaaaaa

SEQ ID NO: 2058 - protein, 206 aa, Homo sapiens
MLPPAIHFYLLPLACILMKSCLAFKNDATEILYSHVVKPVPAHPSSNSTLNQARNGGRHFSNTGLDRNTRVQVGCRELRSTKYISDGQCTSISPLKELVCAGECLPLPVLPNWIGGGYGTKYWSRRSSQEWRCVNDKTRTQRIQLQCQDGSTRTYKITVVTACKCKRYTRQHNESSHNFESMSPAKPVQHHRERKRASKSSKHSMS

SEQ ID NO: 2059 - DNA, 932 bp, Homo sapiens
  misc_feature (25)..(25): n is a, c, g, or t
  misc_feature (457)..(457): n is a, c, g, or t
  misc_feature (486)..(486): n is a, c, g, or t
  misc_feature (530)..(530): n is a, c, g, or t
  misc_feature (543)..(543): n is a, c, g, or t
  misc_feature (560)..(560): n is a, c, g, or t
  misc_feature (562)..(562): n is a, c, g, or t
  misc_feature (570)..(570): n is a, c, g, or t
  misc_feature (572)..(587): n is a, c, g, or t
  misc_feature (602)..(602): n is a, c, g, or t
  misc_feature (615)..(615): n is a, c, g, or t
  misc_feature (628)..(628): n is a, c, g, or t
  misc_feature (631)..(631): n is a, c, g, or t
  misc_feature (650)..(650): n is a, c, g, or t
  misc_feature (675)..(675): n is a, c, g, or t
  misc_feature (691)..(693): n is a, c, g, or t
  misc_feature (708)..(708): n is a, c, g, or t
  misc_feature (723)..(724): n is a, c, g, or t
  misc_feature (730)..(730): n is a, c, g, or t
  misc_feature (740)..(740): n is a, c, g, or t
  misc_feature (760)..(760): n is a, c, g, or t
  misc_feature (767)..(767): n is a, c, g, or t
  misc_feature (769)..(769): n is a, c, g, or t
  misc_feature (785)..(785): n is a, c, g, or t
  misc_feature (795)..(798): n is a, c, g, or t
  misc_feature (805)..(805): n is a, c, g, or t
  misc_feature (810)..(810): n is a, c, g, or t
  misc_feature (816)..(816): n is a, c, g, or t
  misc_feature (831)..(831): n is a, c, g, or t
  misc_feature (835)..(835): n is a, c, g, or t
  misc_feature (841)..(841): n is a, c, g, or t
  misc_feature (848)..(849): n is a, c, g, or t
  misc_feature (862)..(865): n is a, c, g, or t
  misc_feature (867)..(867): n is a, c, g, or t
  misc_feature (876)..(876): n is a, c, g, or t
  misc_feature (908)..(908): n is a, c, g, or t
  misc_feature (917)..(917): n is a, c, g, or t
  misc_feature (923)..(923): n is a, c, g, or t
  misc_feature (925)..(925): n is a, c, g, or t
  misc_feature (928)..(931): n is a, c, g, or t
ctccaccaacacccccgtttgcctnacaccaccccccttttacttagtatgtttattttttgtgtgtctcttgccttcctcccacgttttatttcccctcagagctgtgaatgggcaggtctgtctctggtttggcatcactgagtttttcccatgcattggccccagggctgctaggatgtgagacaaatctccctacaatgggcttgctcccattgtctgtacagtttaatagatgctggcatgtcggaggttacccatgagtcaaaatccgctctccatgcttactcttgacaccccattgaagccactcattgtgtgtgcgtctgggtgtgaagtccagctccgtgtggtcctgtgcttgtactgccctgctttgcagttcctttgcacttactcatcgagtgctgttttgaaatgctgacattatataaacgtaaaaggaaatgtaaaaaanaaaaacccacacacaaacaaaacccatanggttctggatttggaaaatacacggggtccggacaaaggattanctaaaataaaaanttaaaggttttccaccntnaaaaaganannnnnnnnnnnnnnnnaaaaaaaaaaacccngagggggggcccngggacccaaattncgncccaaaaaggggggcgggnttaaaaaatccactgggccggcggntttaaaaaaggccggnnnctgggggaaaccccnggggggtaccccaannttaaancggccttggngggaaaaccccccccttttnggcaaantnggggggaaaatccganaaagggcccnnnnccgggtnggccnttcccnaaaaaaggttgggcncccntaaaantgggggnntggggaaatttgnnnngngggaaaaanttttgggaaaaaatcccggggaaaaatttttnggaaaaccnggccgntnttnnnnc

SEQ ID NO: 2060 - DNA, 5654 bp, Homo sapiens
tcagattttaatttaatagtccagaacctggaagctgaaaattataatattgaatctgcaataattgccgtgcttcggatgaaccaagggaagagaaataatgcagaagagaatcttgagcccagtggtcgagtgctgaagcagtgtggccctttgtgggaggagggtggcagtggtgccagaatctttggaaatcagggcttaaatgaaggcaggaccgaaaacaataaggcacaggccagccctagtgaagaaaacaaagcaaataaaaaccagctcgcaaaggtcacaaacaaacagaggcgagaacagcagtggatggagaagaagaagcggcaggaggagaggcaccgccacaaagccctggagagcagaggtagccacagggacaataacagaagcgaagcagaggcgaacacgcaggtcaccttggtgaagaccttcgccgctctcaacatctgactctttggcctcttgggagttgtaagaagcggctggaaaaggattgctgtgtgctagactttccagtgaggccgtccttttataaaacgcaacacaaccaacgaagcccacacatgagctcacacactgagttagtttcgttcaagctgcctctttttttgttcgaagttttattagtgatatgttggtgttttatgaaaatgcagtgaggccattcatattctgtaatacaaaattaaaatactgagttttaggggcagatagttaggtcaggaaaaaccttttaagtggtggctttatttgccctgaaaatcagacttcagtgaccctaggatctttccttaacatttggggtgagttttgctgtaattgttcatgagtagtttagaataattgttagaaattcagaatgacaagtttccttagtttctctttcattctcaaacagatatatagggtagcttataaatgatctccaactcaggaatatgctttgatttacttctaatccaagttactcagaaaataattcaggaattgttttcccaaagttacgtgagggttgtggcctgcagtcaggatggaaattaaccgcatttctctccttcctgattctgatgttatttcagatgggatgcaggtgctgttagttcatttgcactcaagccatatgataaatgcagctgactgttaattaggcctggccttgttgggaagttgatagtggtgttgggtttttggtatttgtttcctgacagtggggagatggcatgttactgcttgtgatacagttctggaattctgatagtgtgtagagcagggtctatagttgtaacaggagacgaactcctggggttttgcctaagaggagtctaaagaattatgtttttataggagaagcctggaagaataaggtttttcatgttcgcattttaaataacgattttcttcccttctgttgtagacttagatgccttcagagagatacgtggtaacttgaccttataggtcgctaaacttagtattgtggaaattaaatcttataaaatgctacatttatttctttttatttaagccctgtttggtatttcaaagttgggaaaactccagcatctgctggaagttgttggaccagcagggttggttgacttaggttggaccagcagagaagagaacatactttggttgaggccttcgaatcactcttcagttctgaaatagacagacttgagcagtggagagacgtctttcctaaaactgagttaggtggatgtgaacttaagaactataacgtatgaggcagcccatcttggatcatctttgtcttttgggacctaatacttgggcaaataattgatgctgagttgaaaggtaaattattagttatcttccccacccctcgcatttcagaattataaaaattcggaggcaaattgaaaactaaaatgtttggtaggccctggagtcgccagattgtctttatcaccaggcctttggctttcttcagtttcactggtatcttttggttttgtttttgactttggtggctttttgtagttggagcatcagtagtctcttggaattgctcctaggacattgtggtttaggtttcttcctgggtacagtacattgtaaaatttagcagattaaaaaaagtacacagcattttttttctgtgcacgtcgcagagtcctgagcttgaggctgtgttactctactcattccaaacgaatgaaagatctctgttgccttactctaaggaagtgggatcgagtgcgttaggatctatggttgtcttggttttcaactctgggcagattcctgactggctgagtgtttctgaatgaagatgttttcctgtctgttttgtactgcttgagtgcagaggccagatcctctcagaaagataagattgtatgccagaaattcagattagcagtcagcttaagagagacttattgtcagaagtagtagaattgctttatttacttggttaatgaaggtggccttgggccctattgggttttagaagttttagaagctgctaaaaagttattaaagaatattgggaacatttattttttaaattacctaattctggtaataggcttcagcatttctggagtataataatggtggtttaaaaaactaatcaaacggctttagtaattttactactggtttcacagcttttcagttacagttggtctgtttagtgtgttaattattaggaatcgggtacatgcatccaacttcagtgataccttctagctaatggtttcaatttagacttcactgcctcagtctcactgggtacatgagaaggttggaatcaacatgcttagttgcctcagtgggcacttgaaaattccttcactggcagcccgagtggaggcccagtatgtctagtcctgggatgactgttgtcagcagctgttactctagtacaggtgctcctgtgaactctttattaggaactgaatgtgtcttaacctctgtgttacatcttggctggcagagatttatgttacatgagattgtcttggtagcttgtagtgtggtcaggagaaaggggatggagcagtggtgcatagctgcttactgctcttataaacggtatataaaggttttacggattttgaaaatatttttttttagaggtcaaaataaataccattttagtggcaacagctttgaactagagaggtagatgtattaaagcagcatagaaccataacttctagataatgtagttgccactaggagatattagaaagttagaatgtatgtgtgtatttagtttttcaataataatgaacatacactttcaggagcaaagtatggttgagaaattgtggcagaaagaattttaaatgttagtcgaagttgtctgtagtttctttattaagctctgaaaacacttccaatgccagtttgattctgagggcttgggaagtgggatctcccttgtggagcagctggagctggctgggagggagcctctccatgggtaatttattatgcctgccctgcttcccccagggagctgcttcagtgtgaaatgatgtgattgtcgggggtggggtgggaggagggccaccttcagtcggggagttgctcacatattacacaggtagcatcaggtggacttcagcgctgaactgtactagtagtgagtccctgtagtcaatgtgcaatttctctaattctgagaaactctgtagactctgcctgggttttactgggtcagcatagaatgctatcagtttacctctgtgaaatattcagtcagttgaaggaaacttggattcctagtcagaggtgactaaaagttaccctgaccaaaaggatctctgcggggggaagagaatggagcttcctgattttaatgtgttgcgtcagtggccctcttcgactcccgttttgggtagatgcgtagctcttcactttcttacctcaaggctctgtctagccatgttaaatctttagactcagtctgatgccgtttttctgttttgccattctcattattcacagctttcagaacaagtgttgctaaaactccggggcctttgacagttgttctgaggtgatttaataatggactttttataagttatgttttcctggctctaaagtaaatttttttttttttttttttttgagacagagtcttgctttgttgcccaggctggagtgtggtggggcaatctcggctcactgcaacctccacctcccgggttcaagcgattctcctgcctcagcctcctgagtagctgggattacaggtgtgtgccaccatgcttggctaatttttgtatttttagtagagacggggtttcaccatgttagccaggctggtctcaaactcctgaccttgtgatctgcccgcctcagcctcccaaagtgctaggattacgggtgtgagcaaccctgcccggccagtaaattgtatttttttaatgacatcattgatttgaagatctagatggcataaattacgacgtctgccatcgcatattagaaaggggacagtcatatttgtaacgtggagagaacacggagcaccagtcaccacgtgcacttaggatgcagagcttaccgcacaccgctgatggggacctccggaaagagcggtgccttgtggttggcctggaagttctctcccaaggtgaaattcctttaaaacctcaggctctgacctatgtctttgaagcagctgctttgtagagtccctctctttactgtcctcgttaggactgttttgtggttccatgaaaatgtttagcatccttgcagaattacttgagaaggggctggtaccagtgtaaagaatctatttctgtaaaactacgaacttttgcatagggaatttattctaagcaggtcatagccgtgatccagagctgctgctgctcactgccagtccttgcggctggcggcgattgccggacagactctctgtggcctggctctcatccttggcgtgtcagcctgcggcaggctgccagccatccatgacaatcatgtgagctcagccacagacctcagctggcggtttgatccctggcaggtccctcgagcagtactggtaagaggcttcacacattttcccactcttacagttcatttttcatagtaggaagggcccttggcctccccagtgcctcttccagagcctccaccagcactaagctcagaggaaagaagaaaagggccaggagtcagacgtcacacccgggggctcccctttcccatgtagaagtgttggcatgcgtcagtctcctttacagaggggtggatgtatccgtggaggaggggccttctctctttctaattgcactatacttgttctagcttcagtctggagatacttaagacctccatggggtcgtgatccatagacttagcaagtcttgccttatctatggagctcgatggtgagaattgtgaccattgtctgatgtccatagttccttccccctagattgtttctttccacggattgtgttcatctgaaccattttattttttatttaccaaagtactgtacttggctatttgcagtgttttcaaaaccaaatgtttctttttttgtgtttttaatcttcgatacttggtgcaatagaagctgcaaagatgtgccactttatctatgaaatggagttttgtataccaataaattctagttt

SEQ ID NO: 2061 - protein, 153 aa, Homo sapiens
SDFNLIVQNLEAENYNIESAIIAVLRMNQGKRNNAEENLEPSGRVLKQCGPLWEEGGSGARIFGNQGLNEGRTENNKAQASPSEENKANKNQLAKVTNKQRREQQWMEKKKRQEERHRHKALESRGSHRDNNRSEAEANTQVTLVKTFAALNI

SEQ ID NO: 2062 - DNA, 1106 bp, Homo sapiens
ggcacgaggctctgtcctcattgcgcccagacgggccggcccagagctcccgggtcgtctttcgtgtggccgcgagacactcttgcactcctgtaatgagcctggcactgtgatgaaacacttttcccgtgtcgtttgagtgcatcttctcaacaaccctaggagggttcttgaagcttttgagattaacaatggcaggaaaatcatcactttttaaagtaattctccttggagatggtggagttgggaagagttcacttatgaacagatatgtaactaataagtttgatacccagctcttccatacaataggtgtggaatttttaaataaagatttggaagtggatggacattttgttaccatgcagatttgggacacggcaggtcaggagcgattccgaagcctgaggacaccattttacagaggttctgactgctgcctgcttacttttagtgtcgatgattcacaaagcttccagaacttaagtaactggaagaaagaattcatatattatgcagatgtgaaagagcctgagagctttccttttgtgattctgggtaacaagattgacataagcgaacggcaggtgtctacagaagaagcccaagcttggtgcagggacaacggcgactatccttattttgaaacaagtgcaaaagatgccacaaatgtggcagcagcctttgaggaagcggttcgaagagttcttgctaccgaggataggtcagatcatttgattcagacagacacagtcaatcttcaccgaaagcccaagcctagctcatcttgctgttgattgttagattgttgatgcattctaaccaactcacacatatacacaaaatcaacatggggatggagaagagaattagcgtttgcagcagtgtatcatctactaataaaattaaactaatgttgctgcttcattagttggtgggagaagggacacatccactcttggaggaatatatttactcaataatggcaccttacatttataaattgtaacagttgtctaataacgtttctttaatttaaatatgtaagttgcagagctaataaatgaaatgaccaagactttaattataaaaaaaaaaaaaaaaaa

SEQ ID NO: 2063 - protein, 201 aa, Homo sapiens
MAGKSSLFKVILLGDGGVGKSSLMNRYVTNKFDTQLFHTIGVEFLNKDLEVDGHFVTMQIWDTAGQERFRSLRTPFYRGSDCCLLTFSVDDSQSFQNLSNWKKEFIYYADVKEPESFPFVILGNKIDISERQVSTEEAQAWCRDNGDYPYFETSAKDATNVAAAFEEAVRRVLATEDRSDHLIQTDTVNLHRKPKPSSSCC

SEQ ID NO: 2064 - DNA, 2149 bp, Homo sapiens
gacctgcaaacacacacacacacacacacacacacacacacacacacacacatacacacgcaccagggcagccgagagacctccctcccgcccctcccatgcccgcctccctcccctcgccgccgccgccgccgccagcatctgggaccggccgattctgcacctccgtccggcgctgccctttgattcggatttccatcttgcattctccggctgatcgcgggacctggctcgtgcagaggaggggggccgatcgctatggagtatttcatggtgcccactcagaaggtgccctctttgcaacatttcaggaaaacagagaaagaagtgataggagggctctgtagccttgccaacattccactaacccccgagactcagcgggaccaggagcggcggattcggcgggagatcgccaacagcaacgagcggagacgcatgcagagcatcaacgcgggattccagtccctcaagaccctcatcccccacacagacggagagaagctcagcaaggcagccattctccagcagacagccgagtacatcttctccctggagcaggagaagaccaggctcttgcagcagaacacacagctcaagcgcttcatccaggagctgagcggctcgtcccccaagcgacggcgggcagaggacaaggacgaaggcataggctccccggacatctgggaggacgagaaggcggaggacctgcggcgggagatgattgagctgcggcagcagctggacaaggagcgctcggtgcgcatgatgctggaggagcaggtgcgctcgctggaggcccacatgtacccggaaaagctcaaggtgattgcgcagcaggtgcagctgcagcagcagcaggaacaggtgaggctgctgcaccaggagaagctggagcgggaacagcagcagctgcggacccagcttctgccccctccggcccccacccaccaccccacggtgatcgtgccagcaccgcctcctcctccctcccaccacatcaatgtcgtcaccatgggcccctcctcggtcatcaactctgtttccacatcccggcaaaatctggacaccatcgtgcaggcaatccagcacatcgagggcacccaggaaaagcaggagctggaggaggagcagcggcgagctgtcatcgtgaagcctgtccgcagctgcccggaggcccccacctctgacaccgcctccgactccgaggcctcagacagtgacgccatggaccagagccgggaggagccgtcgggggacggggagcttccctgactacccccccagccctcctctcccttctgggggctggagggagccggggcagccacagggagagacatgggcgaatgagtgagaaatttttacaaaattacgatgtcatttgggtctcttttatgacctctttttcaatactgtaaatcgacctttgaacgaagccactcaacccgaggtcccggggctggggtgtcgcagagctgtgggagcatcggcaccccagggcggggcctcggccccgggggctggaggaagctgacacggagatgcctggcctctctctgccaaaaagcattttttcctttaaatatgttttttaagaacagggaaaattaaacaaaaccccaggttatttcttccctgcccagagccagcctgggattgtcagccttcaatcccctttccttcctctttttgggttttcttctttctcctttaagcacttacatggttgggggtaagactaggctggggcattctgggggcccggaggtctccgttgcttcttggttggggtttgctgctgctgtgcccccctcccccttccccatctcggcactagaattcgccactctcccaccccccagcccccacctctgcctccaggtctcatcttccaccccaaaaatgtctgtctctctctttttgttttgtttgttgttggttttttatttctttttggtttgctttctgtttttgttttgtttttcttttttttctttcttttttttttttttacaattttgaggtcttcgtgttcaaggagaagctattatattttgttaagaaagtggggagaaaaaaaaccaagaggccaccgtgcctttgtaaagaaacaaaataaagtttgtactttgttttttaaaaaaaa

SEQ ID NO: 2065 - protein, 338 aa, Homo sapiens
MEYFMVPTQKVPSLQHFRKTEKEVIGGLCSLANIPLTPETQRDQERRIRREIANSNERRRMQSINAGFQSLKTLIPHTDGEKLSKAAILQQTAEYIFSLEQEKTRLLQQNTQLKRFIQELSGSSPKRRRAEDKDEGIGSPDIWEDEKAEDLRREMIELRQQLDKERSVRMMLEEQVRSLEAHMYPEKLKVIAQQVQLQQQQEQVRLLHQEKLEREQQQLRTQLLPPPAPTHHPTVIVPAPPPPPSHHINVVTMGPSSVINSVSTSRQNLDTIVQAIQHIEGTQEKQELEEEQRRAVIVKPVRSCPEAPTSDTASDSEASDSDAMDQSREEPSGDGELP

SEQ ID NO: 2066 - DNA, 1594 bp, Homo sapiens
gccaagcttggcacgaggtggcacgaggggcttgttgggatccgttgagtgatgggagagtgtgctctttaacttcggagagagatgcgctctcgtgtagccgtcagggcctgccataaggtctgcaggtgcctgttgtctgggtttgggggtcgagtagatgcggggcagccggagctgttgacggaaaggagtagccccaaaggagggcatgtgaagtcgcacgcggactcgaggggaacggcgagcacccagaagcccccgggtctggagagggaagcgaggcgctgttagagatctgtcagagaaggcatttcctaagtggaagcaagcagcagcttagccgggattctcttctgagtgggtgccatcccggcttcggacccttgggcgtagagttgcggaagaacctggccgcagaatggtggacctcggtggtggtgttcacggagcggtattcccggtggacgccctccaccacaaaccaagccctttgctacccggggacagtgccttcaggttagtttctgcagaaactctacgcgaaatcttgcaagacaaagagctgagtaaggaacagctagtagcatttcttgagaacgtattaaaaacttctgggaaactacgggagaaccttcttcacggtgccttggaacactatgttaattgcctggatctggtaaacaagaggctaccttatggccttgctcagattggagtgtgttttcatcctgtttttgacactaagcagatacgaaatggtgttaaaagtattggtgagaagactgaagcttcgttagtatggtttactcctccgagaacttcaaaccagtggcttgatttctggttacgtcatcgactccagtggtggagaaagtttgccatgagtccatctaacttcagcagcagtgactgtcaggatgaagaaggccggaaaggaacaaactttactacaattttcccctggggaaaggagttaatagaaaccctgtggaacttaggagatcacgaacttttacacatgtatcctggcaatgtgtctaaattacatggccgagatggacgaaaaaatgtggttccttgtgttctctctgtaaatggggacctagaccgaggcatgctggcctacctctatgattctttccagctgacagagaactcctttacaagaaagaaaaatcttcatagaaaggtacttaaacttcacccttgtttagcccctattaaggttgctttggatgtaggaagaggccccacattggaactaagacaggtttgtcaagggctatttaatgagttactagaaaatgggatttctgtgtggcctggttatttggaaactatgcagtcctcattggaacaactttattcgaagtatgatgaaatgagtattctcttcacagttttggttactgaaactactttggagaatggattaatacatctgagaagcagagacaccacaatgaaggaaatgatgcatatatccaaattaaaagactttttgattaagtatatatcatcagctaagaatgtatagatttttatatttgtataataaatattcttctctcctaaaaaaaaaaaaaaaaaa

SEQ ID NO: 2067 - protein, 372 aa, Homo sapiens
MVDLGGGVHGAVFPVDALHHKPSPLLPGDSAFRLVSAETLREILQDKELSKEQLVAFLENVLKTSGKLRENLLHGALEHYVNCLDLVNKRLPYGLAQIGVCFHPVFDTKQIRNGVKSIGEKTEASLVWFTPPRTSNQWLDFWLRHRLQWWRKFAMSPSNFSSSDCQDEEGRKGTNFTTIFPWGKELIETLWNLGDHELLHMYPGNVSKLHGRDGRKNVVPCVLSVNGDLDRGMLAYLYDSFQLTENSFTRKKNLHRKVLKLHPCLAPIKVALDVGRGPTLELRQVCQGLFNELLENGISVWPGYLETMQSSLEQLYSKYDEMSILFTVLVTETTLENGLIHLRSRDTTMKEMMHISKLKDFLIKYISSAKNV

SEQ ID NO: 2068 - DNA, 1314 bp, Homo sapiens
gaacttcatctctctccccagaaaaggctcaacatcaactatatagccaacatgtccaaggtgtttaagaagaccagctccaatgggaagctctccatctacctggggaaacgggacttcgtggaccatgtggacacggtggaacccattgacggtgttgtcctggttgatcctgagtacttaaaatgtcgaaagttgtttgtcatgttgacatgtgcctttcgctatggccgtgatgacttggaagtgattggtctgacgttccgaaaagatctgtatgtgcagaccctgcaagtggtcccagctgaatccagcagccctcagggcgccctcacagtcctacaggagcgactactgcacaagctaggggacaatgcctacccctttaccctgcagatggtgaccaacctgccctgttctgtgacactgcagccaggtcctgaagatgcaggaaagccctgtgggattgactttgaagtgaagagtttctgtgctgaaaacccagaggagacagtctccaagagagactatgtgcggctggttgtccggaaagtacaatttgcaccaccggaggcaggccctggcccctcagcccagaccatccgccgcttccttctgtcagctcagcccctacaactccaggcctggatggacagggaggttcactaccacggagaacccatctctgtcaatgtttctatcaacaactgcaccaacaaggtcatcaaaaaaatcaagatttcagttgaccagatcacagatgttgtcctgtattcactagacaagtacaccaagactgtgttcattcaggaattcacggagactgtagctgctaattccagcttctcccagagctttgcagtaaccccaatcctggctgccagctgccagaaacggggcctggcactggatggcaaacttaagcatgaagataccaacctggcctctagcacaattattagaccgggaatggacaaagagctgctggggatcctggtgtcctacaaagtcagagtcaacctgatggtgtcctgtggtggcatcctaggagacctgacagccagcgatgttggtgtggagctacccttggtcctgatccatccgaagccatctcatgaggccgctagctctgaggacatagtcatcgaggagtttacgcggaaaggcgaggaggagagccagaaggctgtggaggctgagggagatgaggggagctgagcacctcgctctggtgcccgtctgtgtgggagcccccactgtaacactctaataaatcagtttgttcagatgtgaaaaaaaaaaaaaaaaaaaaaa

SEQ ID NO: 2069 - protein, 388 aa, Homo sapiens
MSKVFKKTSSNGKLSIYLGKRDFVDHVDTVEPIDGVVLVDPEYLKCRKLFVMLTCAFRYGRDDLEVIGLTFRKDLYVQTLQVVPAESSSPQGALTVLQERLLHKLGDNAYPFTLQMVTNLPCSVTLQPGPEDAGKPCGIDFEVKSFCAENPEETVSKRDYVRLVVRKVQFAPPEAGPGPSAQTIRRFLLSAQPLQLQAWMDREVHYHGEPISVNVSINNCTNKVIKKIKISVDQITDVVLYSLDKYTKTVFIQEFTETVAANSSFSQSFAVTPILAASCQKRGLALDGKLKHEDTNLASSTIIRPGMDKELLGILVSYKVRVNLMVSCGGILGDLTASDVGVELPLVLIHPKPSHEAASSEDIVIEEFTRKGEEESQKAVEAEGDEGS

SEQ ID NO: 2070 - DNA, 7645 bp, Homo sapiens
agccaagcggcgggctggcggcgggctccgacgtctgcgccaggacctggctggctgagcccggcgcagcagcagcagccagggcagcgcggcccctactccctgtcaggtcgtagaggcgagcagggaccagctggtcgccggcccctcgggcaagatggggaaccgggagatggaggagctgatcccgctggtgaaccgtctgcaggacgcgttttcggcgctgggacagagctgcctgctggagctgccgcagatcgccgtggtgggcggccagagcgccggcaagagctcggtgctcgagaacttcgtgggcagggactttctccctcgagggtcgggcattgtaacaagacgacctcttgtgctgcagcttgttacttctaaagcagaatatgccgagtttctacattgcaaaggaaagaaatttacagattttgatgaagttcgccttgagattgaagcagaaacagatcgcgtgactggaatgaataaaggcatttcctccatacccattaatttacgagtctattccccacacgtgttaaatctaacccttattgatctacctggaataactaaagtgcctgtgggagatcagccaccagatatcgagtatcagatcagagaaatgattatgcagttcatcacgagggagaactgtctgattttagctgttactccagccaacactgatcttgcaaactcagatgcgctgaagctagctaaagaagttgatcctcaaggtctgagaaccattggagttatcaccaaactggaccttatggatgaaggaacggatgccagggatgttctagagaacaaactgttgcctcttcgcaggggttacgtgggggtggtaaacagaagccagaaggacatagatgggaagaaggacataaaggcagccatgctggcagagaggaagtttttcctttcccacccggcttacagacatatcgctgaccgaatgggaaccccacacctgcagaaggtccttaatcagcaacttaccaaccacattcgggataccctaccaaacttcaggaacaaactacagggacagttgctctccatagaacatgaagtagaagcctacaaaaatttcaaaccagaagacccatcaaggaagaccaaagcattgctgcagatggttcagcaatttgctgtggactttgagaagagaattgaagggtcaggggatcaagtagataccctggaactctcaggtggtgctaaaatcaatcgtatttttcatgaacgctttccttttgagatagtaaagatggagttcaatgagaaagaattgcgaagagaaataagctatgcaatcaaaaacatacatggtatcaggacagggttgtttactccagacatggcatttgaagcgacagtcaagaaacagattgtaaagttgaaagggccttccttgaagagtgtggatctggtaatacaagaattaatcaacactgtgaagaagtgtaccaaaaaactggcaaacttccccagactctgcgaggaaacggaaaggattgttgctaaccacattcgtgagcgagaagggaagacaaaggaccaggtattgctattgattgacattcaagtctcttacatcaacaccaaccatgaagacttcattggcttcgcaaatgctcagcagaggagcagtcaggttcacaagaaaaccacagttggaaatcaggtgattcgcaaggggtggctcaccatcagcaacattggcatcatgaaaggcggctcgaagggatactggttcgtccttactgcggaaagcttgtcctggtataaagatgatgaggaaaaagaaaagaagtacatgcttcccttggacaacctgaaagttcgggatgtggaaaagagctttatgtctagcaagcacatctttgcactctttaatacagagcaaaggaatgtatacaaagactatcgcttccttgagctggcatgtgattcccaggaggatgtcgacagctggaaggcatctctactaagagctggggtctatcctgacaaatctgtagggaacaacaaagctgaaaatgatgagaatggacaagcagaaaacttttccatggacccacaattggagaggcaagtggagaccattcgcaacctcgtagactcctacatgtccattatcaacaaatgtatccgagatctaattccaaaaacaataatgcaccttatgatcaataacgttaaagatttcataaattccgagctcctagcacagttgtattcttcagaggaccaaaataccctgatggaggaatctgctgagcaggctcagcgccgggatgagatgcttcgaatgtatcaagcactgaaagaagcccttgggataattggggacatcagcacggccaccgtgtccactccggcaccccctccagtggatgactcctggatacagcactctcgcaggtcacctcctccaagccccacaacccaaaggaggccaacactaagtgctcccctcgcaaggcccacatccggccgaggaccagctcctgccattccctctcctggcccccactctggggctcctccagtcccattccgtccaggcccattacctcctttccccagcagcagtgactccttcggagcccctccacaagttccatctaggcctacgagggccccgcccagggtcccaagccggagaccacccccatcaccaactcgtcccactataatccgcccactagaatcctccctgttagactaaacgaagtgtctggcatggcaattaatcactaatgaattatgcgaaagcaacatatttgataaccgttgcagtaaatcatgagtagtcgcatgtgtggacatcagtaggcaagtaaccagttttactaatgcattcatcgctcatcttcattgctcatggtatgtcaaacctttggggtttgactcagaaactgctaaccttttagaggctttatatgttgtactgaccaaggtaggtttgtatagcagccctatactttggggatcatttgcctaccatgacatatatttgaaattgctttggacaagttttctaggctatctaccaggtagctcattaaacgtaattcttcagatatgagatagtgggcttagacctaagccatacatatttcttttcccacattctgtttaggatgacagtaattctgttgtctaccattaatgctactacctactccataattgcctatttagctcctcttttcttcctttttatttcataagactgctaggaagtgattttttaaaattaggactccttaagaataaacttttccagaagcacgaggtagtttgcaaaggaaaagtctgcactgtttgctctaaagagcttctcctcattccaatgtgttttgcttcatgctagaagcatatgcaacagtgaataaaagcttctttttttgttaatcagtcaataaatttggctaattagtttcagagttcaaggaagaagcaaaatatcacatctctagaagtgttggaaaaaatataatttctttctttacttatattcacctcatggtaggttatattgaaggctgacatggagaatgtttacttttctatttggcatagctaactacactttgatactaactccagtcttactattattattttggttggaaaaaaaattcactctttacgtgctaatttgtaatcttgttttgtaagaatttatcctacccttgaaacaggctcagtgtaactgtatatccattctaggctttcttaataaatcttgaggctatgggataatcacatttaaagaatggttcctgaaatgaagtcagtagaaatggcatgggataagagcagagctcacacttttacagttgcagtatttcaaagtccctatccaggtcactccagaaaagggtattgaaacgttgaaatctaaagcaaatttgcaatttcttaagatttctaaaatttaccagaacagtttagcctgggggttaatagttaagtcttgaggctaagttttggactaccaaggaccagatgattcacatgtaggaaacagccagaagccaactggaattttgtgtgctaactgttcccagacagcagagcaagtattcactgagtaggggtgtcccatgacactatttcatattctacagaagtaaatcaggtttcaccaactgaaatgtctccctttgaaagtagcaaacatgatttgtatgttaacttaactttaatttcctgtgtagtttacacccagagcagatactcataaagtataaagtaaaaacttttaaccattattaaacagagaacttgccatgttgagtgccattgtattgaacttattctaaaggcttatgctaacccatttataattggtaaaaatcagaaaatacaagatttacataaaggtcatttcaacttttaaggttaccagtgattgtataaaaacatcacaatcctaaatcctctcgtatctcaccccaaaccccaaactgggggaaaaaaagttaactctttgtgaatggaaccaatgtgcaagatacatactgcatttttaaaatagtgtctcagctaaatggaaaactgttaagcaaacatccatagtaaaacaaataatcttcagtgagatctttttataaaacttcttgtttttaggattccctttgcttcttcctttgaattctctaaaataggcagctaacggattatatacttcagggtttggctttgtgctaaatgtggttttgtgttttgctgtatttcaaaattttccttctgttaaaggaaaatattgtgaataaccactggggtgttcttagatcagcacaaaccatgtcaaaaaaaattggagatttttttccaattttccttccactgatcttaggcagtaataaacaatggcatttgtcatctttggcacttgcttttagattatagtcccacagttgcactgccccaattgtctacctttgtgggtacatttttgttctttactcctaagttatttctcatagaacccagcctactctagaatttcagcagtgacattggagaatatttttaatttgctgcagtactatgtcatattattagtatgaatctcatttcccaaagggtttgtattctgctaaaaggagatgccaatgttgaatgaagtctgaaactctagtatgtgcatagtttgacgtgcagcatgcacaccaggccttaagatgggaatgtagcttaatgattttctgtttcccataccatttctaatcttttgtgtaattttctcttaactgattgctctgatattgtaaacacaatagatgtagctctatcatgtctagcataatttaaaaaatcagtgtttttaggatttgggaaaataaactgtaaatgtttatttgataggtaaatatagttttattgtcacatgctaaatattgcatgcatattgactaattggaataaccatttactcaattatggacagcttattgaaatagtattgatttagaaaaagtatattgcatttctaaaaaacatctaccaaggttactcgtctgaatattgcttttagccgtgttttataacatagacgagcagtagggtctgtttattagcaaatttcctatttgttccaatacaaactcactttattctaaagtatattaatgaaaccagttcctgtgatgtaactgtaagccttctcgacttagacttaaaaagtggtcacatagattaattttgtgactttttagtatagactgtagccataattctcaaatatgaaatgggacctaataccagtatgtgataaatgttgatgttttctgtgtacaaacacattttctatgcatgtgtctctgtgtatatggcatatacctagtaagtatgtttctgtaagtatgtgtattttatgtccatttgagtaggtaggtaggttttaaaaatactagttaaaatgccacaagcatgagtgtgattgtatgtgcactgtgtgtatatatataaatatatgtatatgtatggttgtaaatatctatatatacatgtacttagtatgtgtggtatcaggatattttttaaactgtgataatacaacagatagctttgaatgatctgccataacatgtggtaacaatagttcatttctcataacatatatgaggtatacaaaattttctaactccagattgtagtcattttgagaggtacaaagctcataattaccatgacaacatggtaatgtccatagacatttgtatctgaatccacaagaagatctgaatctaagaaggaattacctttgacaatatttttcggtaagaagtaaaacctctggagacctatctttaagatctctaattggaattataaattatttttggattgctgagctgaatcttaaaaagccaagttgatatacatagtcatttttcctctatggtagaagtaaaaaaaaaaaaaaaggacatagcaacattaaagtagtggatttttctgagtaaatttgctgaaaatataagagagaagctatctaataccttggaggtaggtcatccactttttcaggtaaacatttttcatttggcaaatggcataattatttgaaagtgacaggaatctcctcagaatgaagaataaagcctaataggtctctaactgttgaactcatgaaagaagatagtgtatgagacttaaaccatgagttttgtatcatttcaattagaagactactagctgtgagctcagagtttaatgtaaatgaatctagatgattttgaagaaatgattattcgttcaccagatcactcattgtacattctaaaaagctcaaatgagtcttctagatactcttactcatcctgtctggttgctatgtttaaaattatgtggtgctgtgtaggtgaaactttaagaatatttttgaagcatatgtaatatatgcactgctatttgtgtgtgtgtgtgtgtgtctttgtatatatgtaagaatgtgtgtatgtgtgagagcaagagagaggaaactcaaagaggagtgtttgtcttaagacctgttcacactggtatattggtgagacttctcacttctggttggaggtttcacatatggctcaactcaagtcattaatctctttttaatttttactcttgaattccttaaacttcgctcattatgaaatgttttaaaattatgacaaaaattactctgtctaaccacttgccttgtctgctaccagtttgttaaaaattattccccccaaccagtaattccaccagtactacttgatttgtgttatatttcctatgtacatgtacagcctttgttttgcttgcttgtctatttttactttcccttttttgggtcaaatttttcttttgctttgtttgaagaaggaatatacagaagtaaaatcttgtcttctctgctgattctttaattaatatgagccggatactttccactgtcttcttggcactttcaggatttcttaatgctgatatatggactcttagaatggaatttttgaagaaaaatctcaaagcctgtatcgttcttgaaggtcacatgtacctattgtgaaaatgtgaagctgtatttctgaagctgaaataaattataacatttgaagaaaaaaaaaaaaaaaaaaaa

SEQ ID NO: 2071 - protein, 863 aa, Homo sapiens
MGNREMEELIPLVNRLQDAFSALGQSCLLELPQIAVVGGQSAGKSSVLENFVGRDFLPRGSGIVTRRPLVLQLVTSKAEYAEFLHCKGKKFTDFDEVRLEIEAETDRVTGMNKGISSIPINLRVYSPHVLNLTLIDLPGITKVPVGDQPPDIEYQIREMIMQFITRENCLILAVTPANTDLANSDALKLAKEVDPQGLRTIGVITKLDLMDEGTDARDVLENKLLPLRRGYVGVVNRSQKDIDGKKDIKAAMLAERKFFLSHPAYRHIADRMGTPHLQKVLNQQLTNHIRDTLPNFRNKLQGQLLSIEHEVEAYKNFKPEDPSRKTKALLQMVQQFAVDFEKRIEGSGDQVDTLELSGGAKINRIFHERFPFEIVKMEFNEKELRREISYAIKNIHGIRTGLFTPDMAFEATVKKQIVKLKGPSLKSVDLVIQELINTVKKCTKKLANFPRLCEETERIVANHIREREGKTKDQVLLLIDIQVSYINTNHEDFIGFANAQQRSSQVHKKTTVGNQVIRKGWLTISNIGIMKGGSKGYWFVLTAESLSWYKDDEEKEKKYMLPLDNLKVRDVEKSFMSSKHIFALFNTEQRNVYKDYRFLELACDSQEDVDSWKASLLRAGVYPDKSVGNNKAENDENGQAENFSMDPQLERQVETIRNLVDSYMSIINKCIRDLIPKTIMHLMINNVKDFINSELLAQLYSSEDQNTLMEESAEQAQRRDEMLRMYQALKEALGIIGDISTATVSTPAPPPVDDSWIQHSRRSPPPSPTTQRRPTLSAPLARPTSGRGPAPAIPSPGPHSGAPPVPFRPGPLPPFPSSSDSFGAPPQVPSRPTRAPPRVPSRRPPPSPTRPTIIRPLESSLLD

SEQ ID NO: 2072 - DNA, 5418 bp, Homo sapiens
aaagcaaaagaattcgctgcgtttccatgaaatcctgcggagtgtcgctcgctaccgccgccgctgccgccgccgctttcggtgatgaggaaaagaaaatggcggcgggaaaagcgagcggcgagagcgaggaggcgtcccccagcctgacagccgaggagagggaggcgctcggcggactggacagccgcctctttgggttcgtgagatttcatgaagatggcgccaggacgaaggccctactgggcaaggctgttcgctgctatgaatctctaatcttaaaagctgaaggaaaagtggagtctgatttcttttgtcaattaggtcacttcaacctcttattggaagattatccaaaagcattatctgcataccagaggtactacagtttacagtctgactactggaagaatgctgcctttttatatggtcttggtttggtctacttccattataatgcatttcagtgggcaattaaagcatttcaggaggtgctttatgttgatcccagcttttgtcgagccaaggaaattcatttacgagttgggcttatgttcaaagtgaacacagactatgagtctagtttaaagcattttcagttagctttggttgactgtaatccctgcactttgtccaatgctgaaattcaatttcacattgcccacttatatgaaacccagaggaaatatcattctgcaaaagaagcttatgaacaacttttgcagacagagaatctttctgcacaagtaaaagcaactgtcttacaacagttaggttggatgcatcacactgtagatctcctgggagataaagccaccaaggaaagctatgctattcagtatctccaaaagtccttggaagcagatcctaattctggccagtcctggtatttcctcggaaggtgctattcaagtattgggaaagttcaggatgcctttatatcttacaggcagtctattgataaatcagaagcaagtgcagatacatggtgttcaataggtgtgctatatcagcagcaaaatcagcccatggatgctttacaggcctatatttgtgctgtacaattggaccatggccatgctgcagcctggatggacctaggcactctctatgaatcctgcaaccagcctcaggatgccattaaatgctacttaaatgcaactagaagcaaaagttgtagtaatacctctgcacttgcagcacgaattaagtatttacaggctcagttgtgtaaccttccacaaggtagtctacagaataaaactaaattacttcctagtattgaggaggcgtggagcctaccaattcccgcagagcttacctccaggcagggtgccatgaacacagcacagcagaatacttctgacaattggagtggtggacatgctgtgtcacatcctccagtacagcaacaagctcattcatggtgtttgacaccacagaaattacagcatttggaacagctccgcgcaaatagaaataatttaaatccagcacagaaactgatgctggaacagctggaaagtcagtttgtcttaatgcaacaacaccaaatgagaccaacaggagttgcacaggtacgatctactggaattcctaatgggccaacagctgactcatcactgcctacaaactcagtctctggccagcagccacagcttgctctgaccagagtgcctagcgtctctcagcctggagtccgtcctgcctgccctgggcagcctttggccaatggacccttttctgcaggccatgttccctgtagcacatcaagaacgcggggaagtacagacactattttgataggcaataatcatataacaggaaatggaagtaatggaaacgtgccttacctgcagcgaaacgcactcactctacctcataaccgcacaaacctgaccagcagcgcaaaggagccgtggaaaaaccaactatctaactccactcaggggcttcacaaaggtcagagttcacattcggcaggtcctaatggtgaacgacctctctcttccactgggccttcccagcatctccaggcagctggctctggtattcagaatcagaacggacatcccaccctgcctagcaattcagtaacacagggggctgctctcaatcacctctcctctcacactgctacctcaggtggacaacaaggcattaccttaaccaaagagagcaagccttcaggaaacatattgacggtgcctgaaacaagcaggcacactggagagacacctaacagcactgccagtgtcgagggacttcctaatcatgtccatcagatgacggcagatgctgtttgcagtcctagccatggagattctaagtcaccaggtttactaagttcagacaatcctcagctctctgccttgttgatgggaaaagccaataacaatgtgggtactggaacctgtgacaaagtcaataacatccacccagctgttcatacaaagactgataactctgttgcctcttcaccatcttcagccatttcaacagcaacaccttctccaaaatccactgagcagacaaccacaaacagtgttaccagccttaacagccctcacagtgggctacacacaattaatggagaagggatggaagaatctcagagccccatgaaaacagatctgcttctggttaaccacaaacctagtccacagatcataccatcaatgtctgtgtccatataccccagctcagcagaagttctgaaggcatgcaggaatctaggtaaaaatggcttatctaacagtagcattttgttggataaatgtccacctccaagaccaccatcttcaccataccctcccttgccaaaggacaagttgaatccacctacacctagtatttacttggaaaataaacgtgatgctttctttcctccattacatcaattttgtacaaatccgaacaaccctgttacagtaatacgtggccttgctggagctcttaagttagacctgggacttttctctactaaaactttggtggaagctaacaatgaacatatggtagaagtgaggacacagttgttgcagccagcagatgaaaactgggatcccactggaacaaagaaaatctggcattgtgaaagtaatagatctcatactacaattgctaaatatgcacagtaccaggcctcctcattccaggaatcattgagagaagaaaatgaaaaaagaagtcatcataaagaccactcagatagtgaatctacatcgtcagataattctgggaggaggaggaaaggaccctttaaaaccataaagtttgggaccaatattgacctatctgatgacaaaaagtggaagttgcagctacatgagctgactaaacttcctgcttttgtgcgtgtcgtatcagcaggaaatcttctaagccatgttggtcataccatattgggcatgaacacagttcaactatacatgaaagttccagggagcagaacaccaggtcatcaggaaaataacaacttctgttcagttaacataaatattggcccaggtgactgtgaatggtttgttgttcctgaaggttactggggtgttttgaatgacttctgtgaaaaaaataatttgaatttcctaatgggttcttggtggcccaatcttgaagatctttatgaagcaaatgttccagtgtataggtttattcagcgacctggagatttggtctggataaatgcaggcactgttcattgggttcaggctattggctggtgcaacaacattgcttggaatgttggtccacttacagcctgccagtataaattggcagtggaacggtacgaatggaacaaattgcaaagtgtgaagtcaatagtacccatggttcatctttcctggaatatggcacgaaatatcaaggtctcagatccaaagctttttgaaatgattaagtattgtcttctaagaactctgaagcaatgtcagacattgagggaagctctcattgctgcaggaaaagagattatatggcatgggcggacaaaagaagaaccagctcattactgtagcatttgtgaagtggaggtttttgatctgctttttgtcactaatgagagtaattcacgaaagacctacatagtacattgccaagattgtgcacgaaaaacaagcggaaacttggaaaactttgtggtgctagaacagtacaaaatggaggacctgatgcaagtctatgaccaatttacattagctcctccattaccatccgcctcatcttgatattgttccatggacattaaatgagaccttttctgctattcaggaaataacccagttctgcaccactggtttttgtagctatctcgtaaggctgctggctgaaaactgtgtctatgcaaccttccaagtgcggagtgtcaaccaactggacgggagagagtactgctcctactccaggactctcacaaagctgatgagctgtacttcagaaaaaaataataatttccatgttttgtatatatctgacaaaactggcaacatcttacagactactgacttgaagacaacctcttttatatttctctatttctgggctgatgaatttgttttcatctgtcttttcccccttcagaattttccttggaaaaaaaatactagcctagctggtcatttctttgtaaggtagttagcaattttaagtctttctttggtcaacttttttttaatgtgaaaagttaggtaagacacttttttactgcttttatgtttttctgtcttgttttgagaccatgatggttacacttttggttcctaaataaaatttaaaaaattaacagccaagtcacaaaggtaatggattgcacatagactaaggaataaacttcagatttgtgatttttgtttctaatcttgatgtaaatttacactattataatacatatttattgcttgaaaatatttgtgaatggaatgctgttattttttccagatttacctgccattgaaattttaaggagttctgtaatttcaaacactactcctattacattttctatgtgtaaataaaactgcttagcattgtacagaaacttttattaaaattgtttaatgtttaaagagtttctattgtttgagtttaaaaaagactttatgtacagtgcccagttttgttcattttgaaatctgataaatatatttatatatacttatgtatgtatatataatatatatagaaatctggatatatatgtataaatctttagaacttaaatttttctcgtttagttcacatctatggtagatttttgaggtgtctactgtaaagtattgcttacaaaaagtatgattatttttaaagaaatatatatggtatgtatcctcaagacctaaaatgtcagactggtttattgttaagttgcaattactgcaatgacagaccaataaacaattgctgccaaaaaaaaaa

SEQ ID NO: 2073 - protein, 1401 aa, Homo sapiens
MKSCGVSLATAAAAAAAFGDEEKKMAAGKASGESEEASPSLTAEEREALGGLDSRLFGFVRFHEDGARTKALLGKAVRCYESLILKAEGKVESDFFCQLGHFNLLLEDYPKALSAYQRYYSLQSDYWKNAAFLYGLGLVYFHYNAFQWAIKAFQEVLYVDPSFCRAKEIHLRVGLMFKVNTDYESSLKHFQLALVDCNPCTLSNAEIQFHIAHLYETQRKYHSAKEAYEQLLQTENLSAQVKATVLQQLGWMHHTVDLLGDKATKESYAIQYLQKSLEADPNSGQSWYFLGRCYSSIGKVQDAFISYRQSIDKSEASADTWCSIGVLYQQQNQPMDALQAYICAVQLDHGHAAAWMDLGTLYESCNQPQDAIKCYLNATRSKSCSNTSALAARIKYLQAQLCNLPQGSLQNKTKLLPSIEEAWSLPIPAELTSRQGAMNTAQQNTSDNWSGGHAVSHPPVQQQAHSWCLTPQKLQHLEQLRANRNNLNPAQKLMLEQLESQFVLMQQHQMRPTGVAQVRSTGIPNGPTADSSLPTNSVSGQQPQLALTRVPSVSQPGVRPACPGQPLANGPFSAGHVPCSTSRTRGSTDTILIGNNHITGNGSNGNVPYLQRNALTLPHNRTNLTSSAKEPWKNQLSNSTQGLHKGQSSHSAGPNGERPLSSTGPSQHLQAAGSGIQNQNGHPTLPSNSVTQGAALNHLSSHTATSGGQQGITLTKESKPSGNILTVPETSRHTGETPNSTASVEGLPNHVHQMTADAVCSPSHGDSKSPGLLSSDNPQLSALLMGKANNNVGTGTCDKVNNIHPAVHTKTDNSVASSPSSAISTATPSPKSTEQTTTNSVTSLNSPHSGLHTINGEGMEESQSPMKTDLLLVNHKPSPQIIPSMSVSIYPSSAEVLKACRNLGKNGLSNSSILLDKCPPPRPPSSPYPPLPKDKLNPPTPSIYLENKRDAFFPPLHQFCTNPNNPVTVIRGLAGALKLDLGLFSTKTLVEANNEHMVEVRTQLLQPADENWDPTGTKKIWHCESNRSHTTIAKYAQYQASSFQESLREENEKRSHHKDHSDSESTSSDNSGRRRKGPFKTIKFGTNIDLSDDKKWKLQLHELTKLPAFVRVVSAGNLLSHVGHTILGMNTVQLYMKVPGSRTPGHQENNNFCSVNINIGPGDCEWFVVPEGYWGVLNDFCEKNNLNFLMGSWWPNLEDLYEANVPVYRFIQRPGDLVWINAGTVHWVQAIGWCNNIAWNVGPLTACQYKLAVERYEWNKLQSVKSIVPMVHLSWNMARNIKVSDPKLFEMIKYCLLRTLKQCQTLREALIAAGKEIIWHGRTKEEPAHYCSICEVEVFDLLFVTNESNSRKTYIVHCQDCARKTSGNLENFVVLEQYKMEDLMQVYDQFTLAPPLPSASS

SEQ ID NO: 2074 - DNA, 1887 bp, Homo sapiens
ctttttaagctcccctgagccggtgctgcgctcctctaattgggactccgagccggggctatttctggcgctggcgcggctccaagaaggcatccgcatttgctaccagcggcggccgcggcggagccaggccggtcctcagcgcccagcaccgccgctcccggcaacccggagcgcgcaccgcaggccggcggccgagctcgcgcatcccagccatcactcttccacctgctccttagagaagggaagatgagtgagtcgagctcgaagtccagccagcccttggcctccaagcaggaaaaggacggcactgagaagcggggccggggcaggccgcgcaagcagcctccgaaggagcccagcgaagtgccaacacctaagagacctcggggccgaccaaagggaagcaaaaacaagggtgctgccaagacccggaaaaccaccacaactccaggaaggaaaccaaggggcagacccaaaaaactggagaaggaggaagaggagggcatctcgcaggagtcctcggaggaggagcagtgacccatgcgtgccgcctgctcctcactggaggagcagcttccttctgggactggacagctttgctccgctcccaccgcccccgccccttccccaggcccaccatcaccaccgcctctggccgccacccccatcttccacctgtgccctcaccaccacactacacagcacaccagccgctgcagggctcccatgggctgagtggggagcagttttcccctggcctcagttcccagctccccccgcccacccacgcatacacacatgccctcctggacaaggctaacatcccacttagccgcaccctgcacctgctgcgtccccactcccttggtggtggggacattgctctctgggcttttggtttgggggcgccctctctgctccttcactgttccctctggcttcccatagtggggcctgggagggttcccctggccttaaaaggggcccaagccccatctcatcctggcacgccctactccactgccctggcagcagcaggtgtggccaatggaggggggtgctggcccccaggattcccccagccaaactgtctttgtcaccacgtggggctcacttttcatccttccccaacttccctagtccccgtactaggttggacagcccccttcggctacaggaaggcaggaggggtgagtcccctactccctcttcactgtggccacagcccccttgccctccgcctgggatctgagtacatattgtggtgatggagatgcagtcacttattgtccaggtgaggcccaagagccctgtggccgccacctgaggtgggctggggctgctcccctaaccctactttgcttccgccactcagccatttccccctcctcagatggggcaccaataacaaggagctcaccctgcccgctcccaacccccctcctgctcctccctgccccccaaggttctggttccatttttcctctgttcacaaactacctctggacagttgtgttgttttttgttcaatgttccattcttcgacatccgtcattgctgctgctaccagcgccaaatgttcatcctcattgcctcctgttctgcccacgatcccctcccccaagatactctttgtggggaagaggggctggggcatggcaggctgggtgaccgactaccccagtcccagggaaggtggggccctgcccctaggatgctgcagcagagtgagcaagggggcccgaatcgaccataaagggtgtaggggccacctcctccccctgttctgttggggaggggtagccatgatttgtcccagcctggggctccctctctggtttcctatttgcagttacttgaataaaaaaaatatccttttctgga

SEQ ID NO: 2075 - protein, 96 aa, Homo sapiens
MSESSSKSSQPLASKQEKDGTEKRGRGRPRKQPPKEPSEVPTPKRPRGRPKGSKNKGAAKTRKTTTTPGRKPRGRPKKLEKEEEEGISQESSEEEQ

SEQ ID NO: 2076 - DNA, 1958 bp, Homo sapiens
ctttttaagctcccctgagccggtgctgcgctcctctaattgggactccgagccggggctatttctggcgctggcgcggctccaagaaggcatccgcatttgctaccagcggcggccgcggcggagccaggccggtcctcagcgcccagcaccgccgctcccggcaacccggagcgcgcaccgcaggccggcggccgagctcgcgcatcccagccatcactcttccacctgctccttagagaagggaagatgagtgagtcgagctcgaagtccagccagcccttggcctccaagcaggaaaaggacggcactgagaagcggggccggggcaggccgcgcaagcagcctccggtgagtcccgggacagcgctggtagggagtcagaaggagcccagcgaagtgccaacacctaagagacctcggggccgaccaaagggaagcaaaaacaagggtgctgccaagacccggaaaaccaccacaactccaggaaggaaaccaaggggcagacccaaaaaactggagaaggaggaagaggagggcatctcgcaggagtcctcggaggaggagcagtgacccatgcgtgccgcctgctcctcactggaggagcagcttccttctgggactggacagctttgctccgctcccaccgcccccgccccttccccaggcccaccatcaccaccgcctctggccgccacccccatcttccacctgtgccctcaccaccacactacacagcacaccagccgctgcagggctcccatgggctgagtggggagcagttttcccctggcctcagttcccagctccccccgcccacccacgcatacacacatgccctcctggacaaggctaacatcccacttagccgcaccctgcacctgctgcgtccccactcccttggtggtggggacattgctctctgggcttttggtttgggggcgccctctctgctccttcactgttccctctggcttcccatagtggggcctgggagggttcccctggccttaaaaggggcccaagccccatctcatcctggcacgccctactccactgccctggcagcagcaggtgtggccaatggaggggggtgctggcccccaggattcccccagccaaactgtctttgtcaccacgtggggctcacttttcatccttccccaacttccctagtccccgtactaggttggacagcccccttcggctacaggaaggcaggaggggtgagtcccctactccctcttcactgtggccacagcccccttgccctccgcctgggatctgagtacatattgtggtgatggagatgcagtcacttattgtccaggtgaggcccaagagccctgtggccgccacctgaggtgggctggggctgctcccctaaccctactttgcttccgccactcagccatttccccctcctcagatggggcaccaataacaaggagctcaccctgcccgctcccaacccccctcctgctcctccctgccccccaaggttctggttccatttttcctctgttcacaaactacctctggacagttgtgttgttttttgttcaatgttccattcttcgacatccgtcattgctgctgctaccagcgccaaatgttcatcctcattgcctcctgttctgcccacgatcccctcccccaagatactctttgtggggaagaggggctggggcatggcaggctgggtgaccgactaccccagtcccagggaaggtggggccctgcccctaggatgctgcagcagagtgagcaagggggcccgaatcgaccataaagggtgtaggggccacctcctccccctgttctgttggggaggggtagccatgatttgtcccagcctggggctccctctctggtttcctatttgcagttacttgaataaaaaaaatatccttttctggaaaaaaaaaaaaaaaaaaaaaaaaaaaaaaaaaaaaaaa

SEQ ID NO: 2077 - protein, 107 aa, Homo sapiens
MSESSSKSSQPLASKQEKDGTEKRGRGRPRKQPPVSPGTALVGSQKEPSEVPTPKRPRGRPKGSKNKGAAKTRKTTTTPGRKPRGRPKKLEKEEEEGISQESSEEEQ

SEQ ID NO: 2078 - DNA, 1876 bp, Homo sapiens
gagcacgcggcggcggcggtctctgagcgcctctgctctctcccggtatccgcatttgctaccagcggcggccgcggcggagccaggccggtcctcagcgcccagcaccgccgctcccggcaacccggagcgcgcaccgcaggccggcggccgagctcgcgcatcccagccatcactcttccacctgctccttagagaagggaagatgagtgagtcgagctcgaagtccagccagcccttggcctccaagcaggaaaaggacggcactgagaagcggggccggggcaggccgcgcaagcagcctccggtgagtcccgggacagcgctggtagggagtcagaaggagcccagcgaagtgccaacacctaagagacctcggggccgaccaaagggaagcaaaaacaagggtgctgccaagacccggaaaaccaccacaactccaggaaggaaaccaaggggcagacccaaaaaactggagaaggaggaagaggagggcatctcgcaggagtcctcggaggaggagcagtgacccatgcgtgccgcctgctcctcactggaggagcagcttccttctgggactggacagctttgctccgctcccaccgcccccgccccttccccaggcccaccatcaccaccgcctctggccgccacccccatcttccacctgtgccctcaccaccacactacacagcacaccagccgctgcagggctcccatgggctgagtggggagcagttttcccctggcctcagttcccagctccccccgcccacccacgcatacacacatgccctcctggacaaggctaacatcccacttagccgcaccctgcacctgctgcgtccccactcccttggtggtggggacattgctctctgggcttttggtttgggggcgccctctctgctccttcactgttccctctggcttcccatagtggggcctgggagggttcccctggccttaaaaggggcccaagccccatctcatcctggcacgccctactccactgccctggcagcagcaggtgtggccaatggaggggggtgctggcccccaggattcccccagccaaactgtctttgtcaccacgtggggctcacttttcatccttccccaacttccctagtccccgtactaggttggacagcccccttcggctacaggaaggcaggaggggtgagtcccctactccctcttcactgtggccacagcccccttgccctccgcctgggatctgagtacatattgtggtgatggagatgcagtcacttattgtccaggtgaggcccaagagccctgtggccgccacctgaggtgggctggggctgctcccctaaccctactttgcttccgccactcagccatttccccctcctcagatggggcaccaataacaaggagctcaccctgcccgctcccaacccccctcctgctcctccctgccccccaaggttctggttccatttttcctctgttcacaaactacctctggacagttgtgttgttttttgttcaatgttccattcttcgacatccgtcattgctgctgctaccagcgccaaatgttcatcctcattgcctcctgttctgcccacgatcccctcccccaagatactctttgtggggaagaggggctggggcatggcaggctgggtgaccgactaccccagtcccagggaaggtggggccctgcccctaggatgctgcagcagagtgagcaagggggcccgaatcgaccataaagggtgtaggggccacctcctccccctgttctgttggggaggggtagccatgatttgtcccagcctggggctccctctctggtttcctatttgcagttacttgaataaaaaaaatatccttttctgga

SEQ ID NO: 2079 - DNA, 1843 bp, Homo sapiens
gagcacgcggcggcggcggtctctgagcgcctctgctctctcccggtatccgcatttgctaccagcggcggccgcggcggagccaggccggtcctcagcgcccagcaccgccgctcccggcaacccggagcgcgcaccgcaggccggcggccgagctcgcgcatcccagccatcactcttccacctgctccttagagaagggaagatgagtgagtcgagctcgaagtccagccagcccttggcctccaagcaggaaaaggacggcactgagaagcggggccggggcaggccgcgcaagcagcctccgaaggagcccagcgaagtgccaacacctaagagacctcggggccgaccaaagggaagcaaaaacaagggtgctgccaagacccggaaaaccaccacaactccaggaaggaaaccaaggggcagacccaaaaaactggagaaggaggaagaggagggcatctcgcaggagtcctcggaggaggagcagtgacccatgcgtgccgcctgctcctcactggaggagcagcttccttctgggactggacagctttgctccgctcccaccgcccccgccccttccccaggcccaccatcaccaccgcctctggccgccacccccatcttccacctgtgccctcaccaccacactacacagcacaccagccgctgcagggctcccatgggctgagtggggagcagttttcccctggcctcagttcccagctccccccgcccacccacgcatacacacatgccctcctggacaaggctaacatcccacttagccgcaccctgcacctgctgcgtccccactcccttggtggtggggacattgctctctgggcttttggtttgggggcgccctctctgctccttcactgttccctctggcttcccatagtggggcctgggagggttcccctggccttaaaaggggcccaagccccatctcatcctggcacgccctactccactgccctggcagcagcaggtgtggccaatggaggggggtgctggcccccaggattcccccagccaaactgtctttgtcaccacgtggggctcacttttcatccttccccaacttccctagtccccgtactaggttggacagcccccttcggctacaggaaggcaggaggggtgagtcccctactccctcttcactgtggccacagcccccttgccctccgcctgggatctgagtacatattgtggtgatggagatgcagtcacttattgtccaggtgaggcccaagagccctgtggccgccacctgaggtgggctggggctgctcccctaaccctactttgcttccgccactcagccatttccccctcctcagatggggcaccaataacaaggagctcaccctgcccgctcccaacccccctcctgctcctccctgccccccaaggttctggttccatttttcctctgttcacaaactacctctggacagttgtgttgttttttgttcaatgttccattcttcgacatccgtcattgctgctgctaccagcgccaaatgttcatcctcattgcctcctgttctgcccacgatcccctcccccaagatactctttgtggggaagaggggctggggcatggcaggctgggtgaccgactaccccagtcccagggaaggtggggccctgcccctaggatgctgcagcagagtgagcaagggggcccgaatcgaccataaagggtgtaggggccacctcctccccctgttctgttggggaggggtagccatgatttgtcccagcctggggctccctctctggtttcctatttgcagttacttgaataaaaaaaatatccttttctgga

SEQ ID NO: 2080 - DNA, 758 bp, Homo sapiens
caggtgggaggttagtgtggcccgggcgtccgctcctcagcggatgtggcagccccgagccatggctctcgccgtccgagtcgtttattgtggcgcttgaggctacaagtccaagtatcttcagctcaagaagaagttagaagatgagttccccggccgcctggacatctgcggcgagggaactccccaggccaccgggttctttgaagtgatggtagccgggaagttgattcactctaagaagaaaggcgatggctacgtggacacagaaagcaagtttctgaagttggtggccgccatcaaagccgccttggctcagggctaatgcgccctgaaggcagagtccagggaccttgacccagcccctctcagcagacgcttcatgataggaaggactgaaaagtcttgtggacacctggtctttccctgatgttctcgtggctgctgttgggggcagagattgacgcccccggtctttgcctctgagcgggagagtctgtgtgtatgtgtcttccccggaatccacaccaccccaccctcctcctgtcccgtggtttcatcatatctctttgcataccccatgtcttccccagttgtcccctggagtttggggggacatcccgcctcaggcatccttctcaaggggaagccaagagaggcatcaggatgggtgggtttctgattgtggcaacgtttgcaaccgttcacgattcaataaatattggatgaaattaaccggaaaaaaaaaaaaaaaaaaa

SEQ ID NO: 2081 - protein, 87 aa, Homo sapiens
  misc_feature (13)..(13): Xaa can be any naturally occurring amino acid
MALAVRVVYCGAXGYKSKYLQLKKKLEDEFPGRLDICGEGTPQATGFFEVMVAGKLIHSKKKGDGYVDTESKFLKLVAAIKAALAQG

SEQ ID NO: 2082 - DNA, 481 bp, Homo sapiens
tctccttgccgggtcagccctgacaaaggtcagctagccccttgaggacatcagctttggcctcagggtcctaatggcagcagaaccactgacagagctagaggagtccattgagaccgtggtcaccaccttcttcacctttgcaaggcaggagggccggaaggatagcctcagcgtcaacgagttcaaagagctggttacccagcagttgccccatctgctcaaggatgtgggctctcttgatgagaagatgaagagcttggatgtgaatcaggactcggagctcaagttcaatgagtactggagattgattggggagctggccaaggaaatcaggaagaagaaagacctgaagatcaggaagaagtaaagccgcctggctgagatggggtgggcagggcagagctgatcagggccgagcagaaccgcactcttcccaaataaagcttcctccttgaaaaaaaaaaaaaaaaaaaaaaaa

SEQ ID NO: 2083 - protein, 98 aa, Homo sapiens
MAAEPLTELEESIETVVTTFFTFARQEGRKDSLSVNEFKELVTQQLPHLLKDVGSLDEKMKSLDVNQDSELKFNEYWRLIGELAKEIRKKKDLKIRKK

SEQ ID NO: 2084 - DNA, 7450 bp, Homo sapiens
  misc_feature (11)..(11): n is a, c, g, or t
ttcagtctgtnaaaggatacccccgttgtgaatttcgtacctgtatgaccagagacacctcaaattcaaaatgtccagaaatgaacacagtatcttcttcccttgagtaactcgccttctgtatataattggggtgaatgttccagcaatgccaacgggctagcatctactcaggcaggtacgccagacatctgaatcttaatacctcgtcgtcccccctcaatctgtcactatgtcctaattttatttcctacctttgcatcccttcctcataattatcagcaccactgccttaatttagatcctatcattccttgtctggattatttcaagtcttttgcccctctcaagtctgacctcgtcatagactgtttgtggatgattattttccctgcaacatctccacctcccaatagtctccatcacttattagccatgtgaattatggcaaattgcttaacctacctatgcctcacttttccttattgtaaagtggaaataagagtacctatctcatagggttgtgtgattaatcatgcgatgcaattagaacagtgcctaggatatgaaagtgccccaaaatgttacgttattattattattactactattgccttctcatgaacatgctatgtgtatgttcaagctgttatctctactggaaaatccttctccgtttccaatactctttccaaaaccccctcctgggttttactgcacctaccattgtgtactgacgtgattgaatgattggcttatgggactgatcctttctaccagacttaacttcttcagggcaggaactctgatacatagtaaatggtcaataaaagttggctcaactgaaaccctaaggataaactccatccacagcggaagagcgcggccccgcccgattcgggggcggggcggggagccgcgcgcggagggtgggtcgatgggggtggggtgggactctttttcctcgccgtggcggcggaggcgcacggcgtgggcttgcggcgagacgtcgtcgtcggaggctgaaaaagcccaaggtgctgccgttgcccgtacaactcggacttgctgttgctcgagccgcgtctgcacgggtctcggaccgagcggagctcgcagcctcggtcccggagcccaccttcgcctcgcccttgcccagcctgcggtgatggaggcggccaccacactgcacccaggcccgcgcccggcgctgcccctcgggggcccgggcccgctgggcgagttcctgcctccacccgagtgcccggtcttcgaacccagctgggaagagttcgcggaccccttcgctttcatccacaagatccggcccatagccgagcagactggcatctgtaaggtgcggccgccgccggattggcagccaccatttgcatgtgatggtgataaacttcattttacgccacgtatccagagactgaatgaattggaggcccaaactcgtgtaaaattgaatttcttggaccagattgcaaagtactgggagttacagggaagtactctgaaaattccacatgtggagaggaagatcttggacttatttcagcttaataagttagttgcagaagaaggtggatttgcagttgtttgcaaggatagaaaatggaccaaaattgctaccaagatggggtttgctcctggcaaagcagtgggctcacatatcagagggcattatgaacgaattctcaacccctacaacttattcctgtccggagacagcctaaggtgtttgcagaagccaaacctgaccacagacactaaggacaaggagtacaaaccccatgatattccccagaggcagtctgtgcagccttcggaaacgtgccccccagcccgacgagcaaaacgcatgagagcagaggccatgaatattaaaatagaacccgaggagacaacagaagccagaactcataatctgagacgtcgaatgggttgtccaactccaaaatgtgaaaatgagaaagaaatgaagagtagcatcaagcaagaacctattgagaggaaagattatattgtagaaaatgagaaggaaaagcccaagagtcgatctaaaaaagccaccaatgctgtggacctgtatgtctgtcttttatgtggcagtggcaatgatgaagaccggctactgttgtgtgatggctgtgatgacagttaccataccttttgcttgatcccacctctccatgatgttcccaagggagactggaggtgtcctaagtgtttggctcaggaatgtagtaagccacaagaagcatttggctttgaacaagcagccagggactataccctccgtacttttggggaaatggcagatgcgttcaaatctgattacttcaacatgccagtccatatggtccccacagagcttgttgagaaagaattttggagactagtaagcactattgaggaggatgtcacagtggaatatggagctgacattgcctcaaaggaatttggcagtggctttcctgtccgagatgggaaaatcaaactctcacctgaggaagaggagtatcttgatagtggctggaatttgaacaacatgccagtgatggagcagtctgtccttgcacatattactgctgatatatgtggcatgaaacttccttggttgtatgtgggaatgtgcttttcttcattctgttggcacattgaagaccactggagctattcaattaactacttgcactggggtgagccaaaaacctggtatggagtcccagggtatgctgctgagcagctagaaaatgtaatgaagaaactagctccagaactctttgtgtcccagccggatctcctccatcagcttgtgaccatcatgaaccccaataccctgatgactcatgaagtgcctgtttaccgaactaatcagtgtgctggggagtttgtgattacatttccaagagcctaccacagtggttttaaccagggttttaattttgctgaggctgttaacttctgcactgttgattggctgccattaggccgacagtgtgtggagcattatcgcttgcttcatcgatattgtgtgttttcccatgatgagatgatctgcaagatggcttccaaggctgatgtattagatgttgtagtggcttcaactgttcagaaagacatggccattatgattgaggatgagaaagctttaagagaaactgtccgtaaattgggagtgattgattcggaaagaatggattttgagctgttgccagatgatgaacgtcagtgtgtaaaatgcaaaactacatgcttcatgtctgccatctcctgttcttgtaaacctggccttcttgtttgcctgcatcatgtaaaagaattgtgttcctgtcctccttataaatataaattgcggtataggtacacgctggatgatctctaccctatgatgaatgcattgaagcttcgagcagaatcttacaacgaatgggccttgaatgtgaatgaagctttggaggcaaagatcaccaagaagaaaagccttgtcagcttcaaggctttaattgaagaatctgaaatgaagaaattcccagacaatgatcttttgcgacaccttcgcctagtcacacaggatgcagagaagtgtgcctctgttgcgcagcagttgcttaatggcaaaaggcaaactagatatcgatctggtggagggaaatcccaaaatcagttgacagtgaatgagctccggcagtttgtaacacagctgtatgctcttccatgtgtcctcagtcagacaccattactaaaggatctcttgaatcgtgtagaagattttcaacagcatagtcagaaactactctctgaggaaacgcctagtgctgcggagctgcaggacttgctagatgtcagctttgaatttgatgttgaacttccacagcttgctgagatgcgtatccgtttggaacaagcccgttggctagaagaggtgcagcaagcttgcctagaccccagctcccttactttagatgatatgagacgtctcatagacctaggggtagggctggccccgtattcagcagtggagaaagctatggcccggctgcaggaactgctcacagtgtcagagcactgggacgacaaagccaagagtctcctcaaggccaggccacgacattcattgaatagccttgctacggcagtaaaggaaatcgaagagatccctgcatatctgcccaatggtgcggctctgaaagactcagtgcagagagccagagactggcttcaggatgtagagggcctgcaggctggaggacgtgtgccagtgttagacacactcatagaacttgttacacgaggccgatctatcccggtacatctgaattctttgccaagactggaaaccctagtagctgaggttcaggcttggaaagaatgtgctgttaatacattcttgactgagaattctccatattctctcttagaggtgctgtgtcctcgatgtgatattggccttttgggattgaaaaggaagcagagaaagttaaaggagcccttgccaaatggaaagaaaaaaagcaccaaattagagagtctgagtgacctggagagagctttaactgaaagcaaggagactgcttcagctatggcaactcttggggaagctcgcctaagggaaatggaagccttgcagtctctcagactcgccaatgaagggaaattgctgtcgcctctccaagatgtggatataaaaatctgcctatgtcagaaggccccagctgcccctatgattcaatgtgaactctgcagggatgctttccacaccagttgtgtggcggtacccagtatttcacagggcctgcgaatctggctttgtccccattgtcggaggtcagagaaacctccattagagaaaattctgcccctgctcgcctcccttcagcgtatccgagttcgccttcctgagggagatgcacttcgatatatgattgaaagaaccgtgaactggcagcacagagcccagcaactgctttcgtcagggaatcttaaatttgtgcaagatcgagtgggctcaggactgttatatagcagatggcaagcctcagcaggacaggtgtcagacacaaacaaggtatctcaacctcctggcacaacatcattttctttgcctgatgactgggacaacagaacctcatatttgcactcccccttctcaactggacgaagttgtatccccctccatggtgttagtccagaagtgaatgaactattgatggaagcccagctgctccaggtatcccttcctgaaattcaggaactttaccagactttacttgcaaagccaagccctgctcagcagactgaccgaagctcaccagtgagacccagcagtgagaagaatgactgttgccgagggaagcgagatggaattaacagtcttgagagaaaactgaagagacgcctggaaagagagggcctctccagtgagcggtgggaacgagttaagaaaatgcggacccccaaaaagaagaaaatcaaactgagccaccccaaggacatgaacaatttcaagttagagagagagcgtagctatgaattagttcgttctgctgaaactcattccctgccctcagacacatcctattccgaacaggaagactctgaggatgaagatgccatctgcccagctgtgagctgcctgcagccagaaggagatgaggtggactgggtccagtgtgatggcagctgcaatcagtggtttcatcaggtctgtgttggtgtctccccagagatggcagagaaagaagactacatctgtgtgcgctgtactgtgaaggacgcaccaagccgaaagtaaaaacacaaaaacagatacccccctacttaatgtaattcaggactccaaccaagaggatttcttcaaatctcagcaaagctacaggactggtactcaagccagcctgtaaacggtgctatttctattccttatgggatcatttttccaggactctttgaagaaaagaaaaaacaactaaaaaaatttttgacactttttgtattttttccttaagagctatttgtggttgttgaggtttgaaaagctgactgttttttttgcaggggttcccaccaatttggaaggcattgaagcttgcaccttttcatgtacagcattaaaattttacctctctctgggatttaccagcttaagagtccaactcacttccagtgcccaaaagggcacccaccagaaattccagtaaatcctcatttgaggaagctctcccttgtttactctgttaccacattggggaaatttttaagtttttcactttgggagtttttgtttgtttcttcttttcctttatccacttttcttcttcctggtagactaggtttatttatctgagcaataacttctatgttggtttcagtggctggaattaaaacaaaacaaaacaaacttccaaacagtgtgttggtgctttagcgattgattgatgtacagaacacaaatgtctagtttctagtgtcactgatgaactagtgatgtagaaaagagacttctctgtaagtaattgccacagctgtattttggctttctccctgtcccttcctttctcccctattttttggtagcttgtatcaaatgttacagtttatattgtggaataaatccttcgtcctaacataacactaaatgctgattatttagagccattagagcacagcttcttctgcccctctactgttgcacagccagaaggggctgcttgcttttgcctctgcccaaccaggttgcagtagcagtggatgttagcctgcaaacaacattaggggattcttcttttgtgtcctgctctgtttggtgggccatatgcctacagccctcactaacaaagaacccctctgtcttcaaggactagaacctatctttaaagccgtgctcttttaaaataagctttctcagaatgttggcaaatcacttcaatcctcaaatcagtcttccttgtggaatgctgcctttattatatttgaattgacaggggaacttggtttagggttaagacgttggaaggaaatctaaggaaaattaatcctcacagaggtccgggtttagtatatgtcttgagaggagacttgtgaattcccagactctgcctcctggtttcctttctcatttctttctaactgtagctatcattactggctgtggatagcccatagctattttccttgcttttcttttttaaaggggtctgttctgcagtggagaagacattctggtgaccagacttttgcttaccttttcctattctgttgccaatttttgttttccccacattctatagccataaacctgaagatgagtaaaactggtgggtctttaataaaacaacaacaaaaacagcagtttgtgatatagcagaggtttaaatgtaccctccccttttatgcacttcaaataattaaatctctttaagaatgaaaaaaaaaaaaaaaa

SEQ ID NO: 2085 - protein, 1681 aa, Homo sapiens
MGLILSTRLNFFRAGTLIHSKWSIKVGSTETLRINSIHSGRARPRPIRGRGGEPRAEGGSMGVGWDSFSSPWRRRRTAWACGETSSSEAEKAQGAAVARTTRTCCCSSRVCTGLGPSGARSLGPGAHLRLALAQPAVMEAATTLHPGPRPALPLGGPGPLGEFLPPPECPVFEPSWEEFADPFAFIHKIRPIAEQTGICKVRPPPDWQPPFACDGDKLHFTPRIQRLNELEAQTRVKLNFLDQIAKYWELQGSTLKIPHVERKILDLFQLNKLVAEEGGFAVVCKDRKWTKIATKMGFAPGKAVGSHIRGHYERILNPYNLFLSGDSLRCLQKPNLTTDTKDKEYKPHDIPQRQSVQPSETCPPARRAKRMRAEAMNIKIEPEETTEARTHNLRRRMGCPTPKCENEKEMKSSIKQEPIERKDYIVENEKEKPKSRSKKATNAVDLYVCLLCGSGNDEDRLLLCDGCDDSYHTFCLIPPLHDVPKGDWRCPKCLAQECSKPQEAFGFEQAARDYTLRTFGEMADAFKSDYFNMPVHMVPTELVEKEFWRLVSTIEEDVTVEYGADIASKEFGSGFPVRDGKIKLSPEEEEYLDSGWNLNNMPVMEQSVLAHITADICGMKLPWLYVGMCFSSFCWHIEDHWSYSINYLHWGEPKTWYGVPGYAAEQLENVMKKLAPELFVSQPDLLHQLVTIMNPNTLMTHEVPVYRTNQCAGEFVITFPRAYHSGFNQGFNFAEAVNFCTVDWLPLGRQCVEHYRLLHRYCVFSHDEMICKMASKADVLDVVVASTVQKDMAIMIEDEKALRETVRKLGVIDSERMDFELLPDDERQCVKCKTTCFMSAISCSCKPGLLVCLHHVKELCSCPPYKYKLRYRYTLDDLYPMMNALKLRAESYNEWALNVNEALEAKITKKKSLVSFKALIEESEMKKFPDNDLLRHLRLVTQDAEKCASVAQQLLNGKRQTRYRSGGGKSQNQLTVNELRQFVTQLYALPCVLSQTPLLKDLLNRVEDFQQHSQKLLSEETPSAAELQDLLDVSFEFDVELPQLAEMRIRLEQARWLEEVQQACLDPSSLTLDDMRRLIDLGVGLAPYSAVEKAMARLQELLTVSEHWDDKAKSLLKARPRHSLNSLATAVKEIEEIPAYLPNGAALKDSVQRARDWLQDVEGLQAGGRVPVLDTLIELVTRGRSIPVHLNSLPRLETLVAEVQAWKECAVNTFLTENSPYSLLEVLCPRCDIGLLGLKRKQRKLKEPLPNGKKKSTKLESLSDLERALTESKETASAMATLGEARLREMEALQSLRLANEGKLLSPLQDVDIKICLCQKAPAAPMIQCELCRDAFHTSCVAVPSISQGLRIWLCPHCRRSEKPPLEKILPLLASLQRIRVRLPEGDALRYMIERTVNWQHRAQQLLSSGNLKFVQDRVGSGLLYSRWQASAGQVSDTNKVSQPPGTTSFSLPDDWDNRTSYLHSPFSTGRSCIPLHGVSPEVNELLMEAQLLQVSLPEIQELYQTLLAKPSPAQQTDRSSPVRPSSEKNDCCRGKRDGINSLERKLKRRLEREGLSSERWERVKKMRTPKKKKIKLSHPKDMNNFKLERERSYELVRSAETHSLPSDTSYSEQEDSEDEDAICPAVSCLQPEGDEVDWVQCDGSCNQWFHQVCVGVSPEMAEKEDYICVRCTVKDAPSRK

SEQ ID NO: 2086 - DNA, 2511 bp, Homo sapiens
gaagatcctttctgagctgctgtgaataaatttggaatggtactgtatatttccatctaatggagaactagctgtactttgaataaggattgctgcactggacgactttagaacatccctcacaatgtcgtcaacccggagccagaacccccacggcctgaagcagattggcctggaccagatctgggacgacctcagagccggcatccagcaggtgtacacacggcagagcatggccaagtccagatatatggagctctacactcatgtttataactactgtactagtgttcaccagtttgttggcctggaattatataaacgacttaaggaatttttgaagaattacttgacaaatcttcttaaggatggagaagatttgatggatgagagtgtactgaaattctacactcaacaatgggaagattatcgattttcaagcaaagtgctgaatggaatttgtgcctacctcaatagacattgggttcgccgtgaatgtgacgaaggacgaaaaggaatatatgaaatctattcgcttgcattggtgacttggagagactgtctgttcaggccactgaataaacaggtaacaaatgctgttttaaagctgattgaaaaggaaaggaatggtgaaaccatcaatacaagattgattagtggagttgtacagtcttacgtggaattggggctgaatgaagatgatgcatttgcaaagggccctacgttaacagtgtataaagaatcctttgaatctcaatttttggctgacacagagagattttataccagagagagtactgaattcttgcagcagaacccagttactgaatatatgaaaaaggcagaggctcgtctgcttgaggaacaacgaagagttcaggtttaccttcatgaaagcacacaagatgaattagcaaggaaatgtgaacaagtcctcattgaaaaacacttggaaattttccacacagaatttcagaatttattggatgctgacaaaaatgaagatttgggacgcatgtataatcttgtatctagaatccaggatggcctaggagaattgaaaaaactgttggagacacacattcataatcagggtcttgcagccattgaaaagtgtggagaagctgctttaaatgaccccaaaatgtatgtacagacagtgcttgatgttcataaaaaatacaatgccctggtaatgtctgcattcaacaatgacgctggctttgtggctgctcttgataaggcttgtggtcgcttcataaacaacaacgcggttaccaagatggcccaatcatccagtaaatcccctgagttgctggctcgatactgtgactccttgttgaagaaaagttccaagaacccagaggaggcagaactagaagacacactcaatcaagtgatggttgtcttcaagtacatagaagacaaagacgtatttcagaagttctatgcgaagatgctcgccaagaggctcgtccaccagaacagtgcaagtgacgatgccgaagccagcatgatctccaagttaaagcaagcttgcgggttcgagtacacctctaaacttcagcgcatgtttcaagacattggcgtgagcaaagatctgaacgagcaattcaaaaagcacttgacaaactcagaacccctagacttggatttcagcattcaagtgctgagctccgggtcctggcccttccagcagtcttgtacatttgccttgccgtcagagttggaacgtagttatcagcgattcacagctttctacgccagccgccacagtggccgaaaattgacgtggttatatcagttgtctaaaggagaattggtaactaactgcttcaaaaacagatatactttgcaggcgtcgacattccagatggctatcctgcttcagtacaacacggaagatgcctacactgtgcagcagctgaccgacagcactcaaattaaaatggacattttggcgcaagttttacagattttattaaagtcgaagctattggtcttggaagatgaaaatgcaaatgttgatgaggtggaattgaagccagataccttaataaaattatatcttggttataaaaataagaaattaagggttaacatcaatgtgccaatgaaaaccgaacagaagcaggaacaagaaaccacacacaaaaacatcgaggaagaccgcaaactactgattcaggcggccatcgtgagaatcatgaagatgaggaaggttctgaaacaccagcagttacttggcgaggtcctcactcagctgtcctccaggttcaaacctcgagtccctgtgatcaagaaatgcattgacattctaattgagaaagaatatttggagcgagtggatggtgaaaaggacacctacagttacttggcttaacccttctggaagggtctgactgtgtgacccgcagcaaatagttcatgttggaaagaatgaaaacaacttcaagttcataggcagccagcctgccgccattggacctcccttttaaaaactgaggacca

SEQ ID NO: 2087 - protein, 752 aa, Homo sapiens
MSSTRSQNPHGLKQIGLDQIWDDLRAGIQQVYTRQSMAKSRYMELYTHVYNYCTSVHQFVGLELYKRLKEFLKNYLTNLLKDGEDLMDESVLKFYTQQWEDYRFSSKVLNGICAYLNRHWVRRECDEGRKGIYEIYSLALVTWRDCLFRPLNKQVTNAVLKLIEKERNGETINTRLISGVVQSYVELGLNEDDAFAKGPTLTVYKESFESQFLADTERFYTRESTEFLQQNPVTEYMKKAEARLLEEQRRVQVYLHESTQDELARKCEQVLIEKHLEIFHTEFQNLLDADKNEDLGRMYNLVSRIQDGLGELKKLLETHIHNQGLAAIEKCGEAALNDPKMYVQTVLDVHKKYNALVMSAFNNDAGFVAALDKACGRFINNNAVTKMAQSSSKSPELLARYCDSLLKKSSKNPEEAELEDTLNQVMVVFKYIEDKDVFQKFYAKMLAKRLVHQNSASDDAEASMISKLKQACGFEYTSKLQRMFQDIGVSKDLNEQFKKHLTNSEPLDLDFSIQVLSSGSWPFQQSCTFALPSELERSYQRFTAFYASRHSGRKLTWLYQLSKGELVTNCFKNRYTLQASTFQMAILLQYNTEDAYTVQQLTDSTQIKMDILAQVLQILLKSKLLVLEDENANVDEVELKPDTLIKLYLGYKNKKLRVNINVPMKTEQKQEQETTHKNIEEDRKLLIQAAIVRIMKMRKVLKHQQLLGEVLTQLSSRFKPRVPVIKKCIDILIEKEYLERVDGEKDTYSYLA

SEQ ID NO: 2088 - DNA, 2595 bp, Homo sapiens
cgggctgggcggttccgcggcctgggcctaggggcttaacagtagcaacagaagcggcggcggcggcagcagcagcagcagcagcagcaatctcttcccgaacacgagcaccacaggcgcccgaaggccggaacaggcgtttagagaaaatggcagacgatattgatattgaagcaatgcttgaggctccttacaagaaggatgagaacaagttgagcagtgccaacggccatgaagaacgtagcaaaaagaggaaaaaaagcaagagcagaagtcgtagtcatgaacgaaagagaagcaaaagtaaggaacggaagcgaagtagagacagagaaaggaaaaagagcaaaagccgtgaaagaaagcgaagtagaagcaaagagaggcgacggagccgctcaagaagtcgagatcgaagatttagaggccgctacagaagtccttactccggaccaaaatttaacagtgccatccgaggaaagattgggttgcctcatagcatcaaattaagcagacgacgttcccgaagcaaaagtccattcagaaaagacaagagccctgtgagagaacctattgataatttaactcctgaggaaagagatgcaaggacagtcttctgtatgcagctggcggcaagaattcgaccaagggatttggaagagtttttctctacagtaggaaaggttcgagatgtgaggatgatttctgacagaaattcaagacgttccaaaggaattgcttatgtggagttcgtcgatgttagctcagtgcctctagcaataggattaactggccaacgagttttaggcgtgccaatcatagtacaggcatcacaggcagaaaaaaacagagctgcagcaatggcaaacaatttacaaaagggaagtgctggacctatgaggctttatgtgggctcattacacttcaacataactgaagatatgcttcgtgggatctttgagccttttggaagaattgaaagtatccagctgatgatggacagtgaaactggtcgatccaagggatatggatttattacattttctgactcagaatgtgccaaaaaggctttggaacaacttaatggatttgaactagcaggaagaccaatgaaagttggtcatgttactgaacgtactgatgcttcgagtgctagttcatttttggacagtgatgaactggaaaggactggaattgatttgggaacaactggtcgtcttcagttaatggcaagacttgcagagggtacaggtttgcagattccgccagcagcacagcaagctctacagatgagtggctctttggcatttggtgctgtggcagatttgcaaacaagactttcccagcagactgaagcttcagctttagctgcagctgcctctgttcagccacttgcaacacaatgtttccaactctctaacatgtttaaccctcaaacagaagaagaagttggatgggataccgagattaaggatgatgtgattgaagaatgtaataaacatggaggagttattcatatttatgttgacaaaaattcagctcagggcaatgtgtatgtgaagtgcccatcaattgctgcagctattgctgctgtcaatgcattgcatggcaggtggtttgctggtaaaatgataacagcagcatatgtacctcttccaacttaccacaacctgtttcctgattctatgacagcaacacagctactggttccaagtagacgatgaaggaagatatagtcccttatgtatatagctttttttctttcttgagaattcatcttgagttatcttttatttagataaaaataaagaggcaaggatctactgtcatttgtatgcaatttcctgttaccttgaaaaaataaaaatgttaacaggaatgcagtgtgctcattctccctaaatagtaaatcccactgtatacaaaactgttctcttgttctgccttttaaaatgttcatgtagaaaattaatgaactataggaatagctctaggagaacaaatgtgctttctgtaaaaaggcagaccagggatgtaatgtttttaatgtttcagaagcctaactttttacacagtggttacatttcacatttcactaatgttgatatttggctgatggttgagcagtttctgaaatacacatttagtgtatggaaatacaagacagctaaagggctgtttggttagcatctcatcttgcattctgatcaattggcaagaaagggagatttcaaaattatatttcttgatggtatcttttcaattaatgtatctgtaaaagtttctttgtaaatactatgtgttctggtgtgtcttaaaattccaaacaaaatgatccctgcatttcctgaagatgtttaaacgtgagagtctggtaggcaaagcagtctgagaaagaaataggaaatgcagaaataggttttgtctggttgcatataatctttgctctttttaagctctgtgagctctgaaatatatttttgggttacttcagtgtgtttgacaagacagcttgatatttctatcaaacaaatgactttcatattgcaacaatctttgtaagaaccactcaaataaaagtctcttaaaaaggcc

SEQ ID NO: 2089 - protein, 524 aa, Homo sapiens
MADDIDIEAMLEAPYKKDENKLSSANGHEERSKKRKKSKSRSRSHERKRSKSKERKRSRDRERKKSKSRERKRSRSKERRRSRSRSRDRRFRGRYRSPYSGPKFNSAIRGKIGLPHSIKLSRRRSRSKSPFRKDKSPVREPIDNLTPEERDARTVFCMQLAARIRPRDLEEFFSTVGKVRDVRMISDRNSRRSKGIAYVEFVDVSSVPLAIGLTGQRVLGVPIIVQASQAEKNRAAAMANNLQKGSAGPMRLYVGSLHFNITEDMLRGIFEPFGRIESIQLMMDSETGRSKGYGFITFSDSECAKKALEQLNGFELAGRPMKVGHVTERTDASSASSFLDSDELERTGIDLGTTGRLQLMARLAEGTGLQIPPAAQQALQMSGSLAFGAVADLQTRLSQQTEASALAAAASVQPLATQCFQLSNMFNPQTEEEVGWDTEIKDDVIEECNKHGGVIHIYVDKNSAQGNVYVKCPSIAAAIAAVNALHGRWFAGKMITAAYVPLPTYHNLFPDSMTATQLLVPSRR

SEQ ID NO: 2090 - DNA, 1593 bp, Homo sapiens
ctgggagcgcggcgtaggtggctgccgagtcttttcctgtttagggtcttatcctggcattgagggcgccggactggcgcttttggccggcttggcattgggtgggcggcttcttgggacccacatgagccagtggcatcatccccgcagtggctggggccggagacgcgacttttcaggacgctcctcagccaagaagaagggcggaaaccacatccccgaaaggtggaaagactatctcccagttggacagcggatgcctgggactcgtttcattgctttcaaagttcctttgcaaaagagttttgaaaagaaacttgctccagaagaatgcttttcccctttggatctttttaacaaaatccgagaacaaaatgaagaacttggactgattattgatttaacatatactcaacgctattataaaccagaggatttgccagaaactgttccttacttaaaaatttttacagttggacatcaagtgcctgatgatgagactatttttaaattcaaacacgctgttaatgggtttttgaaagaaaataaagataatgataaacttattggtgtccactgtacccatggtttaaacaggactggctacctcatttgcagatatttgattgatgtagaaggcgtgaggccagatgatgcaattgaattattcaataggtgccggggacattgcttagaaagacaaaactacattgaagaccttcagaatggtcctatcagaaagaattggaattccagtgtacccaggtcaagtgattttgaagactcagcacatctcatgcaaccagtccacaataagcctgttaaacaaggacctaggtataatctacatcagatccagggtcactcagctcctcgacatttccacacccagacccaaagtttgcaacaatcagtcagaaaattttcagagaatccacatgtttaccagagacaccatctccctcctcctggtccccctggagaggactattcacacaggaggtattcttggaatgtgaagcccaatgccagtcgggcagcccaggatagaagaaggtggtatccttataattactccagactctcctatccagcctgttgggaatggacccagtgatacaaacctgtcctggaattctacctggagaccagagctggcctgaaaattactggtgtgacttttaattagttcaggtctaatcaggtttctttattgttcccttatgtattcaagcttaaggaaaaattgcattgctgtttacctctttgctgataaatttgcagtaattacagcattgcaggaaaaacaatctgttattccagtcttaaatttttctaaaagaagacaatattttagaactgaagcattgagaacttcccttgcaaattatttttaaaattctatcttgtttttctatgtatttctttctgactagacttgtgatatgcgtgtgtttatgtacagaaatttttagtgtttttgttatgttctgttattgacccaaaggccatctttattttctataactgttcaaaatttatattaaaatctacttaggagataatttctttagaaaaaaaaaaaaaaaaaaa

SEQ ID NO: 2091 - protein, 330 aa, Homo sapiens
MSQWHHPRSGWGRRRDFSGRSSAKKKGGNHIPERWKDYLPVGQRMPGTRFIAFKVPLQKSFEKKLAPEECFSPLDLFNKIREQNEELGLIIDLTYTQRYYKPEDLPETVPYLKIFTVGHQVPDDETIFKFKHAVNGFLKENKDNDKLIGVHCTHGLNRTGYLICRYLIDVEGVRPDDAIELFNRCRGHCLERQNYIEDLQNGPIRKNWNSSVPRSSDFEDSAHLMQPVHNKPVKQGPRYNLHQIQGHSAPRHFHTQTQSLQQSVRKFSENPHVYQRHHLPPPGPPGEDYSHRRYSWNVKPNASRAAQDRRRWYPYNYSRLSYPACWEWTQ

SEQ ID NO: 2092 - DNA, 1008 bp, Homo sapiens
ctggagtgaggccctcggatcggccccgccggggtcggcccacggccctggcggagcgctgagaacgcgggtccacgcgtgtgatcgtccgtgcgtctagcctttgcccacgcagctttcagtcatggcctccggtaacgcgcgcatcggaaagccagcccctgacttcaaggccacagcggtggttgatggcgccttcaaagaggtgaagctgtcggactacaaagggaagtacgtggtcctctttttctaccctctggacttcacttttgtgtgccccaccgagatcatcgcgttcagcaaccgtgcagaggacttccgcaagctgggctgtgaagtgctgggcgtctcggtggactctcagttcaaccacctggcttggatcaacaccccccggaaagagggaggattggggcccctgaacatccccctgcttggtgacgtgaccagacgcttgtctgaggattacggcgtgctgaaaacagatgagggcattgcctacaggggcctctttatcatcgatggcaagggtgtccttcgccagatcactgttaatgatttgcctgtgggacgctccgtggatgaggctctgcggctggtccaggccttccagtacacagacgagcatggggaagtttgtcccgctggctggaagcctggcagtgacacgattaagcccaacgtggatgacagcaaggaatatttctccaaacacaattaggctggctaacggatagtgagcttgtgcccctgcctaggtgcctgtgctgggtgtccacctgtgcccccacctgggtgccctatgctgacccaggaaagggcagacctgcccctccaaactccacaagtatgggaccctggaggggtagggcaagggccttctcaatgcctccacctagaagttgaattgtgaggcctcccccaagcccaacccaggcggacaaaaggcctagaggtaacaataaagtattagggaaaggaaaaaaaaaaaaaaaaaaaaaaaaaaaa

SEQ ID NO: 2093 - protein, 198 aa, Homo sapiens
MASGNARIGKPAPDFKATAVVDGAFKEVKLSDYKGKYVVLFFYPLDFTFVCPTEIIAFSNRAEDFRKLGCEVLGVSVDSQFNHLAWINTPRKEGGLGPLNIPLLGDVTRRLSEDYGVLKTDEGIAYRGLFIIDGKGVLRQITVNDLPVGRSVDEALRLVQAFQYTDEHGEVCPAGWKPGSDTIKPNVDDSKEYFSKHN

SEQ ID NO: 2094 - DNA, 5744 bp, Homo sapiens
ggccttccccctgcgaggatcgccgttggcccgggttggctttggaaagcggcggtggctttgggccgggctcggcctcgggaacgccaggggcccctgggtgcggacgggcgcggccaggagggggttaaggcgcaggcggcggcggggcgggggcgggcctggcgggcgccctctccgggccctttgttaacaggcgcgtcccggccagcggagacgcggccgccctgggcgggcgcgggcggcgggcggcggtgagggcggcctgcggggcggcgcccgggggccgggccgagccgggcctgagccgggcccggaccgagctgggagaggggctccggcccgatcgttcgcttggcgcaaaatgttggagatctgcctgaagctggtgggctgcaaatccaagaaggggctgtcctcgtcctccagctgttatctggaagaagcccttcagcggccagtagcatctgactttgagcctcagggtctgagtgaagccgctcgttggaactccaaggaaaaccttctcgctggacccagtgaaaatgaccccaaccttttcgttgcactgtatgattttgtggccagtggagataacactctaagcataactaaaggtgaaaagctccgggtcttaggctataatcacaatggggaatggtgtgaagcccaaaccaaaaatggccaaggctgggtcccaagcaactacatcacgccagtcaacagtctggagaaacactcctggtaccatgggcctgtgtcccgcaatgccgctgagtatccgctgagcagcgggatcaatggcagcttcttggtgcgtgagagtgagagcagtcctagccagaggtccatctcgctgagatacgaagggagggtgtaccattacaggatcaacactgcttctgatggcaagctctacgtctcctccgagagccgcttcaacaccctggccgagttggttcatcatcattcaacggtggccgacgggctcatcaccacgctccattatccagccccaaagcgcaacaagcccactgtctatggtgtgtcccccaactacgacaagtgggagatggaacgcacggacatcaccatgaagcacaagctgggcgggggccagtacggggaggtgtacgagggcgtgtggaagaaatacagcctgacggtggccgtgaagaccttgaaggaggacaccatggaggtggaagagttcttgaaagaagctgcagtcatgaaagagatcaaacaccctaacctagtgcagctccttggggtctgcacccgggagcccccgttctatatcatcactgagttcatgacctacgggaacctcctggactacctgagggagtgcaaccggcaggaggtgaacgccgtggtgctgctgtacatggccactcagatctcgtcagccatggagtacctagagaagaaaaacttcatccacagagatcttgctgcccgaaactgcctggtaggggagaaccacttggtgaaggtagctgattttggcctgagcaggttgatgacaggggacacctacacagcccatgctggagccaagttccccatcaaatggactgcacccgagagcctggcctacaacaagttctccatcaagtccgacgtctgggcatttggagtattgctttgggaaattgctacctatggcatgtccccttacccgggaattgaccgttcccaggtgtatgagctgctagagaaggactaccgcatgaagcgcccagaaggctgcccagagaaggtctatgaactcatgcgagcatgttggcagtggaatccctctgaccggccctcctttgctgaaatccaccaagcctttgaaacaatgttccaggaatccagtatctcagacgaagtggaaaaggagctggggaaacaaggcgtccgtggggctgtgactaccttgctgcaggccccagagctgcccaccaagacgaggacctccaggagagctgcagagcacagagacaccactgacgtgcctgagatgcctcactccaagggccagggagagagcgatcctctggaccatgagcctgccgtgtctccattgctccctcgaaaagagcgaggtcccccggagggcggcctgaatgaagatgagcgccttctccccaaagacaaaaagaccaacttgttcagcgccttgatcaagaagaagaagaagacagccccaacccctcccaaacgcagcagctccttccgggagatggacggccagccggagcgcagaggggccggcgaggaagagggccgagacatcagcaacggggcactggctttcacccccttggacacagctgacccagccaagtccccaaagcccagcaatggggctggggtccccaatggagccctccgggagtccgggggctcaggcttccggtctccccacctgtggaagaagtccagcacgctgaccagcagccgcctagccaccggcgaggaggagggcggtggcagctccagcaagcgcttcctgcgctcttgctccgtctcctgcgttccccatggggccaaggacacggagtggaggtcagtcacgctgcctcgggacttgcagtccacgggaagacagtttgactcgtccacatttggagggcacaaaagtgagaagccggctctgcctcggaagagggcaggggagaacaggtctgaccaggtgacccgaggcacagtaacgcctccccccaggctggtgaaaaagaatgaggaagctgctgatgaggtcttcaaagacatcatggagtccagcccgggctccagcccgcccaacctgactccaaaacccctccggcggcaggtcaccgtggcccctgcctcgggcctcccccacaaggaagaagcctggaaaggcagtgccttagggacccctgctgcagctgagccagtgacccccaccagcaaagcaggctcaggtgcaccaaggggcaccagcaagggccccgccgaggagtccagagtgaggaggcacaagcactcctctgagtcgccagggagggacaaggggaaattgtccaagctcaaacctgccccgccgcccccaccagcagcctctgcagggaaggctggaggaaagccctcgcagaggcccggccaggaggctgccggggaggcagtcttgggcgcaaagacaaaagccacgagtctggttgatgctgtgaacagtgacgctgccaagcccagccagccggcagagggcctcaaaaagcccgtgctcccggccactccaaagccacaccccgccaagccgtcggggacccccatcagcccagcccccgttcccctttccacgttgccatcagcatcctcggccttggcaggggaccagccgtcttccactgccttcatccctctcatatcaacccgagtgtctcttcggaaaacccgccagcctccagagcgggccagcggcgccatcaccaagggcgtggtcttggacagcaccgaggcgctgtgcctcgccatctctgggaactccgagcagatggccagccacagcgcagtgctggaggccggcaaaaacctctacacgttctgcgtgagctatgtggattccatccagcaaatgaggaacaagtttgccttccgagaggccatcaacaaactggagaataatctccgggagcttcagatctgcccggcgtcagcaggcagtggtccggcggccactcaggacttcagcaagctcctcagttcggtgaaggaaatcagtgacatagtgcagaggtagcagcagtcaggggtcaggtgtcaggcccgtcggagctgcctgcagcacatgcgggctcgcccatacccatgacagtggctgagaagggactagtgagtcagcaccttggcccaggagctctgcgccaggcagagctgagggccctgtggagtccagctctactacctacgtttgcaccgcctgccctcccgcaccttcctcctccccgctccgtctctgtcctcgaattttatctgtggagttcctgctccgtggactgcagtcggcatgccaggacccgccagccccgctcccacctagtgccccagactgagctctccaggccaggtgggaacggctgatgtggactgtctttttcatttttttctctctggagcccctcctcccccggctgggcctccttcttccacttctccaagaatggaagcctgaactgaggccttgtgtgtcaggccctctgcctgcactccctggccttgcccgtcgtgtgctgaagacatgtttcaagaaccgccatttcgggaagggcatgcacgggccatgcacacggctggtcactctgccctctgctgctgcccggggtggggtgcactcgccatttcctcacgtgcaggacagctcttgatttgggtggaaaacagggtgctaaagccaaccagcctttgggtcctgggcaggtgggagctgaaaaggatcgaggcatggggcatgtcctttccatctgtccacatccccagagcccagctcttgctctcttgtgacgtgcactgtgaatcctggcaagaaagcttgagtctcaagggtggcaggtcactgtcactgccgacatccctcccccagcagaatggaggcaggggacaagggaggcagtggctagtggggtgaacagctggtgccaaatagccccagactgggcccaggcaggtctgcaagggcccagagtgaaccgtcctttcacacatctgggtgccctgaagggcccttcccctcccccactcctctaagacaaagtagattcttacaaggccctttcctttggaacaagacagccttcacttttctgagttcttgaagcatttcaaagccctgcctctgtgtagccgccctgagagagaatagagctgccactgggcacctcgcgacaggtgggaggaaagggcctgcgcagtcctggtcctggctgcactcttgaactgggcgaatgtcttatttaattaccgtgagtgacatagcctcatgttctgtgggggtcatcagggagggttaggaaaaccacaaacggagcccctgaaagcctcacgtatttcacagagcacgcctgccatcttctccccgaggctgccccaggccggagcccagataccggcgggctgtgactctgggcagggacccggggtctcctggaccttgacagagcagctaactccgagagcagtgggcaggtggccgcccctgaggcttcacgccggagaagccaccttcccgccccttcataccgcctcgtgccagcagcctcgcacaggccctagctttacgctcatcacctaaacttgtactttatttttctgatagaaatggtttcctctggatcgttttatgcggttcttacagcacatcacctctttccccccgacggctgtgacgcagcggagaggcactagtcaccgacagcggccttgaagacagagcaaagcccccacccaggtcccccgactgcctgtctccatgaggtactggtcccttccttttgttaacgtgatgtgccactatattttacacgtatctcttggtatgcatcttttatagacgctcttttctaagtggcgtgtgcatagcgtcctgccctgccctcgggggcctgtggtggctccccctctgcttctcggggtccagtgcattttgtttctgtatatgattctctgtggttttttttgaatccaaatctgtcctctgtagtattttttaaataaatcagtgtttacattag

SEQ ID NO: 2095 - protein, 1130 aa, Homo sapiens
MLEICLKLVGCKSKKGLSSSSSCYLEEALQRPVASDFEPQGLSEAARWNSKENLLAGPSENDPNLFVALYDFVASGDNTLSITKGEKLRVLGYNHNGEWCEAQTKNGQGWVPSNYITPVNSLEKHSWYHGPVSRNAAEYPLSSGINGSFLVRESESSPSQRSISLRYEGRVYHYRINTASDGKLYVSSESRFNTLAELVHHHSTVADGLITTLHYPAPKRNKPTVYGVSPNYDKWEMERTDITMKHKLGGGQYGEVYEGVWKKYSLTVAVKTLKEDTMEVEEFLKEAAVMKEIKHPNLVQLLGVCTREPPFYIITEFMTYGNLLDYLRECNRQEVNAVVLLYMATQISSAMEYLEKKNFIHRDLAARNCLVGENHLVKVADFGLSRLMTGDTYTAHAGAKFPIKWTAPESLAYNKFSIKSDVWAFGVLLWEIATYGMSPYPGIDRSQVYELLEKDYRMKRPEGCPEKVYELMRACWQWNPSDRPSFAEIHQAFETMFQESSISDEVEKELGKQGVRGAVTTLLQAPELPTKTRTSRRAAEHRDTTDVPEMPHSKGQGESDPLDHEPAVSPLLPRKERGPPEGGLNEDERLLPKDKKTNLFSALIKKKKKTAPTPPKRSSSFREMDGQPERRGAGEEEGRDISNGALAFTPLDTADPAKSPKPSNGAGVPNGALRESGGSGFRSPHLWKKSSTLTSSRLATGEEEGGGSSSKRFLRSCSVSCVPHGAKDTEWRSVTLPRDLQSTGRQFDSSTFGGHKSEKPALPRKRAGENRSDQVTRGTVTPPPRLVKKNEEAADEVFKDIMESSPGSSPPNLTPKPLRRQVTVAPASGLPHKEEAWKGSALGTPAAAEPVTPTSKAGSGAPRGTSKGPAEESRVRRHKHSSESPGRDKGKLSKLKPAPPPPPAASAGKAGGKPSQRPGQEAAGEAVLGAKTKATSLVDAVNSDAAKPSQPAEGLKKPVLPATPKPHPAKPSGTPISPAPVPLSTLPSASSALAGDQPSSTAFIPLISTRVSLRKTRQPPERASGAITKGVVLDSTEALCLAISGNSEQMASHSAVLEAGKNLYTFCVSYVDSIQQMRNKFAFREAINKLENNLRELQICPASAGSGPAATQDFSKLLSSVKEISDIVQR

SEQ ID NO: 2096 - DNA, 5434 bp, Homo sapiens
atggggcagcagcctggaaaagtacttggggaccaaagaaggccaagcttgcctgccctgcattttatcaaaggagcagggaagaaggaatcatcgaggcatgggggtccacactgcaatgtttttgtggaacaagcccttcagcggccagtagcatctgactttgagcctcagggtctgagtgaagccgctcgttggaactccaaggaaaaccttctcgctggacccagtgaaaatgaccccaaccttttcgttgcactgtatgattttgtggccagtggagataacactctaagcataactaaaggtgaaaagctccgggtcttaggctataatcacaatggggaatggtgtgaagcccaaaccaaaaatggccaaggctgggtcccaagcaactacatcacgccagtcaacagtctggagaaacactcctggtaccatgggcctgtgtcccgcaatgccgctgagtatccgctgagcagcgggatcaatggcagcttcttggtgcgtgagagtgagagcagtcctagccagaggtccatctcgctgagatacgaagggagggtgtaccattacaggatcaacactgcttctgatggcaagctctacgtctcctccgagagccgcttcaacaccctggccgagttggttcatcatcattcaacggtggccgacgggctcatcaccacgctccattatccagccccaaagcgcaacaagcccactgtctatggtgtgtcccccaactacgacaagtgggagatggaacgcacggacatcaccatgaagcacaagctgggcgggggccagtacggggaggtgtacgagggcgtgtggaagaaatacagcctgacggtggccgtgaagaccttgaaggaggacaccatggaggtggaagagttcttgaaagaagctgcagtcatgaaagagatcaaacaccctaacctagtgcagctccttggggtctgcacccgggagcccccgttctatatcatcactgagttcatgacctacgggaacctcctggactacctgagggagtgcaaccggcaggaggtgaacgccgtggtgctgctgtacatggccactcagatctcgtcagccatggagtacctagagaagaaaaacttcatccacagagatcttgctgcccgaaactgcctggtaggggagaaccacttggtgaaggtagctgattttggcctgagcaggttgatgacaggggacacctacacagcccatgctggagccaagttccccatcaaatggactgcacccgagagcctggcctacaacaagttctccatcaagtccgacgtctgggcatttggagtattgctttgggaaattgctacctatggcatgtccccttacccgggaattgaccgttcccaggtgtatgagctgctagagaaggactaccgcatgaagcgcccagaaggctgcccagagaaggtctatgaactcatgcgagcatgttggcagtggaatccctctgaccggccctcctttgctgaaatccaccaagcctttgaaacaatgttccaggaatccagtatctcagacgaagtggaaaaggagctggggaaacaaggcgtccgtggggctgtgactaccttgctgcaggccccagagctgcccaccaagacgaggacctccaggagagctgcagagcacagagacaccactgacgtgcctgagatgcctcactccaagggccagggagagagcgatcctctggaccatgagcctgccgtgtctccattgctccctcgaaaagagcgaggtcccccggagggcggcctgaatgaagatgagcgccttctccccaaagacaaaaagaccaacttgttcagcgccttgatcaagaagaagaagaagacagccccaacccctcccaaacgcagcagctccttccgggagatggacggccagccggagcgcagaggggccggcgaggaagagggccgagacatcagcaacggggcactggctttcacccccttggacacagctgacccagccaagtccccaaagcccagcaatggggctggggtccccaatggagccctccgggagtccgggggctcaggcttccggtctccccacctgtggaagaagtccagcacgctgaccagcagccgcctagccaccggcgaggaggagggcggtggcagctccagcaagcgcttcctgcgctcttgctccgtctcctgcgttccccatggggccaaggacacggagtggaggtcagtcacgctgcctcgggacttgcagtccacgggaagacagtttgactcgtccacatttggagggcacaaaagtgagaagccggctctgcctcggaagagggcaggggagaacaggtctgaccaggtgacccgaggcacagtaacgcctccccccaggctggtgaaaaagaatgaggaagctgctgatgaggtcttcaaagacatcatggagtccagcccgggctccagcccgcccaacctgactccaaaacccctccggcggcaggtcaccgtggcccctgcctcgggcctcccccacaaggaagaagcctggaaaggcagtgccttagggacccctgctgcagctgagccagtgacccccaccagcaaagcaggctcaggtgcaccaaggggcaccagcaagggccccgccgaggagtccagagtgaggaggcacaagcactcctctgagtcgccagggagggacaaggggaaattgtccaagctcaaacctgccccgccgcccccaccagcagcctctgcagggaaggctggaggaaagccctcgcagaggcccggccaggaggctgccggggaggcagtcttgggcgcaaagacaaaagccacgagtctggttgatgctgtgaacagtgacgctgccaagcccagccagccggcagagggcctcaaaaagcccgtgctcccggccactccaaagccacaccccgccaagccgtcggggacccccatcagcccagcccccgttcccctttccacgttgccatcagcatcctcggccttggcaggggaccagccgtcttccactgccttcatccctctcatatcaacccgagtgtctcttcggaaaacccgccagcctccagagcgggccagcggcgccatcaccaagggcgtggtcttggacagcaccgaggcgctgtgcctcgccatctctgggaactccgagcagatggccagccacagcgcagtgctggaggccggcaaaaacctctacacgttctgcgtgagctatgtggattccatccagcaaatgaggaacaagtttgccttccgagaggccatcaacaaactggagaataatctccgggagcttcagatctgcccggcgtcagcaggcagtggtccggcggccactcaggacttcagcaagctcctcagttcggtgaaggaaatcagtgacatagtgcagaggtagcagcagtcaggggtcaggtgtcaggcccgtcggagctgcctgcagcacatgcgggctcgcccatacccatgacagtggctgagaagggactagtgagtcagcaccttggcccaggagctctgcgccaggcagagctgagggccctgtggagtccagctctactacctacgtttgcaccgcctgccctcccgcaccttcctcctccccgctccgtctctgtcctcgaattttatctgtggagttcctgctccgtggactgcagtcggcatgccaggacccgccagccccgctcccacctagtgccccagactgagctctccaggccaggtgggaacggctgatgtggactgtctttttcatttttttctctctggagcccctcctcccccggctgggcctccttcttccacttctccaagaatggaagcctgaactgaggccttgtgtgtcaggccctctgcctgcactccctggccttgcccgtcgtgtgctgaagacatgtttcaagaaccgccatttcgggaagggcatgcacgggccatgcacacggctggtcactctgccctctgctgctgcccggggtggggtgcactcgccatttcctcacgtgcaggacagctcttgatttgggtggaaaacagggtgctaaagccaaccagcctttgggtcctgggcaggtgggagctgaaaaggatcgaggcatggggcatgtcctttccatctgtccacatccccagagcccagctcttgctctcttgtgacgtgcactgtgaatcctggcaagaaagcttgagtctcaagggtggcaggtcactgtcactgccgacatccctcccccagcagaatggaggcaggggacaagggaggcagtggctagtggggtgaacagctggtgccaaatagccccagactgggcccaggcaggtctgcaagggcccagagtgaaccgtcctttcacacatctgggtgccctgaagggcccttcccctcccccactcctctaagacaaagtagattcttacaaggccctttcctttggaacaagacagccttcacttttctgagttcttgaagcatttcaaagccctgcctctgtgtagccgccctgagagagaatagagctgccactgggcacctcgcgacaggtgggaggaaagggcctgcgcagtcctggtcctggctgcactcttgaactgggcgaatgtcttatttaattaccgtgagtgacatagcctcatgttctgtgggggtcatcagggagggttaggaaaaccacaaacggagcccctgaaagcctcacgtatttcacagagcacgcctgccatcttctccccgaggctgccccaggccggagcccagataccggcgggctgtgactctgggcagggacccggggtctcctggaccttgacagagcagctaactccgagagcagtgggcaggtggccgcccctgaggcttcacgccggagaagccaccttcccgccccttcataccgcctcgtgccagcagcctcgcacaggccctagctttacgctcatcacctaaacttgtactttatttttctgatagaaatggtttcctctggatcgttttatgcggttcttacagcacatcacctctttccccccgacggctgtgacgcagcggagaggcactagtcaccgacagcggccttgaagacagagcaaagcccccacccaggtcccccgactgcctgtctccatgaggtactggtcccttccttttgttaacgtgatgtgccactatattttacacgtatctcttggtatgcatcttttatagacgctcttttctaagtggcgtgtgcatagcgtcctgccctgccctcgggggcctgtggtggctccccctctgcttctcggggtccagtgcattttgtttctgtatatgattctctgtggttttttttgaatccaaatctgtcctctgtagtattttttaaataaatcagtgtttacattag

SEQ ID NO: 2097 - protein, 1148 aa, Homo sapiens
MGQQPGKVLGDQRRPSLPALHFIKGAGKKESSRHGGPHCNVFVEQALQRPVASDFEPQGLSEAARWNSKENLLAGPSENDPNLFVALYDFVASGDNTLSITKGEKLRVLGYNHNGEWCEAQTKNGQGWVPSNYITPVNSLEKHSWYHGPVSRNAAEYPLSSGINGSFLVRESESSPSQRSISLRYEGRVYHYRINTASDGKLYVSSESRFNTLAELVHHHSTVADGLITTLHYPAPKRNKPTVYGVSPNYDKWEMERTDITMKHKLGGGQYGEVYEGVWKKYSLTVAVKTLKEDTMEVEEFLKEAAVMKEIKHPNLVQLLGVCTREPPFYIITEFMTYGNLLDYLRECNRQEVNAVVLLYMATQISSAMEYLEKKNFIHRDLAARNCLVGENHLVKVADFGLSRLMTGDTYTAHAGAKFPIKWTAPESLAYNKFSIKSDVWAFGVLLWEIATYGMSPYPGIDRSQVYELLEKDYRMKRPEGCPEKVYELMRACWQWNPSDRPSFAEIHQAFETMFQESSISDEVEKELGKQGVRGAVTTLLQAPELPTKTRTSRRAAEHRDTTDVPEMPHSKGQGESDPLDHEPAVSPLLPRKERGPPEGGLNEDERLLPKDKKTNLFSALIKKKKKTAPTPPKRSSSFREMDGQPERRGAGEEEGRDISNGALAFTPLDTADPAKSPKPSNGAGVPNGALRESGGSGFRSPHLWKKSSTLTSSRLATGEEEGGGSSSKRFLRSCSVSCVPHGAKDTEWRSVTLPRDLQSTGRQFDSSTFGGHKSEKPALPRKRAGENRSDQVTRGTVTPPPRLVKKNEEAADEVFKDIMESSPGSSPPNLTPKPLRRQVTVAPASGLPHKEEAWKGSALGTPAAAEPVTPTSKAGSGAPRGTSKGPAEESRVRRHKHSSESPGRDKGKLSKLKPAPPPPPAASAGKAGGKPSQRPGQEAAGEAVLGAKTKATSLVDAVNSDAAKPSQPAEGLKKPVLPATPKPHPAKPSGTPISPAPVPLSTLPSASSALAGDQPSSTAFIPLISTRVSLRKTRQPPERASGAITKGVVLDSTEALCLAISGNSEQMASHSAVLEAGKNLYTFCVSYVDSIQQMRNKFAFREAINKLENNLRELQICPASAGSGPAATQDFSKLLSSVKEISDIVQR

SEQ ID NO: 2098 - DNA, 5322 bp, Homo sapiens
ctttccccttactccgctcccctcttttccctccctctcctccccttccctctgttctctcctcctcttcccctcccctcccccgtccggggcactctatattcaagccaccgtttcctgcttcacaaaatggccaccgcacgcgacacctacggtcacgtggcctgccgccctctcagtttcgggaatctgcctagctcccactaaggggaggctacccgcggaagagcgagggcagattagaccggagaaatcccaccacatctccaagcccgggaactgagagaggaagaagagtgaaggccagtgttaggaaaaaaaaaaacaaaaacaaaaaaaacgaaaaacgaaagctgagtgcatagagttggaaaggggagcgaatgcgtaaggttggaaaggggggcgaagaggcctaggttaacattttcaggcgtcttagccggtggaaagcgggagacgcaagttctcgcgagatctcgagaactccgaggctgagactagggttttagcggagagcacgggaagtgtagctcgagagaactgggacagcatttcgcaccctaagctccaaggcaggactgctaggggcgacaggactaagtaggaaatcccttgagcttagacctgagggagcgcgcagtagccgggcagaagtcgccgcgacagggaattgcggtgtgagagggagggcacacgttgtacgtgctgacgtagccggctttccagcgggtatattagatccgtggccgcgcggtgcgctccagagccgcagttctcccgtgagagggccttcgcggtggaacaaacactcgcttagcagcggaagactccgagttctcggtactcttcagggatgagtcatgtggcagtggaaaatgcgctcgggctggaccagcagtttgctggcctagacctgaactcttcagataatcagagtggaggaagtacagccagcaaagggcgctatattcctcctcatttaaggaaccgagaagctactagaggtttctacgataaagacagttcagggtggagttctagcaaagataaggatgcgtatagcagttttggatctcgtagtgattcaagagggaagtctagcttcttcagtgatcgtggaagtggatcaaggggaaggtttgatgatcgtggacggagtgattacgatggcattggcagccgtggtgacagaagtggctttggcaaatttgaacgtggtggaaacagtcgctggtgtgacaaatcagatgaagatgattggtcaaaaccactcccaccaagtgaacgcttggaacaggaactcttttctggaggcaacactgggattaattttgagaaatacgatgacattccagttgaggcaacaggcaacaactgtcctccacatattgaaagtttcagtgatgttgagatgggagaaattatcatgggaaacattgagcttactcgttatactcgcccaactccagtgcaaaagcatgctattcctattatcaaagagaaaagagacttgatggcttgtgcccaaacagggtctggaaaaactgcagcatttctgttgcccatcttgagtcagatttattcagatggtccaggcgaggctttgagggccatgaaggaaaatggaaggtatgggcgccgcaaacaatacccaatctccttggtattagcaccaacgagagagttggcagtacagatctacgaagaagccagaaaattttcataccgatctagagttcgtccttgcgtggtttatggtggtgccgatattggtcagcagattcgagacttggaacgtggatgccatttgttagtagccactccaggacgtctagtggatatgatggaaagaggaaagattggattagacttttgcaaatacttggtgttagatgaagctgatcggatgttggatatggggtttgagcctcagattcgtagaatagtcgaacaagatactatgcctccaaagggtgtccgccacactatgatgtttagtgctacttttcctaaggaaatacagatgctggctcgtgatttcttagatgaatatatcttcttggctgtaggaagagttggctctacctctgaaaacatcacacagaaagtagtttgggtggaagaatcagacaaacggtcatttctgcttgacctcctaaatgcaacaggcaaggattcactgaccttagtgtttgtggagaccaaaaagggtgcagattctctggaggatttcttataccatgaaggatacgcatgtaccagcatccatggagaccgttctcagagggatagagaagaggcccttcaccagttccgctcaggaaaaagcccaattttagtggctacagcagtagcagcaagaggactggacatttcaaatgtgaaacatgttatcaattttgacttgccaagtgatattgaagaatatgtacatcgtattggtcgtacgggacgtgtaggaaaccttggcctggcaacctcattctttaacgagaggaacataaatattactaaggatttgttggatcttcttgttgaagctaaacaagaagtgccgtcttggttagaaaacatggcttatgaacaccactacaagggtagcagtcgtggacgttctaagagtagcagatttagtggagggtttggtgccagagactaccgacaaagtagcggtgccagcagttccagcttcagcagcagccgcgcaagcagcagccgcagtggcggaggtggccacggtagcagcagaggatttggtggaggtggctatggaggcttttacaacagtgatggatatggaggaaattataactcccagggggttgactggtggggtaactgagcctgctttgcagtaggtcaccctgccaaacaagctaatatggaaaccacatgtaacttagccagactataccttgtgtagtttcaagaactcgcagtacattaccagctgtgattctccactgaaattttttttttaagggagctcaaggtcacaagaagaaatgaaaggaacaatcagcagccctgttcagaaggtggtttgaagacttcattgctgtagtttggattaactcccctcccgcctacccccatcccaaactgcatttataattttgtgactgaggatcatttgtttgttaatgtactgtgcctttaactatagacaactttttattttgatgtcctgttggctcagtaatgctcaagatatcaattgttttgacaaaataaatttactgaacttgggctaaaatcaaaccttggcacacaggtgtgatacaacttaacaggaatcatcgattcatccataaataatataaggaaaaacttatgcggtagcctgcattagggctttttgatacttgcagattgggggaaaacaacaaatgtcttgaagcatattaatggaattagtttctaatgtggcaaactgtattaagttaaagttctgatttgctcactctatcctggataggtatttagaacctgatagtctttaagccattccagtcatgatgaggtgatgtatgaatacatgcatacattcaaagcactgttttcaaagttaatgcaagtaaatacagcaattcctctttcaacgtttaggcagatcattaattatgagctagccaaatgtgggcatactattacagggaaagtttaaaggtctgataacttgaaaataggtttttaggagaattcatctacttagactttttaagtgcctgccataaatgaaattgaaatggtagaatggctgaccacagcaatgaccagccctcattagggccctggatgatttttggtctaataacgcatgctagtgttgatgttttttggtcagagggtatgaacaggaagaattaaatgcagcaggctttattttaaatgccgattcacattactctgttcaagctgcgttgagatgttaaactggcttactatagacttcgtaaaaatggctccagaaaagtaacaaactgaaatctttgagatcacacaggttggaaatatgtacataactgcacaaggtgtcaattctgctctacagtgcagttttagtcagttttagttgcataggtttccattgtatttatagtctgtttatgctaaatctggccaaagatgaacattgtccaccactaaaatgcctctgccactttgaattctgtgctaattttgtggccagaatgcggtgatcaaaacgctccatctttttacagtggcataggaagacggcaaaaatttcctaaagtgcaatagattttcaagtgtattgtgccttgttctaaaacttttattaagtaggtgcacttgacagtattgaggtcatttgttatggtgctatttcaattagtctaggtttaggcccttgtacattttgcccataactttttacaaagtacttcttttattgcacattcagagaattttatatatatgtcttgtgtgcgtgtccttaaacttccaatcttactttgtctcttggagattgttgaacgcagcttgtctaggaaggggatgggactagattctaaaatttatttgggaccatgggaatgatagttgggaagaaaactatttgcacacgacagatttctagatactttttgctgctagctttatgtaatatttattgaacattttgacaaatatttatttttgtaagcctaaaagtgattctttgaaagtttaaagaaacttgaccaaaagacagtacaaaaacactggcacttgaatgttgaatgtcaccgtatgcgtgaaattatatatttcggggtagtgtgagcttttaatgtttaagtcatattaaactcttaagtcaaattaagcagacccggcgttggcagtgtagccataactttctgatgttagtaaaaacaaaattggcgacttgaaattaaattatgccaaggttttgatacacttgtcttaagatattaatgaaacacttcaaaacactgatgtgaagtgtccagattctcagatgtttgttgtgtggattttgtttagttgtgtgtttttttttttttcagtgaatgtctggcacattgcaatcctcaaacatgtggttatctttgttgtattggcataatcagtgacttgtacattcagcaatagcatttgagcaagttttatcagcaagcaatattttcagttaataaggtttcaaaaatcatgtaaggatttaaacttgctgaatgtaaagattgaacctcaagtcactgtagctttagtaattgcttattgtattagtttagatgctagcactgcatgtgctgtgcatattctgattttattaaaataaaaaaaaaa

SEQ ID NO: 2099 - protein, 662 aa, Homo sapiens
MSHVAVENALGLDQQFAGLDLNSSDNQSGGSTASKGRYIPPHLRNREATRGFYDKDSSGWSSSKDKDAYSSFGSRSDSRGKSSFFSDRGSGSRGRFDDRGRSDYDGIGSRGDRSGFGKFERGGNSRWCDKSDEDDWSKPLPPSERLEQELFSGGNTGINFEKYDDIPVEATGNNCPPHIESFSDVEMGEIIMGNIELTRYTRPTPVQKHAIPIIKEKRDLMACAQTGSGKTAAFLLPILSQIYSDGPGEALRAMKENGRYGRRKQYPISLVLAPTRELAVQIYEEARKFSYRSRVRPCVVYGGADIGQQIRDLERGCHLLVATPGRLVDMMERGKIGLDFCKYLVLDEADRMLDMGFEPQIRRIVEQDTMPPKGVRHTMMFSATFPKEIQMLARDFLDEYIFLAVGRVGSTSENITQKVVWVEESDKRSFLLDLLNATGKDSLTLVFVETKKGADSLEDFLYHEGYACTSIHGDRSQRDREEALHQFRSGKSPILVATAVAARGLDISNVKHVINFDLPSDIEEYVHRIGRTGRVGNLGLATSFFNERNINITKDLLDLLVEAKQEVPSWLENMAYEHHYKGSSRGRSKSSRFSGGFGARDYRQSSGASSSSFSSSRASSSRSGGGGHGSSRGFGGGGYGGFYNSDGYGGNYNSQGVDWWGN

SEQ ID NO: 2100 - DNA, 3408 bp, Homo sapiens
ctttccccttactccgctcccctcttttccctccctctcctccccttccctctgttctctcctcctcttcccctcccctcccccgtccggggcactctatattcaagccaccgtttcctgcttcacaaaatggccaccgcacgcgacacctacggtcacgtggcctgccgccctctcagtttcgggaatctgcctagctcccactaaggggaggctacccgcggaagagcgagggcagattagaccggagaaatcccaccacatctccaagcccgggaactgagagaggaagaagagtgaaggccagtgttaggaaaaaaaaaaacaaaaacaaaaaaaacgaaaaacgaaagctgagtgcatagagttggaaaggggagcgaatgcgtaaggttggaaaggggggcgaagaggcctaggttaacattttcaggcgtcttagccggtggaaagcgggagacgcaagttctcgcgagatctcgagaactccgaggctgagactagggttttagcggagagcacgggaagtgtagctcgagagaactgggacagcatttcgcaccctaagctccaaggcaggactgctaggggcgacaggactaagtaggaaatcccttgagcttagacctgagggagcgcgcagtagccgggcagaagtcgccgcgacagggaattgcggtgtgagagggagggcacacgttgtacgtgctgacgtagccggctttccagcgggtatattagatccgtggccgcgcggtgcgctccagagccgcagttctcccgtgagagggccttcgcggtggaacaaacactcgcttagcagcggaagactccgagttctcggtactcttcagggatgagtcatgtggcagtggaaaatgcgctcgggctggaccagcagtttgctggcctagacctgaactcttcagataatcagagtggaggaagtacagccagcaaagggcgctatattcctcctcatttaaggaaccgagaagctactagaggtttctacgataaagacagttcagggtggagttctagcaaagataaggatgcgtatagcagttttggatctcgtagtgattcaagagggaagtctagcttcttcagtgatcgtggaagtggatcaaggggaaggtttgatgatcgtggacggagtgattacgatggcattggcagccgtggtgacagaagtggctttggcaaatttgaacgtggtggaaacagtcgctggtgtgacaaatcagatgaagatgattggtcaaaaccactcccaccaagtgaacgcttggaacaggaactcttttctggaggcaacactgggattaattttgagaaatacgatgacattccagttgaggcaacaggcaacaactgtcctccacatattgaaagtttcagtgatgttgagatgggagaaattatcatgggaaacattgagcttactcgttatactcgcccaactccagtgcaaaagcatgctattcctattatcaaagagaaaagagacttgatggcttgtgcccaaacagggtctggaaaaactgcagcatttctgttgcccatcttgagtcagatttattcagatggtccaggcgaggctttgagggccatgaaggaaaatggaaggtatgggcgccgcaaacaatacccaatctccttggtattagcaccaacgagagagttggcagtacagatctacgaagaagccagaaaattttcataccgatctagagttcgtccttgcgtggtttatggtggtgccgatattggtcagcagattcgagacttggaacgtggatgccatttgttagtagccactccaggacgtctagtggatatgatggaaagaggaaagattggattagacttttgcaaatacttggtgttagatgaagctgatcggatgttggatatggggtttgagcctcagattcgtagaatagtcgaacaagatactatgcctccaaagggtgtccgccacactatgatgtttagtgctacttttcctaaggaaatacagatgctggctcgtgatttcttagatgaatatatcttcttggctgtaggaagagttggctctacctctgaaaacatcacacagaaagtagtttgggtggaagaatcagacaaacggtcatttctgcttgacctcctaaatgcaacaggcaaggattcactgaccttagtgtttgtggagaccaaaaagggtgcagattctctggaggatttcttataccatgaaggatacgcatgtaccagcatccatggagaccgttctcagagggatagagaagaggcccttcaccagttccgctcaggaaaaagcccaattttagtggctacagcagtagcagcaagaggactggacatttcaaatgtgaaacatgttatcaattttgacttgccaagtgatattgaagaatatgtacatcgtattggtcgtacgggacgtgtaggaaaccttggcctggcaacctcattctttaacgagaggaacataaatattactaaggatttgttggatcttcttgttgaagctaaacaagaagtgccgtcttggttagaaaacatggcttatgaacaccactacaagggtagcagtcgtggacgttctaagagtagcagatttagtggagggtttggtgccagagactaccgacaaagtagcggtgccagcagttccagcttcagcagcagccgcgcaagcagcagccgcagtggcggaggtggccacggtagcagcagaggatttggtggaggtggctatggaggcttttacaacagtgatggatatggaggaaattataactcccagggggttgactggtggggtaactgagcctgctttgcagtaggtcaccctgccaaacaagctaatatggaaaccacatgtaacttagccagactataccttgtgtagtttcaagaactcgcagtacattaccagctgtgattctccactgaaattttttttttaagggagctcaaggtcacaagaagaaatgaaaggaacaatcagcagccctgttcagaaggatcatgctcatctgtggagcaagtgcccccatgaaatgccatattttgtgaagaaagtgcatgcaggaatattcagggagtccagcatgtagtcatggcagccttaggtatttgagaccgaccaaccctcctgatgaagacaaccataactcatgcagaacttggagcgtgatgcccagaagtgtgtgaactggtctgtgaccacaaagatgagaaccgcatgctgagattggtggaatggagatttcagtgagcctacatgcagatgacatggtgacacccgtgcccagcctgagctgttttcttctggccctcttattacatgagaaaaataaacacctatgcaccttggcctcaaaaaaaaaa

SEQ ID NO: 2101 - DNA, 3748 bp, Homo sapiens
cttttgatttcaagagttaggagctcgagaaccgtttggcaatatgtacgacgcggatgaggatatgcaatatgatgaggatgatgatgaaatcaccccggatttgtggcaagaagcatgctggattgtaatcagttcctattttgacgagaaaggcttggttagacaacagctggattcttttgatgagtttattcagatgtctgttcaaagaattgtggaagacgctcctcctatagacctacaggctgaagctcagcatgctagtggagaagttgaagaaccgccacgatatttgctgaagtttgaacaaatttatctttccaagcctacccattgggaaagagatggtgctccttcaccaatgatgcccaatgaagctagattaaggaatctcacgtattctgctccgctttatgttgatataacaaaaacagtcattaaagaaggtgaagaacaacttcagactcagcatcagaaaacttttataggaaaaattccaattatgttgcggtcaacttactgccttttgaatggcttgacagatcgtgatctttgtgagttaaatgaatgccctttggatcctggtggctatttcattattaatggatcagaaaaggttctgattgcccaagagaaaatggcaacaaacacagtttatgtgtttgccaaaaaggattctaaatatgcctacacaggagagtgtagatcatgtcttgagaattcttcccgacccaccagtactatatgggttagcatgctggcaagaggaggacagggtgccaagaagagtgctattggtcagcgcattgtggcaactctaccatatatcaagcaagaagttcccatcattattgtgttcagagcattaggttttgtgtccgacagagatattttagaacatattatttatgattttgaagatccagagatgatggaaatggttaaaccttctctcgatgaagcttttgtcatccaagaacagaatgttgcactaaatttcattggttcacgaggagcaaagcctggtgttactaaagagaaaagaattaaatatgcaaaggaagttttacaaaaagaaatgctccctcatgttggtgtcagtgatttttgtgagaccaaaaaagcctatttcttgggatacatggttcataggttacttctggcagctttgggtagaagagaactagatgacagagatcactatggaaacaagagattggatcttgctgggccgctgcttgcattcttatttagaggtatgtttaagaatttgcttaaagaagtgcggatctatgcacagaaatttattgatcgaggaaaggattttaacttggagttggcaattaaaacacggatcatatctgatggcctaaaatactctttagctactggaaactggggtgatcaaaagaaagctcatcaagccagagctggagtatctcaggtgttaaaccgcctgacttttgcgtctactctttctcacctgcgtcgtttaaattctcctattggtagagacggcaagctagcaaaaccaagacagttgcataatacgttgtggggaatggtgtgtcctgccgagaccccagagggccatgctgtaggacttgtgaagaatttagccttgatggcgtatatttcagttggatctcaaccatctccaattctggaatttttagaagaatggagtatggaaaatttagaagaaatttctcctgcagctattgctgatgcaaccaagatttttgttaatggctgctgggttggaatacataaagatcccgaacaacttatgaacaccctaaggaaattgagacgtcagatggacatcattgtgtctgaagtttctatgatcagagatattcgagagagggagattcggatctatacggatgcaggccgtatttgtagaccacttctgattgtggaaaaacaaaagctacttttgaagaagaggcatattgaccaattgaaagagagagaatataacaactatagttggcaggatcttgtggccagtggggtagtggagtatattgataccctggaagaagaaacagtgatgcttgcaatgactccagatgatttacaggagaaagaagtagcttattgttccacatatacacactgtgagattcatccctcaatgatccttggtgtctgtgcatctattattccctttcctgatcataaccagtcccctagaaacacataccagtctgctatgggtaagcaggctatgggagtttacatcaccaacttccatgttcgcatggacacattggcccatgttctctattatcctcaaaagccacttgtgactacacggtctatggaatatctacgatttagagagctgccagcaggcatcaactcaattgtggccattgcatcatacactggatataatcaggaagactctgttatcatgaatcgttcagctgtagaccgcggcttcttcaggtctgttttctatcgctcatacaaagaacaggagtctaaaaaaggatttgatcaagaagaagtttttgagaagcctacacgtgaaacatgccagggcatgaggcatgccatttacgacaagctggatgatgatggtttgatagctccaggggttcgtgtatcaggagatgatgttattataggcaaaacagtcaccttgcctgaaaatgaagatgaattggagagcaccaatagacgctataccaagagagactgtagcacttttctcagaactagtgagacgggcattgtggatcaggttatggtaactctcaatcaggaaggatataaattttgtaaaataagggtacgctctgttaggattccacagattggagacaaatttgctagtcgacatggtcaaaagggtacttgtggtattcagtatagacaagaggatatgcctttcacctgtgaaggtatcacccctgatatcatcatcaatccccatgccatcccctctcgtatgactattggtcacttaattgaatgccttcaagggaaggtatcggctaacaagggtgaaattggtgatgccactccatttaatgatgctgttaacgtgcagaagatttctaatcttttatctgattatggctatcatctcagaggaaatgaggtcctgtacaatgggttcactggtcgaaaaatcacatcacaaatatttattggccccacttattaccagcgtttgaagcatatggtggatgataagattcactctcgtgctaggggacctattcagatcctcaatagacagcccatggagggtagatctcgtgatggtggcctgcgttttggagaaatggaacgagattgtcagattgcccatggagcagcccagtttttaagggaaagattgtttgaggcatcagatccatatcaggttcatgtttgcaatctttgtggaataatggcgattgccaacaccaggacccatacatatgaatgcaggggctgccgcaataaaacccagatttctttggtgcgaatgccttacgcatgcaaactattgtttcaggaacttatgtctatgagtattgcaccgcgaatgatgagtgtttagctattttacaggagtcaacaagataattaaatatcttggtgtcttgtttctattgtgtggctttataaaaatgacaaatatgtactgtgttgtgataaaaagtattttatttgtttaatgatatgcatgcttttcttctgtaaatatataataaatttttgtagatagtcttgatgtgtg

SEQ ID NO: 2102 - protein, 1174 aa, Homo sapiens
MYDADEDMQYDEDDDEITPDLWQEACWIVISSYFDEKGLVRQQLDSFDEFIQMSVQRIVEDAPPIDLQAEAQHASGEVEEPPRYLLKFEQIYLSKPTHWERDGAPSPMMPNEARLRNLTYSAPLYVDITKTVIKEGEEQLQTQHQKTFIGKIPIMLRSTYCLLNGLTDRDLCELNECPLDPGGYFIINGSEKVLIAQEKMATNTVYVFAKKDSKYAYTGECRSCLENSSRPTSTIWVSMLARGGQGAKKSAIGQRIVATLPYIKQEVPIIIVFRALGFVSDRDILEHIIYDFEDPEMMEMVKPSLDEAFVIQEQNVALNFIGSRGAKPGVTKEKRIKYAKEVLQKEMLPHVGVSDFCETKKAYFLGYMVHRLLLAALGRRELDDRDHYGNKRLDLAGPLLAFLFRGMFKNLLKEVRIYAQKFIDRGKDFNLELAIKTRIISDGLKYSLATGNWGDQKKAHQARAGVSQVLNRLTFASTLSHLRRLNSPIGRDGKLAKPRQLHNTLWGMVCPAETPEGHAVGLVKNLALMAYISVGSQPSPILEFLEEWSMENLEEISPAAIADATKIFVNGCWVGIHKDPEQLMNTLRKLRRQMDIIVSEVSMIRDIREREIRIYTDAGRICRPLLIVEKQKLLLKKRHIDQLKEREYNNYSWQDLVASGVVEYIDTLEEETVMLAMTPDDLQEKEVAYCSTYTHCEIHPSMILGVCASIIPFPDHNQSPRNTYQSAMGKQAMGVYITNFHVRMDTLAHVLYYPQKPLVTTRSMEYLRFRELPAGINSIVAIASYTGYNQEDSVIMNRSAVDRGFFRSVFYRSYKEQESKKGFDQEEVFEKPTRETCQGMRHAIYDKLDDDGLIAPGVRVSGDDVIIGKTVTLPENEDELESTNRRYTKRDCSTFLRTSETGIVDQVMVTLNQEGYKFCKIRVRSVRIPQIGDKFASRHGQKGTCGIQYRQEDMPFTCEGITPDIIINPHAIPSRMTIGHLIECLQGKVSANKGEIGDATPFNDAVNVQKISNLLSDYGYHLRGNEVLYNGFTGRKITSQIFIGPTYYQRLKHMVDDKIHSRARGPIQILNRQPMEGRSRDGGLRFGEMERDCQIAHGAAQFLRERLFEASDPYQVHVCNLCGIMAIANTRTHTYECRGCRNKTQISLVRMPYACKLLFQELMSMSIAPRMMSV

SEQ ID NO: 2103 - DNA, 1836 bp, Homo sapiens
ggcgctgggcggctgcggcgcgcggtgcgcggtgcgtagtctggagctatggtggtggtggcagccgcgccgaacccggccgacgggacccctaaagttctgcttctgtcggggcagcccgcctccgccgccggagccccggccggccaggccctgccgctcatggtgccagcccagagaggggccagcccggaggcagcgagcggggggctgccccaggcgcgcaagcgacagcgcctcacgcacctgagccccgaggagaaggcgctgaggaggaaactgaaaaacagagtagcagctcagactgccagagatcgaaagaaggctcgaatgagtgagctggaacagcaagtggtagatttagaagaagagaaccaaaaacttttgctagaaaatcagcttttacgagagaaaactcatggccttgtagttgagaaccaggagttaagacagcgcttggggatggatgccctggttgctgaagaggaggcggaagccaaggggaatgaagtgaggccagtggccgggtctgctgagtccgcagcactcagactacgtgcacctctgcagcaggtgcaggcccagttgtcacccctccagaacatctccccatggattctggcggtattgactcttcagattcagagtctgatatcctgttgggcattctggacaacttggacccagtcatgttcttcaaatgcccttccccagagcctgccagcctggaggagctcccagaggtctacccagaaggacccagttccttaccagcctccctttctctgtcagtggggacgtcatcagccaagctggaagccattaatgaactaattcgttttgaccacatatataccaagcccctagtcttagagataccctctgagacagagagccaagctaatgtggtagtgaaaatcgaggaagcacctctcagcccctcagagaatgatcaccctgaattcattgtctcagtgaaggaagaacctgtagaagatgacctcgttccggagctgggtatctcaaatctgctttcatccagccactgcccaaagccatcttcctgcctactggatgcttacagtgactgtggatacgggggttccctttccccattcagtgacatgtcctctctgcttggtgtaaaccattcttgggaggacacttttgccaatgaactctttccccagctgattagtgtctaaggaatgatccaatactgttgcccttttccttgactattacactgcctggaggatagcagagaagcctgtctgtacttcattcaaaaagccaaaatagagagtatacagtcctagagaattcctctatttgttcagatctcatagatgacccccaggtattgtcttttgacatccagcagtccaaggtattgagacatattactggaagtaagaaatattactataattgagaactacagcttttaagattgtacttttatcttaaaagggtggtagttttccctaaaatacttattatgtaagggtcattagacaaatgtcttgaagtagacatggaatttatgaatggttctttatcatttctcttccccctttttggcatcctggcttgcctccagttttaggtcctttagtttgcttctgtaagcaacgggaacacctgctgagggggctctttccctcatgtatacttcaagtaagatcaagaatcttttgtgaaattatagaaatttactatgtaaatgcttgatggaattttttcctgctagtgtagcttctgaaaggtgctttctccatttatttaaaactacccatgcaattaaaaggtacaatgcaaaaaaaaaaaaaaaaa

SEQ ID NO: 2104 - protein, 261 aa, Homo sapiens
MVVVAAAPNPADGTPKVLLLSGQPASAAGAPAGQALPLMVPAQRGASPEAASGGLPQARKRQRLTHLSPEEKALRRKLKNRVAAQTARDRKKARMSELEQQVVDLEEENQKLLLENQLLREKTHGLVVENQELRQRLGMDALVAEEEAEAKGNEVRPVAGSAESAALRLRAPLQQVQAQLSPLQNISPWILAVLTLQIQSLISCWAFWTTWTQSCSSNALPQSLPAWRSSQRSTQKDPVPYQPPFLCQWGRHQPSWKPLMN

SEQ ID NO: 2105 - DNA, 117813 bp, Homo sapiens
gatcaatttttaatattctacatcgtttaatttttgatgcttacaaaaagatcctgggttatctctcagatatggaaactggactaaaccattttctataccctgcctctcccacaataacttaatatagatatatgcttaaagtgaatatcaattaatcttccgtcttgaagattaaaatatgagtaaggagtacagtttcacttttgcagatggaagagctgacgatgggacagccagcgctggcacggccttgataacatgcacgaaccaggctctggtgcactttagaacctgtgagcgacttgctgccttcaccggccttccagccagccaactggcttcgacaccaatatcagggctaagtctatcagttgacttgacaattctctagggacaggtaggaaacaggatatagtggcatttattcactcaacaaatatttattgagcacttccattccaattgcaattaaacattagcgataggaaactcaaggaaaaacaccatggcgctcccaccttcaagggtactctgtatactttcacaccaacgaaaggacaaacagtctgaaggaagaggaatgttatcctaaatttatatagactgcagagattaagtgcaaagctactatttttagataaaatccttctcagacaagaccatagtaaaaggattaaaggacagtggttgaatttcaatgttaaatggtatctcatgggaatatgaaagactttgagactggcaatggctttagtactaggactatgaggattgtacccttagggatacatcacactaggacttggctttggatccaaagaaagcgcccaggaaagcctaaagggagaggtaccagggctggagaaaagtctttctcagcagcagccaaagatgggtgaaaataaatggtaattcctcctgggaacccaacagccaaaacatagtggctttcaaaaaatatttttgggaagtcataaatcaatatgatatcaaggaataagattacttcaaatatgactataccaagaagcaagactttctactaaagtttagccatcattctgaaatgaacatactgtgaaacatttagctcctgtcttcacagaaaagaatcatttactcgatgttctgcataaaactggggcttggaattctgctgtataatcctcatactacttttatattccatttctctctctaacctgggactgtgagctgtttgaagcaggaatggtatcttcactcttgtctacccagaggccaggcatggtattcagcccaatcactttagcacataaatactgcttgaatgaataaaatcacttcgttattttgaaagttctttgactcgtatttggaattttaaaaaatcagcatgagttctaaattggatttgtctattgaaacaattgacagttcagtctcaaaattcctatatattttaaatctacttccttaatcatcaacccctattaaattttctgtgatatgaaataacttaggtgaaatttactgtgtccacaaagtggaagcacatatacaatggaaaaaaaattagcttaacaacaacaaaaaacttcaccagaatgaccagtgtttaaaaaacaaaacaaaaaataatctgtagtagtttgggatgtttcctatgatgaaagaaaacagacaaaaaactgacatggccagcagccttgctaaagataacttgtctccataagtacacatatgccaattcaacctggcataatacacatgcagaactgaaatcttcatttggttaatgaccatagagtttatagccctactgaaaaacacatacactcctcaggagcaggttctgttttccagtgtgctttgcaatacaccaaccatttagatacttggatgcttttgacagtcagtccctagtgcaactgtggaaagcaagcctatattgctctgagagaaaaagaaaacaaagaacaaaacaaaacaaaaatagcacactcatgtatacttatcaagttatagttcttgactcgtggcttctcacaaatattttacttttaaattccttagagatgttgaagagcgtaacttaaagagaggtgggagtaaaacacttggacattttgtctaagaggctaaaattgtagaataaaagatgtcttccgttaaaatatcctggctttactgtctacccagaccacgtatttgaagcttgccggttacaatagcaatttctgcccagcaggtcactaagggagtatttttgagaacatgtactcaaggtatgctgatcccccttgatttctcattgtaagagattcatctattctattacaccactttaccatatctgactaacataaatttgaggcacaagtttggttttcgtacattttgatatacacagaaatactgattgcatcatttaattaacaccaattaagcactcagaaatttgacggtggtgctaattcatcaatatgagtaacctgcaagtgcaaagcatgcgtgatgtctgttggggtgctttctagtgctttttatccccctaatatttgatttttatagccattgatatacaatagggtaacacaacaacccttttctatatgtggcctacaattttttcctctggtatttctgtattttaattccattacagaattctacagtttctacttttaagaaatattcatgagaaacaggtagtaattcaaactgaaaaggagtggcacgagagcctcctgtgcataaaactcttcaggcattcctcacagcctgctgagggcgctcagcaagaaggctcatgttgacactattaccaaattcttggcaatcaacctgctggaatagatacagatctcacagcaggcatgacttttatcacctttggctttagaagaatgacaaatgaaaaaatacttaagaaatgggagggggtgtggtatccaacttcatttttcaagttcgtatttagactaaatttacatctgtctctatttttcttttccattagctctgttcaatgccgttttgaaggcagcagtactcctctttgaactgaggggagaaagtggtaaggaaagcaggagcgtcccaatatttcccttaataacatgaactattcccagttcactgcgtatgtacttaaatgtggggttccatagataaaactaaggtgatccacccgccttggccgagcccttgcacctggcttacttcttttagatcgggctggacactcagctttctggttcaataacttttctttgttacatcctctctaggatggagctaaggatggtggtggtgattctttagcaaattgtaacaagcattttagaaaaactgggtcacacattttgctgtggtttgggtggagtctgtccccaggaaaactcctgttgaaatttgatccccagtgtggaagtgttgggaggtgggggctgatagaaagtgcgtgggttactgaggcggatccctcatgaataggttaacggccgccctcgggatggggcgttttccctcttgcagggatgcatgagttcctaggagactgggttgagtctggcctcctcttgctttctcttgccttgtgatctctgtgcacctggtccacactcccctttggctttacaccatgagttaaagcagcatgaggctgtcaccagatgcagctgcccaatcttgaactttccagccaccagaaatgtgggccaaataaaccttttttcatcattacccagcctcaggcgttctgctatagcaacactaaacgcactaacacacttctctgaagaattcaaggtattcacacggccgtctgggtatttattagcttaatgggacgtacattattggtgctgtccacatcagtgatgttttccttgtagagtacaaaatttctctgccaaataggctcatatggaattcagtgaaagggacataaagtcaagctaacactacattttttctttcatttctctccataccgggttgctttaatcctaagagtaacgggaggtttctaattcattttagactcaacaccaatacttactgatgacagaccacttctggaagtgatatcaaacttttccactttatttcatttaaaaccaactttactgctagtagcccccgaactgatgcctgaatgatgttctggatgaggcatatgtatgtttgatttgctaatctagcttttttccctgagactcacatttaactcttagtttcaggacttgcattgcgttccgctcatgagctttaaagttttacattttcccgccacctaggaatctagaaatctagagtcagtttaaattctggacaactttttaatgctgttttacctcagtgagaaagcaatgaacaaaagcatattaacatattatcatttaattaaaatgtattcaaaccaactttcaacttgtactaccagtatgtcttaattttataaatcaatcattgaaaacaatgaatgtaataagggaagcactaaaattcaggtttcaagcacagccaaggcactttcctcattcccaagcttgacagttctaaggtaaaggagtgaacataaaatctttagtatcaactcaaatagttctgcaagaattgtggattcacttgcaaatattttcttctccttttgctcttcatcatttttcttgtaataacctttatattaatatccagttaagtaaccaatgaacatagtatagcatactttaaaacagactacagtagattttcatcccaattttaggagacactccttaaaattggaactgttgtgtagcatgtaaaaataagcgctttcagagggtatacagttcacaaaatagcattaaactggaataatctaattttaataaacattttttggggaagatatgatgccaaacttaccatgactattattttagacatatgtatagtacaactattagatggtcaattagtttaactgctttctaaagaccacaaattactgtataaaaggggtaatcattaaaaattacgttaggaaggaaatccaaatgtctagtgcttccattcacttaagcacttctgtaaacataagaacacaatgtgcatgagtaacagtgactaaaatattcatctgatttttcaggaggaaaaacatcaaaactgattttatgtcaccccttttgagaagctggtttgaaagtcagatcaccatcctggaccaggaaacaagcacagatatccacaggagccagagagccggggggaaggattaaagcaagagaagagtaagaaaatcaacagcccaagtgtgacactagagacaggaaggagtggtggggtggcgactaaccagggaatacttggcttcaggggaccgtttaattactcagtttcagctggtgcctactatgttaagaatacatgtttgggctttctagacactttgatctttcaggaagagcagattttgtgaagaattaaaaaaaaaatctaatatgggcaatcagacttttttttttttaagtctagtgttgccacttttaaattatggcaagtagtttaaaaagcaaaacaccgtataagccaaaccaaacacacctttgggctgctagtctgcacgacggtgctatggatcctgcaactgtgggctactttaacaaagcattctgttgaggaaaactaaggttccggtgagcaagaggaaaggagccagaggtacttggagatgatataaataagaaagactggaaaacttaaggtacaaggagtcataacatttagatgttaaagactcgtaaaggtttcacactactggaaatgatttttttaataaaccaattctgttcaacaggttaatgacactagtccttttcatgaagctgatgaaatcaagttttggtcagcattcctttcttcttacattcgaaaactacataaaaactgtaccatttattaaagataaaaaaatgttttggatgcacagtccaactatggaacactgtagcagtctgtttactaatctcccttaatggctaaaatcagagtgaatgttatgctcattttctaatgttataataactccagaatgtcaaattcttacattttcttttaaatagtgttgaaagcctcaataaaattgaaagtgtgcgttctttattctcatattgatacatgcattttctgggggtggaggataagcagcactttccagctgcagttggcttgagaggatgaagcacatgcactttttccagttggtttattgcatttcatgtacggtcatgcagttctccgttcacatgtgacctgtgaacacctatttcgactatatatatatatatacacaatttccacagtaaaattttaaatgtttcatacataccactacaatataaaccataaaagatatatttggtaataaaaacttaatagcacttttaagttataaattaacttttaccctggaagctgagatcttcccacaatgtggtgtcttttgccaagaagaggcaacaacattataatgtggaatcaacactgtggctgccctttgctgcacctatcgcctccttctactatgaattaattcattcgccttctcccccaccccctggcaattagtgcagcagaaacacagaaacgagaggactgtgctgaggttaaccagtttgattccacattgaaggcacgagtgcatataatgttggtaaatctcttcatatcaaaggcatctcaatttagatcacttaaactacagataaaattagatgtgtagcacatatttctaaaatattgtccatattttttccattttaaataaaggtattaaggaattcgtgacaatgtaaaaaactactctatgcacttagaaaaattgtgaattcgaaaagttggagaataatttttgctaaataaataatcatttggcagtaagttctattctacctaaaataatttgcttgaaatgctgtaacagctacttcttatcaaggaataaagacaggcatcacatcctggtcaaacatgcaaaaccactcccaccccaccccatcctaaaactaaagaaaccttaggctgtcacacgtgaaagtgttatgacatatatatatacacacacgtatatatatgaagagtcttgatttggtagtgagcaatttcatttaaacctatcgtttgcttttggcacactaaaaaattcagatccttatgtagtgtttagaaaaccataaccagacaccgattgtgtgtacgtatgcacatcctggttttatgggcagggtgccttcgtgacctcttacacctggagctactgcactggtgcgtatgggagtaactactttcatgttaagttttccctgacattttgcctaaaggaaaagtttaaggacattaatttcaccaacttcttgactgaaagctcagctttcaactgttttgtcaaatagtttcaatcaatcaactgactctagaattttactattcttggaatttggtagtttcatgtttaatattgtaacctgtataaaaatgaaatctgtaatgttattttcgccttttaaaacttttttacatttcctacataaaaggcagcaatgacataattatacataaagtacccttaactgaaaatgagatgaggctgcattcataggcttcagagaatagtaaattgcatagaaattcatcaatttaagttacatggtaccatgacaacttgtatattagcagcttgacagacagcttcgaattttcacagactactacatgaactgttatggcaacggaaacttttacaaatagtagcatgttaaaagacctgtccacctaacagtacactacccaccgctcccatcagagacatgacacggtttgtttacatgatccaaatgaccatctcaatggtgattcgctgttatcactcacatcagctaacactactctgtgtatttatatgtgtgtatacatatttatgaaatgagaatacctggacagtctgattggttaacagcgtattggtacagttttgtcttctattacatgtcattcatttcagccctcaattttagaactctaaataaataaaatgtaatttacaaagataaattgttatttacaaatgcaaaaattcatcctgaggattttggtatctaggagaactgtttcacagaaaaaagcaagtatcaatctgtgaaataaaaatgcaccttgagttaaactaaataattcataattacaggttaatttacccaagttccagccaagaaaagcatgaagatatttaagaaatcttaaattgatttgcatgcaagaaattaatcacatacaacttttcaaatcccaatgttattcccccttaaacttcttgtttaatgttttagtctgactgtatttgtaaagtaggtgacagagaaaaaaatacctgaggaaagctcagtaacgtgctgagggttcttttcctcactggaaagcagcggggcttcaggccaccatgagaaacagccagtgggcctttgactttacccaagttaagctcccctaataggagtagttagctaaacaagttcaacgctttccaaaggaaaaaggtcaagttaaaacaaaaatctaaataaaggtaaaatatcaacagtttctctgctttacaatgtgaccataaaattacttatttacagaaattaaaagaaatggttcaacaaagaatcaaactggtttctccaggtatataccatgacaatgtatctttttactcgatgctgtgagcagacagtgattattttggagaaggaaaaataaggtgtggaattagtaatgcagatgctgaaaggcaagtggcaagagaagaatgcctcaaacaaaggctactttgttcccatctctactgcacctacacccacacccgccccggcccccaagctaaaagaccagaataaccaaagccattttaacagtagtgtgcaaaactgtcagctgacaaacaacataaaaacaagtcacactatgttatctgtggtcacgttcttcagggttagtccagtaactcaagactttacattcttttgtctttatttgtttattttaattaaacatataaaggttaataaacagacaaagtccagagttagtaggttggtattataacatttattaaaataatgctgtgggttaatagaaacagcaaagaaccaaagaattaaaatgcaagctatgtaaaatcccaactaaaacccaaaagtgtctaatgtattcattcattagctaactaaaagcccaaaaaagacaagacacccaatataataaagtactgcaaaacaattggcaattttcagttatcaaaattgtggattttgcattttgtatccttttctcaatcaagaaaaaaattctttttgaatgttatataacatacatataaaacaagatagaaaaatacattataaacttgtaacaatggctgtaaatacattatcttacatgtttctcataggcaataggttggttatggtacatacatagcatgaaactaagataataaagaatagacaaaaatacatgtcagctgtacgataacatacaagcgacactcccatctacccacgctaaaaaattacataatactgtcagaaaaaaagtcttaaaaactacatattttaataagaaataaattcaataaagaatgataatactgagaaccaaggcattcagagatttcaaaagtcatgcttttttcagttgatccaaaattttgtcaaccaagttttcaaaagtttgttcagagccaacattccctataaatgtcacacatttattatttcatacatttactttcttccccataaaagacctttgataaacatctaaaatgtccaggtataacatagttgagatgaaactggatcaaatactggtattgtttttaacaactatcacctcaagtgtttgagtgtcgcaaatttattcaaccaaccaaacaatataaaaatcaaaatggcacagcatatattgtaaataaatcaaaactgtatgtgtaacagaaagacaaagcagtggcatattaaaccaaagctagctggatacaaaacaatgaatgtctattgcatagtaaataaactgacaacggtttccaagtgagacaagatggtgggggaggtcaccaagaaggtaatgactcagcttcctgctgacctctgactgtgatgctgggaaggtgtggaagaggggacgagttgataagctgggcgggggggggggtccactgtcacttgagatttgccacgtctggtactgagcagttaatgattattcactcaagtgtttagatgtaggctttgcacacaaattgcttcaactacataactaactgtttcaacttcttgagaaattagaagcttaagctgaaatgtggttgagtatttatatgcactatgatgctagtttttcacattcttttaaagttaaggggtgggggaggcagaggttattgaaacagtaaaaggatacactacaccagttatctggtatgatataaagacatgtgattaaatttgggtgatttaaaacattgttttctagaatgaaaatcacaaagattcacttttgtgaaaacatttgctaggtatcctattatattcaattaattaaaaacaaaaaacaaaatcaaatgaatgcatcccccttctccaaataaaacaaagctctaattttgtctgtaaactgaagtttagatgacacataatttttatctcagaatcctttgggttaacattgaagattggaataaccaaaagtattaaactattcttttaaagaatgatgttttaaaacttactagtcaggcattagaaaagttatcaaatcttttcacagtatcagatttggcaaatttgcatcaaggtaacgtggcaaaaatcctataattcaaactatcaactcatttgtctccctcatatcttctttcacatactgggcgactgagtaacatgcattaacttgtattctgagggaggagctgatctttatgagacacttgactgaatgaccatgaaggaaaataaggcactttcttttctttagacttattccaatacttaaaaaataaaaaagaaagacaaaaaggctcttttggtcttttgtttcttgacaaccaccagaaaaaatcatttaatgaaataaagggtttctttgttctttttctttttttttataacacttgaaagtataaaatgctacatttccaaaaatatatatatttttttctgcaccagcacccttgtatagtaaaagtatctactttttgttcatttgtttcaatgcactacactttatctacaatttcattacatgtatacagcaaataggcaagcatggcttttacatccttaatgatttttttctatacagggaggtttaaaaaaaaatacttgaacagtttgcccagtaatgtgacacataatgcatgtaccttgttctcatatttttttaggtgtaaaataaagattcagtaattttaactcagatatttatctttttaaaaatagtgttgcagttttgttatttgcattacttttcaaaactccttaagtttttctctcatggcacactttcttctaatacttcaaattttggcaggcaatataaaaaaggctgcaacttctgccctttgagggcactgtagtgactaaacagcatatcaaattttgaatactttttgaaatcacttcaccaatgatatccctgaccgaaggttcatgcatgatgcatcatcacacagtacattcagagagagctttgacttcgctatgagaagaaaaagattcctagaagtctctcacagtaactgcctctgtcattgagtagttaaggaccatctgtctccccttcttaagagaggccttcttaccgttcgcttagggtgggatattaaaagatgatcagtgctgtgggatgaattgggccttattgctttactactattcagtgcagtttctagaaccactttcacccaaacaggaaaaaaaaaaaaaaaaagctgagttggaggacaacaatttctttgtcttttgtttggttagatggtaagacgaacggacaagtgcctcagctcgctgcactgacgacaggcaagcaaaggcgattaccagttaactgatcagcaggcaggcatggtcaggtcatcattgggtgaagagttcagaggtcagaaggtcataggttagttgccggtggcggctgggtggttagaaacaaaaaaaaacaaaacaaaaaaaagaaaagaaaagatagagaagagattagtttcagctagtgacggcttaatgacaacatgaaaaactaatcacaactaataaaaaaaaaagcatgtttaattctgacaaactgattgacaccatctacagaatacaattaaaatcatgacaatttcgtatcatgatttgaacaaatgaagaagagcccactcccacaaaaaaaaaaaaaaaactggttaacaagaaaaaatagaaataaaatacaactaacaactaatagttagtagcagtcaatgaaggaaattgaaaaacaacaatgaataggtttggtatacagaatttttaaacagtcagtgcagttatcagtatctgactgctattaagcattagtattctctaagatgcaagcattaaagcaactattaatgatggatgtgattattaataactgatgattaacagaaatgaatctaaagaaattcaaaattctatgaaccatttggttcaacataaactctgggccaaacaaggtttcttttgttcaataaatgtttattgctttttcaattattctatttacaaacaacatggaatttcttggcctcatgatacaaagcgatactaaactgtagtctagcagtgtaggcaacatcatgggaaccagaaaatggccaggccttttgcactagccaacactttccagttgaaaatactattttacacatatagaacacttataaaatgcacttgcatgtaaacactgtaaaatcctgccatttaaaattctacactcaaaaagctctaagtacatcaaaaaatagaagaaatttctaattgataccaataaggcattttaaaactacaaacagctttctttattcaatttcaaagctaatactctgcaaatacaataaaatctgacatttcatatacattcctgctttatatttttatattttaaaagaagccacctgtaaatactattttcttttgcaaaataacaaaaaggacaaaaaaactttaaaaattacagtaaaacataaagtagttctcaagtggaaaagttatcattcccaatgtccttgagttgttccttccttaatcaacctttgtcacattctgcttcaccaaacttggtccacttaacagtagtataatttttaagactcattcaacagcttaattatttctactatattctgaggtttgatagaattttctgtactgttgccattgtgactaaggcagaggagatgtgaatgaaaagatattcagtgcaaagttagattctgtgccacttcataaatcaaagcccagaaggtgtaatgttcagtttaaatgatccaaaataatggactgatttaccttcatatgacaaaaatgttttctatagtctatcatttagaacagtttataaatactacaaaaatactgtatcttcaatgtgaccaaatcttccctgaatttcttaaaagtggaattttatttaaaataaaaattgctgctccaaaatcatagaagaaaataaatatttaacatgatgtagtcatactacttcacaggtattccaaaatatagaatcttaaagcatttttgatgttactcatagttttgattaaaactgtttaaagtttcttatacaaattatgtaagtgatggtttttgtattactcagaaaaaactctgacttcttttctgagtgtggaatatataaacgaagtgagtgaccatttatatataccaggacacctagactacatcctctgccaagtcttggcctcctacacaggtgtgtcaccatgcaagaccatacagttcattacaactaaaaggtcagttggtctctaataggcttcaaattcagttttgaaatatatataaagaggtgagtttacttttagtaaagaactagatattggtcaaccatgtagtactctaaacgttcatatagaattacatggttatatgtccaagggctgagtttttttgcattaaatgaatgcttatactaataaacttctcttcaaaatatttttttaaaataattttaacctcaaaaatagagaaaacagtagtatcataaaataatttaagtgaaggacttcagacatctcccttagacccaatgagtgcatacagtgataagtatacgagtactctgttactaaaaaagaaatgagcatttcggtttgctgacactgcattttaaataaaaacagtgacaggactaatcaaaacacgtaactacaaaagatccatgcatggaatgtgtcgtaattttccaaatacaataaaatcttcctaaaatatgtccaactatctcaaggcactggagtattaagtaggccaataattattgtgttaaagcaaaatggtgagaaatctcctaaaagggggcatacatagggaaagattagctgggggaaaaaaactactttaaaatactctttagaacaattgtagacattagcaatatgaataaaacctcaaattattcatggaattgtccagtttctttaaaactcaagtgactttccaaaaaacttccccatccctatgagacgtgctcatacagaacacttacaaggaataccatcctcatagacgaccacggagctggggtctattttgttcactgaacaatcactgttagtgatgaatacattagtttaaaagtcttcaacgttctttatggattatgctaaacaaatattaacaatgtctttgggaaaggcatgttatttctgatgtggacaacagctgtgtctagtatttatcatcagtactcaaggtaatcacataaagcaggtaggtccttcataaattcatagaagatgtacaattgaagtacaaatccagcactttttcctccactaatatttgagactttgatcaatttaatttgtaggaaacaaatgtgccataatagaaacttgtaaaaaatccttttttactaccatgcttgatattcctatcttgtgatggaaaaacttagaaaacaattcaatgtcaataaaccgaaaataccattcctcaataagcaaaaataatttataaaagggtccaagggcatatacaggacacaaattataaaagttgtaaaggagaaaaatgaagacttattttccagtcacaggttagtcaaaaattatattcacacagctggatctcataccaccacagaacttcaagagacagtttaccttcagataatatattttagcagcaaatgacaaaaatcaaaggatccattttggcaagagaatgtaagaataaaagggaattgacgctctaatttatataaaaaaatccaactacatgaaagttatcttcacagtcctcactttgttgattttagctaagtacttgacatgtgcaccctcatgtttatacagtggctcaaatattttattataaagaaaaatggaaactaaatcttcagttttctccaaaagtacacaggaggcatatattcctttacttctctcattaaagcaccatccgttcaattcattttgcaataccaaccccaaatttcagaacttttaaaaggtaaattttagcaaaagttattaatgaaaataactgaggcaacatcaaaatttaatagctccccaaattgactaatttatgttttagtaggaataaatcatagtacataataatagaagatttaataagttaaaatatgaagggagaaaaaaccaaaccaaaacaaaaaacccaacccttaaatctgtcaatgatcacaaacaaatttagaaaaggaaaaaaaactgtgtgcaggtaagcaattacatttttccatcaggtgtggtgttgcaaattttatggacacccaacgcatttcttatagacaagaactgcagaactaaactaacctcggtctgcggtcacaatcctttggtaaggatggacacgcatatcgtgccttcgaactttagtagccaccgcacctagttaaattgcaattaccaagacaaagttagaaaacattcacaaggggggaaaaaacattaacagcaggtttatcaaaatggatttcaaatgttcatttactacaaaagtttaagaaacacgttaaggcacagtagttttaaaattaaccacaatatgtcatgtatatatgcatctattaatattgcattcatttcaaacatcttgggccttaacctattgtatccattcatttacaatccccaagttacagtatttcatgagctctattagatccaaacatatttaagctttactagtcacatattcactgaagtgcctttcttgcagcaggactacttaaataacgccatgtttaatacagacaattatttgctaaccttaagaccacttcaagagtttatcacttaaaaaggtttaaaagcaattcttaaagcctacagattgtggttttaaactctgagtcaataagtatgaactgcaatgaattaggtgattagtaaagcaaacagtatagtacacttagcagtcagtatactactatacactcctttataaattaccattactgtgtaatattacagactaaaccaaattaataacataattttactttatatctatgtgcaaaaagtgcaagtaagtcactgactgctaggctaagcttttttcccccggaggctgctgagactaagcatttgttaaattcagatctgatgagggttcagttaagaccgttcttgaattcttagcctttcgttgggaaagccatacctaaagataaaaggaagggaattaaaaattagtcatcaatgaagacttgatgctaataccaatctcctcactactaccaacacacatgtctgcatctgttttgaagggcactgcttattttaaaataatttaatgtgagatgtgacataaatagcatgcatgttatctgtgtgcaaatttattataacttagaaatttaaaataattttctgagttctccaagtggtcaatatcatgttttactgcttaggtggcaaagcaagaaatgaaattaaccataatagattttttcattgggcacttattattattcaccttatgaatgccaattagaaatctgcatattttggtctttattttaccagtctaataattaagtttctataagtaaaaattttccaacaaacaaaagacatgaagctttacaatgagaaacaagttttactgcagtgcctcttgctatttctaagcagtaaactggtccatcacctcttattcattttagataaggtaatcatatacaagtacaattccacgtggcaaaatcagggagatcttgcgctgaaagtgctggaacagcagctggtggctaagagccccagccctgcaggaagtcaagagtcataactcctcgggaacagatgctgtgggtgcagcagagaggagttctgggaaaaggagcatgcacgggaccacaggacagagtattaatagaaaagaaaacttaaacaacaaggttacaggttacatgttattttaaaaatgcttcaagaaatgtgcaacagacacaagcctctcataaacagttctgtggtataattctgacctgcaattactttatacaatgatttaaacagaaaacatgtacaatgaaatgtatttgttcatgaaacaaagggcacctgagtgcatgcacacacacagataacatacagagcatcatggctttctttacttgaacaacgaattttcgagtttaaatcttagtgttctccagttcattaaagattttcaaatctttataaatcaatattaatgctggggaaaaaaaaccttaaaagatcaaagtcctaaaagtcaacagcatgcatgcagcaccaaggtcatatacaattcaggaaaaaaagtattcaaattttgtctggtaaaacaaaggggttgcacagaaacagtttgttccacattgactggtcgtgttataacagctgctgtattctagtccttcatccagcaagtcaatgggctgaaatatcaggcatgactggcatttcaatccactctataaaaaaaaggcatcagtaatgtctttttcgagcacaccactttttgttcatgtaaaaccaagcgtttatattatgattttaatttctgccttaagtgagattctgaattcagtgatttgctatttatttaactattccatactgtactactgaaattaagagtatctctcatgtttaatatgactaggactccaaaacacaagaactgaaaaatcttaagaatacaactacagtcatgcctgcataacaacattttggtcaacaacggaccacttatactatgtggtcccataagattataatggctataccacacagcctaggtgtgtagtaaacgatatcatctatgtctgtgtaagtacactctatgatgtacaccaaatgatgaaactgccagacaaggcaattcttagactgtatccccgttgttaagcgatgcatgactgtatttatctgatattttaagtgatcgcaaatattacaaaacacacacaataatatgaattttataaagcgctcagactactttcacttagaagtttaaaaattttccaacaattacacaaacctgtgagataaaataaatctcaaataaagtttgagaagtggagctgatggaggtgacgggccaatggggtgggacctaaaactcagaatgacctcagtaatgtcaaatgtaaaagtatttgttgaaatgtacacaacagatttacccaaccaaactgaacctcagttaccaaagtggatctgaataaatttaaggtgcaattatttcaaaggggaacccttatgagaggctgaaataaaacaaaatttagttttcggtcttccctaatgcaaacttgtcttgcctctctaaaactgataaaatcatttcaaaatctgagggagcaaaaatatttataaagagaatgttgttaaccccatggggagaagaacttacctaatacaccactaggttcaataggatactcaaggattgatgtagctggtgccaatgtgtaggggtactcatagggtgtatagattaaaccagcttcgggccctggaggaactattgcagcagttgggtgaggagttccgtttggcatgacagcggtctgtatttgtctgatcaaaggcattatggtagggccagctggcgtaggagtacgcagggcagctggtgggagaaccggcgcaggcccagtaatgatccttggagcagcctgggctgttgctgcaagagaaaaggcaagggctgctacagtaagcaaagaaatttagaaagaagtatagagacagcagtataaaatacggaaaaatgagaagggagtaggaaaaagaaaggaaaagcaggaaagaagaaaaataaaaggaaatcattagtacatgcgctgatcacacaaaaatgcaaaagcacaccaatcaaatgcaaacagctttccctttcccaatgtgattaagaatgtgcaaaaattaaaaagccattgtaaaaaaatgaatgacaccattaaataggttatatttagttcatacatttgatatatctaagatttcataagactaaagtacatgcagaagcacaatgaaacacttgcattaacagatgttaaaaaataatttgtaaccggagtccacagaaactcagttttggtatatttctaaagtacagctttagtttcaaagtaaagaaagaataatttttattgcatttagtcaagtaaccactaggtatatatgtacatttcctgcatctttaggaaccaacgtcacagaaaatcttaaaaagccctacttctaaattcctattaatgatatactcacattttcatgagtaaattaatgtcaacaatttgtaaagtaactacttctaaacccactagaggttgcctacatcttctaaatctggctagaacttaaaaattctatgtgttttaaataatcagtaatttaaacatggtatgttcatataaatgacatgtatgaatcttaaattgtttcaaaatataaatttcacattatttcattttaaacataaaaaagctatcctcttacggcttataaaaacatgcatagatacgcataaaaacaaaaataggacggaaaaagagttatcacccactgatctctgtgaactcacatatgaaatcaacagggaaaaatactagagggaaaacatgcaagcaaagtgaaaggacagaactcaacagagggtcatttcagtcagatacacttcaaattcactttttcaaaataagctttcaatatgttgtcttttgcataaatttaacaagataagctgcaagccctacatctgtagttaaccaaacagaaaatttcttaaacacttgaatttagagattgtgattttgttaaaataatgtaagtttatcaacctaaaacttcaacatgctgacataaaataaaatcaagagtgtcctcaattcatgaaagcattaaaaataggactgtcagccccatatcaagtgacagaacagttatttcaactgttcactttgtatgaactattattgtgttgccaaaaggaaaaaagtctgtagacaaaacaacgcagacagcagtaaccctgggcctcagagctcattcttacgtgatttaatgttggcatctctgtaggtgccattcagaatcgcaagctccatcagctgcatcttcttcaggctgtcttctccttctgcctatacatggaaaacacatgagatgaaagcatttgagactgtccacaaatataatagctatatctacacacaagccttaaagtaagtatcatgtgactacagtcacctgttttaataaggggaaaaaaagatcaagaaccaaaaggtgctaacataatggagcctgctttctctgttttctcagtaaaggcatgttgatatacagcatattgtatttgtaaattttttgtcagttacaccgatttattaaagttcccctaaaaagctttacttttaaatagaaatgaatgaaaatgtgagataagactaaacataacatattctcttcagcatctatcattttaaaattactttaattaattttattgtttttagatacagggtcttgctctgttacccaggctggagtgctgtggcatgatcctagctcacagccaccttgaattcctaggttcgagccatcctcctacctcagcctccgaagtagctgcgactagaggcacgcgccaccatgcctggctaattttttttattttttgtagagacaaggtctcgttttgtagcccaggctggtctcaaactcctggcttcaagtgatcctcctgcttcagcctcccaaagtgctaagtttacaagtgtgagccactgcacccagccagcaactatcattttgctgaatattccaaaactcaaatgtgttcgttaaacacacacatacacacacgcgcgtgcacatgtgcacacaaataattttaaacatacaagatttgattacagaatttaggtaaggaaattttatgcttaattcttcaaaatatgaaaactcagtgaaataataacttctaaaaaaccgtatattctgctctcttacaccaccatccctgtctcctttcaatctaattagcaagtgctatcaatgctacagcaatctatctttagggtcaccatatgatttattgtccaaagcagaaaacttttaaaagcaaaaatgggcactaataataaccatgcttcaaacctaaatcaggatagtctctaatcatcaaaatgtttggccaccccatttaccttgaattggtcccactctttccatttactgttccagttgtttttggcatagcacccaaactactaaaacatgttgctaatggtgtctgttctccaatcaatctctacacaaaggccagattaattgcccaaatcacaattttcatcatgtttctcaacattctgtctcaaaacactttcatggtttcttactatctaaaaatataaaaaactttagttgcctataatctggtcccaaaatatcctctcaagttaagcccattaacctactactttacacacgtatgtaagtaacatcttaagtcaaaccagattgctctccaccattcatctctgtgcatattcccacttcctccatcctaagtgctcccctgcgcactctctgcccctctctctttccaaatcctacctatccccatccccacaaacttcaacctaaatgctaccttccttctccaggggccatccctagattacagtagatcctcacttaatgtggtcaatacattctttaaaactaactttaagtgaaacgacagacagcaggtcctcaaataatgccactgctttcaacatggtttcattataacattgatgaaaaaagaggctgcaatatactcattttgtttaaagttgtatctccaagaacctatcgacaaagttaattgcttctacttcaaattacagtctgttgagtatcaccactcccaaagtaagctccatgagaatagggcttatttctttgttaccactgcctaaccccatgttcccacggccacccccaagttacttactagaacttataagtgactggtatgagaagtctttaactttatttccaaatcccaaatgtctcagtccaacataaactttagccacagtcaaagcaagcagtagatgagggtccatctatcaaagtctgtgtagagatagaactaactgccccccacttttatgtatcatcgaatcccagtaactttacatgactttgtgatatttacaatgaaagtaacacaatgcaacaattttctgacatagtcttgttcctctctgattcataaaacgggaaggacgaccaggacacaggcttctcagtgctcctttctattatagctgtaatgacacacaaaattctgtttttggcattacaatggtgaatggtatactataatatatagtaaacagaactgttcagtgagcttttagtaaatcacaagaattaaagaaaaatatgagtgaaacataaagacaatgttttgatgtgctactgccaactttttaaaaacctactttgcagaagattacagggagtggatactggcatgcctgtagaatttgactcctatcaacttgtacaaagatgaacaaaaagtaagtatgatcttagaaagacacagaaattatttgttaaaaacgaaataagtaagctactattggaaaagaagaatcaaatccattataataaaacttcaacttatttgctaaaaactagtcatttgaaaattaaaacttatcaaaagtttcaaatttaaatttatatataaaaatggaataccaaaagtattataaattatactctacataaaaaaagaaaaagaagagcagtaggtttacctccagtcatctaccatagcgagaaagaagtggtacaagtttgaaaatgtcagcaaataagagggcaaatttacttccaacaaagaggaaataaagacgaaagacgagtttcctgcagaagggcaggtgcttgaaaacatgttggcactgaactgctccttttggatagcaaaatagctattcattatttggcaatggagtgtcaaacaagggagaaaaccacagagaaaaaagatggaagaaatgtgtgtgattaccactgtgtgtgcacacttgtgtaatgtgcagggtgcaggataatgaaaacaggagagatcaccctaagagaataaaaataagagtggcataggaggagatcctggtgtagtctgccatatggtgttgctggaggtgatggtatgttacaccagatcacagccacattttggcagggtacactaatgcctcccagaaatgcacaggatttagttggcagagctggaatttgattctaggtggtctcagtccaggatgggcttcaccctcatgtcctgaccactcccctccactctgtattcacagggcatgatcttgtgtgtcttaagagacaacagggttcactggccgggtgtggtggctcacgcctgtaatcccaacactttgggaggctgaggtgggcagatcatgaagattaggagttcgagaccagcctggccaacatggtgaaactctgtctctactaaaaatacaaaaattagctgggcgtggtggcaggtgcctgtaatcccagctacttaggaggctgaggaaagagaatcgcttgaacttggaaggcggaggttgcagtgagtcgacatcgcgccgttgcactccagcctaggcaacagggcgagactgtctcaaaaaaaaaaaaaaagaaaaagaaaaaaaaagaagagacaacagggttaattatagaattactttcacatcgaagtggttatttcaatgttactgtcctggttttgacaatgagatttggtagtacgtacctgcctaaacactgttgaaggtatatatcacctctttttcaaatataagttcagatgagaaaactaagtttcttctacagtctagaggctctagagcttctatgagccagtcttcagaccagtttttctgacctctttttttctcaaaaattacaactgatcaaacagggcatcctgaagttgtacatgtcaactccagatagttcacaaagtatcctgcagaaccttgatcgggaatgagcaactctacagagacagaacactaacttttacatttgtaaaatgggtcattaaaatcatattttgtaatactgaactcaagtgattatccgcaatctcatagcttctggtttcctaagtatttgccctatattcaagaatcatttaaaaaatggaagcaaaattcacatgcagtggactcccaagatcttaagtgcaatatccagtcacgatatttctttttttttttttaagtttttgtgggcacacagtaggtgtatgtatatataaagtacatgtgatattttgatacaggcatataatgcatattaatcacatcagggtaaatggagtacccatcaactcaagcatttatcctttctttgtattataaacaatccaattattcttaaatgtacgataaattattgttgactgtagtcaccctgttgtgctattgaacactagatcttactcattctaactatattatcgtacccgtcaaccattcccactgtgccctcccaaccactcttcccagcctctggaaccatcgctccacactctatctccataagttcaattgacttaatttttttagctcccacaaaaaagtgagaacatgtgaagattctttctgtgcctgacttatttcacttaacataatgacctccagtttcatccatgttgttgcaaatgacaggatcttattcttttttatggctaaatagtactccattgaagacacaggacatttccacaaacccagaaagtctccttgtacctcaagccctaaccatccatctgatttaacttgcctagactagattttcggataatgaaggcatatataatattttgtgttcaatttctttccctcagtatgacagctgtcagactcatccatattgctgcatgtcgctgtagttcatctgttttaatggctgagtagtatgttatttatctattcttctgctacagacatttgattgtttccactttttggatatgtgaacagagccactctgaaaattctcatataaggcttccttgcaaatataagttttcatttatcttggataaatacctatgagtagagttgctgggtcatagggcagatgaatatttcccttgtatttgtatggaaaatattatggaaagattattaaagcacaacaaagaatgtctttacttttgaaatgtaaaagctcaaaaatagaacacactcctgctaatagctaaaacctgtggtatcggggaagtgccttgagaatttcagagtttttcagatttatagaaagataatacaccacagattctataacacccagcagagtctgggggatacgcccataatccagtccgtaacaaacagaaaaatactcacactaagtggggtgaagcaactataaacacagttttctgaacttctggaggcttgcaattaaggatgaccaattatgggtatgtataaatatatatattttaatttatgcatattaagatatagatatgtcatcaactatgccttttctgttgtttgttgtttttttttttttttttttttgaggtggaattttgcttttgttgcccaggctggagtgcaatggtgcaatctcagctcactgcaacttcgcctcctgggattctcctgcctcagcctcccaagtagctgggattacaggcatatgtcactacgcccagctaattttttgtatttagtagagatgcggtttcaccatgttggtcaggctggtctcgaactcctgacctcaggtgatctacccgcctcggcctcccaaagtgctgggactacaggcgtgagccactgtgcccagccatcatcaactatgtttaacagctatgttaaaaggatacaaacaggtcacgtttaatgtaatttatacattgttcaacttttctagacttagacactagatcttcattatccaatcatttacgcttcctaacaaatgtgtggtattggcagtgcattatccctgaggctcaggcagggtaggcagcttatccaaagccacaaaagttcacattgcaaacctggcttccaacccagaatacctgattcaaagtcctcatgtttaaccattacattataccttctccagtcttatgatgcctttaagtggaagtatcttttgaattcatcagaccacatgttagaaagtaagaaaatcatgtttatttagtatttttagatctatatacttttaaaaaaaaactacaacaaagtaatcaccagagagctgaaacaaatgtgtatttccaaatcattaaaactatgtcaactaaaaaaataattcgaaccactgcctatcacaaaggcccaaattctccagcattcagggcattgaacagtttacatgagcaaccttgcttgcaaatgttttgcattagtcaaaatcatctgtccacaatccccgagtagacctggtactttcctctccaagttaggctcctattggaagcatcctatgtgttcctcaataacacagatcatcgttttctctcagagtgcaggctttttttttttttttttttttgagctggagtttcgctctgtcgctaggcttcagtgctgtggcgtgatcttggctcactgcaacctccaactccctggttcaagcgattctcctgagtgcaggcttttctaagaactctcacgcatactggtcttgcttttataaattcatgctgcttatttttggggtgatcaatcatatatagccatgtgctatctcagtttttctattttttgatttttaaagaaatttatcatgaattgtatccataaactaaccaataaccaataaacccatgttccttgtaacccccaaagccttgcaaaaatgaatgtgctcaacatattttaaaaaatgaattagttttctataaatttgaaataatgggtagaaaaggttttccaaacaaaaaaatacatgactaatttaattgaagaataacaaatatcagagaaaagaaaaaatgatgagtgaccacattttatgaagaattttgatgccaattaccaccttgatctgctccgacagctttggcagacagaagatgacagataatttgattgacttaaacaaaggggtttatgagagggaagtgacaaaaaaggatttgtctttaaagcctcactgtgctattttgtggatggactgctgggggcgccagcgtgattactgagataggtcatgagctttaacattgtccaggcaacagagaggatgaactggactggggtagaggttgtaacagagatgaaaagagttatgttaacctgacaaggcatgatgatcagttggacacagagggtaagggaaaaggagaaattgaacaatgttgtttaggttcttgatttaagcaataaagtagacggtggctccatgtaatgagataaaaattgaggaatatggaatcagaagttctctcttgaaaggttacatctgaaatacttatcttaaacacctaagtggagatgtcaggtacacagctgaatattcatctggttgatcaacttattccaacttatcctatacagctggtagaaaaatatgctttcatatttcttgagtttttctccaagatgatgtggcagttactaagttccaaactgaactgccatatgctttccaatgcttaagtgtagggctctacaactactacttctttgccagccggttttctgtgaggttctcagaactgaggcatagtgtgggtgtaaagcagccgaccctgaagagctggatgagggaaagagatgttctctttcccatgtgcgctcctttcagctatgcacttgccagaggcagctgtctcctggctccatgcttctttcccagcacctctagaaccagtctcatcgtgcagccccttccctccatgcacaccagaagcagccagctagggttctcccctctgagctcctgaggttcttgaagtagctgagagacaccaagccagggtcttggtttcatcattacacaggctttcttctcttttattccagccctggggtaaaagatgctttttttgcagtctctaaatctgtattacagcctgtctttctcctttttcagttctcaatacctgtgtaaccaatcaacaactttccacacataaagcaaggtagagggaaagtgtcaggcactttatttaaccagaaaagcttaaaacactcaaacacacacaaatatgatgctcctcctccattaaaactatataaaactaacaaagatttgtaccttaggacaatatgttctgcctctcttcaacaaggtataaacagatccactgaaaagtaacaatctcagaaaaacaaaagccaagtctcaataataagtacttacttcttctaatgctaaatacgatacaatctgtgattttattaatagtaatagtaatcttaacaggcatgataaacttctgaaggatttatatgattcacaactccggctacatactagcattagtagagccacatcaatttatagattaaaaaaaaaacacctccaaagttgattgttattttagacggatattattagatgatatggttgggctggaaggtgggacatataaataccaattgggagtttaatagagccttgttctacaaaagaagataaaaaataggaacctgagctgggcatggtggctcatgcctgtaatctcagcactttgggaggccaggtgggtggatcacttgaggtcaggagtttgaggcttgcctgaccaacatggtgaaaccctatgtctactaaaaatacaaaattagctggcaatggtggtgcacgcctgtaatcctagctacttgggaggctgaggcaggagaatcgcttgaacccaggaggtgcaggttgcagtgagccgagatcgtgccattgcactccagcctaggcaacaagagtgaaactccatctcaaaaaataaataaataaataaataaataaataaataaataaataaataaataaataaaaattaaaaaaaaaaaagaacctgaaaattatgactatctaaaaatctcttagttttgagaggtgggacagagaggcaaaaactaagaaaagtatacccactgtggcgggagtggtggtgaggaggcttagaggtgggcagaacctaaaagatgttgtaatgattgcctgacaaaaagttctgaaagtgaaaatatattaaactcattcatattcagaatgagcactgagatagaaaggtaaagcaagataaatgatgtgcaactgggattatgatgggagtttgcacaggctgcggtggaagaccaaatgaaaaggcctagggaaataatcacaacagctttaagaatcttacggtaactatagattccttctctagaaaacatatatgagtacgccgctgaaccttccaacaatatggatgggcttgaaccatgcaggtccacttttatacagacatttttctgcccctgccagccctgaaacagcaagaccaacccctcctcctcctccgcttactcagtatgaagatgattaggataaagaactttatgaggctgggcacggtggctcacgcctgtaatcccagcacttcgggaggccgaggtaggtagatcatgaggtcaggagatcgagaccatcctggctaacacggtgaaaccctgtctctagtcaaaaaatacaaaaaattagccaggcgtggtggcgggcacctgtagtcccagctacttgggaggctgaggcaggagaatggcatgaacccgggaggtggagcttgcagtgagctgaaatcttgtcactgcactccggcctaggcaacagagctagtctctgtcaaaaaaaaaaaaaaaaaaaaaagaacgaacgaactttatgatgatccacttctgcttcaatagcaaatatattttatcttccttctgattttcttaataacattttcttttctgtagcttattttattgtaagaatacagtatataatatacataacatacaaaatatgtgttgatcaactgttaccagtaatgcttcctgtcaacagcaggttattaggagctgcatttttggggagtcaaaattatacgtggattttcaactgcacgtgggggtggttcccctaatccctactatggtcaaaagtcaactgtgtaagcaaaaaatgttgcatacaattttagggagttaactgtgagtattaaacttacccatgaagatatgtgattaaattgttaattcactccaactgctcttacaagacttccaaggtaatgctgtgtaatgtattcatcacagtaatgaagtacttttcaaagtgactctgactcctcaaagtaaatgcttttcaccaggagatattcatgagatttctaagctatcaagcacaaccttgacaacctcaaagaagagtagcggtagaaaactacctggcatttaaaacaattttatgtcatgactgctactttcacttatacccaaactattttcagatgtagtcatggtggtaacaccagaggaggtaattaattttggttgctgcccatcttctttttctttgttgtttcatcagatgtctaatgatatcttcaacacaaattactgactaaaatcttgaacctcagagttaggctaagctagaataaagtaaggtaaggaagaagtatgggctaccacctactacttgtgactggtgcctgaagtgggagacatcttgtggaactggagccctcaacctgtgggacctaaggctatctccaggtggacagcgtcagaacaggattaaatcggaggacacccagctggtgtctgctgaggaatctggtgtcagaactgactggctgctggtggtgaggaggaatccctacaaattttgatgaccatagatcacagaagcactcggtgttgtgagagtatagtaggagaaactgattttgtgttttcctatatccttatgcacacagatatgcaagcactggtatttttctaacatactagttttcataagaaatggaatcaggaatcaatgaattagataacattcacattggctggccattattggttaaaatttgatcgatgcccctgtcctccaacagaagcagcttttttttttttttgtgagacagagtcttgctctgtcgcccaggcagaagtgcagtgacacgatcttggctcactgcaagctccgcctcctgggttcacgccattctcctgcctcagcctctctgagtagctgggactacaggcgcccaccaccatgcccggctaattttttgtatttttagtagagatggggtttcactgtgttagccaggatggtctcgatctcctgaccaggtgatccacctgcctcagcctcccaaactgttgggattacaggcgtcagccaccacgcccagccataagcagctctttgttggggtggctggtgctttaaatatttcgtacgtatatttaagaaagtttgttagtggtgaaaaaaaggcaactgctgtggtaccagagttagaagtaattcaactctggatttgccctgttagaactcagttttataataatagccacatagcttccccccaaatctctgattactgaaattcctgtaagaaaaagtagctttgttactatgtgctatggtttaaatgtcccctccaaaactcatgttgaaacttaatcctcaacgtggatcatgagagctctgccatcagtccctcaatggattagtggattaatggattattacaggaagagaactggtggcttcataagatgaggaagacagacctgggcgaacacactagctcacttacccccttaccatgtagtgcctgcgctgccccaggacactgcagagtccccaccagcaagaaggctctcacagatgccaccctttgaccttagacttcccagcctccataacaaagaaataaattccttttctttattaattacccagtttcaggtattgttataaggaacagaaatcaaactaagacactgtgagtttgaaactctcctaatttcccatggaagaacttttaatggatttgactgcacggtcaaagcttcatttactgaagaacagattgcatagtttaactctgaaaagtatacaattaggttcctggtatatacaatgttaagaaatatttgttcaacaaatacaaacagatgcttaaaacacctgttaaaaaagtagtgtgttagattgtaaaagaaggtaattttttctttaagaggtagagaataacaaagtgaaacattactacaattgcatactaatatatgttcatttaaaaaccacagacaagtaaagaacaccatgtagtatgtttttgttttgtttgtttttttgaaacaagttctcactgtgtcacccaggctggagtgcagtggcacgatctcggctcactgcaacctccacctcctgggttcaaatgattcttgtgcctcagctttcggagtagctgagattacatgtgtgcgtcaccatgcccaactaattttttgtatttttcgtaaagatggggattcactatgttgcccaggctggtatcaaactcctggcctcaagagatccgcccgcctcagcctcccaaagtgctaggattacaggcatgagccaccatgcccagcgcagtgttttcaggaagtaagttttctagctgttggtcttttactgagtcttaagttattcacagcactggagtgcaggagaacactttctctgggatgttcacaagccttttcctaccctttcctgtccatacttcctgcatatcccctccaggactgctaaggaaaatgagacattggctctgctcaaatttcatcatcaccaacctcatgtcccccccctcaacctctctggcctctcctcccacatttctctggtcaaatcttcttcgctcggcactcattctctttcctgccgccctgtgaagagatgccttccgccatgattgtaagttgcctaaggcctccccagccatgtggaactatgagtcaattaaacctcttttctttataaattacccagtcagcaaccatattctataattacagtgaatacagcactatccatccagttatacaagtcagaattctggagttacaaacgataccttctagtcaatcaccattcaccacatccagtctatattaccacttaaataactgcttattttgcccagttctaactcaactgtcaccttccgggtctcctttcacacatccactctggcccattaagatgttctctcacctcgtagccagagtgatattgacaaaatgaaaataaacctggctcacttcttaaaactcttcagtagtgcccagtcctcttcagataagatcaatatcctcaaacatgctaggtctactcactgggtacctcacctcaatctctctcactctgcactctggtcacacataccttctttcagttccttaccaaactgaccatgttctattacaatcttttaaaaaacagttttactgccataatttatataccacaatatttacctgtttaaagtgtaaaatttaatagttttgggtaggcttacgtatgtgtatgaccatcacacatatatagatattaattgatttagaacagagcaacctaatgaggtgatttaaaaaatgaggcaaaaaggggtaagtgacttgtggaagattttacatgaatgtgtttttaggttccatttttactatgaaaagcaaacaacaagtgctttgttaaaggactaatattcaatcattaattcaacaaacactgatcactttctatgtatgtgcaaggcagtgagggagagatactaagatgaaacagacttcatgcatgtcactgaaatgcccagtcaggggcaaggggataaacaaacaaacaaacattcagttctaataattctacaccactatcatagacaatgcattctactataatattagtacagaatacaaatcacggagttctttctggagatcgccaaaatacactacgtaaacaaacagtgttctgaaaactgtgagttatttaatatgtgtgggtgtaagtgtaaaggaggaatgacatgaaacaaagttggaaaagtaggcacatgttagatgaagataagctatgaatgccatacatttttaccatggggtgatagaaagtcactgaaaacctacaacaaggagtgtgatgacatttctatatattaaaaagatagttttggcctcaagtagaaaatggataggagggagcaccatgggtaacagacctactccatctgtggagatggagaaaagatatgtgctatttggaggtagaatcagacagaacttggtgatgatatagatgggaaggagccagggcaggagagaaaaaggtggaaggaaggtggatgagtcctaggcaacaagtatcattctacagagaaaacaagggaagaattgtgatacggggagggcaaggaagaatgtgattttagttttcaaaatgttatgtatgagatgcctatgtggcacccgcatggaggtgttgaatggctggttgatttggaattccagattagaagcacgctgaaaaacaatcagcactgcagtggtaactggaggcatggttacagaacagactgtccaggaagaacaaattggaaatgaaatactttaattctagtgagagcatgacagttctgaagagcagacatcaagtgatcaaaaaagcaattaagaacacagtaattttgttctattctcatttacattatgaaatctaagtctctgtatataatgaagtcttgttttctagccttgtaaactgcagtttttcaatagaagtttgtgagatgaatttcttttgtcagtcgttcaacgcttgaaagaaatattcccaagtataattccacaaatgctaaattaaaaaatcaaagtatttttatttaaattgacaggagaattcataaattactgtcacaaagtaagctaattcctaaattagctaactttctcagaaatattatattctacaaagaaggttactaaaaataagctgaggccatgtcagtttgaaggcataactaaagatactttgataaatactcttatattttatttatacattaaagattaagtttttctccacaaaggttttaaacgttaagagaattaaaaaacaaaacacatctacttatttatataatttggcaatatggtttcagagttaattcccataaaggagccttgtgatgaataagcaggataatttaatagtcactttcaaattttccaaaatagttattaaaaatacaaccaaaaataaagctataatgagctaccaaaagcttacctgaaataatcttaatactaaaatgcttatttgaatcttttaatatactattaaaatgtcacaatggttactatcttaattttacttataaatatcaaaacactaaaacatttgaaatgtagtaaagaaaaattaaatatgagttaaaatacaagcaaagtaaatatagtaagggacatgtgatttctgaatcatttaatatactattaaaatgtcacaatggttactcctaataattttacttaaaaatatcaaaacactgaaacatctgaaatgtggtaaagaaaaattaaatatgagttaaaacacaggcacattaaatatagtaagggacatgtgattttcttaatgtttttactaattcaagttcaatgcaccctactataaagtgaatgattacaaatactttgcctatatataaggaacatgatgctacttacccaccatcagaagggcatgcaaacaaattaaagtgatgtatgaaaataattgaactaaagaaaatacactgagaaatcactcgcctatttttctaataaatatttaaaaatatgtattgaaattaattttacagtatctgtgtagaatatcatacatttaataaagaaatttttaaaaaaccccaaacactaaaatgcattatcccaaccaatgagaagtttatgggacataaatattaatattttatataattatataaaatatataattatatatttataccaattataaaatagtttacattaatatttaaattaataggtacaagcaattataaagtgttacaaactaaatatgcaaattctgaggggtgcaaggaatacaaagttaaagtaaaaggacttcctttacaaatgcaaaaatatttcctagggtataaatatttaatttaataaatatatcctaggccctattattctatgcccagggtcccttttttttacatttgcaacgcctaaaatttagaattacaagatgtctaaaccttttgtcaacctgaacaaaaccttgtgttgaaagaagcggttcctcaacgaatccttacaagaatcaagaggaggatgttattcatacagagtctctgtttgggaaagcttgttcagttcccagaaacaagacatatttttttatcaccaaggagcctgatcaaactaaacatccaagtttaaggaaaagccctctgttgtgtttaagaagccacagtcactgccaggcaacattacggctggacagacggtaagcaaagatttatatagctgctcaatgatttagataattatggtatgatgttgagggaagtcttaaaacctataccttggcaaacttcttaatctgtctgtatggaatgtcacccgaatcaaatggtacttttaattatttgtgaaaattctagttaggacaatgtgcctgttgtcctaatgcagaataagccacacacctaaaatgtggagatagaatataaaaattatgaccctgatatagaactggattttacttagaattgtccctcttcacaggaaagaaaatcagcacatttaaatttctgcagtgcttttctccgccatcatttttcccaaagcagcacatacccatgagagtaccttacacacagcacacaaaggtgatggctgtgattccaaggagctctgcagaaattacagagatctctggtaaggactacatgggtctttgtattctacacttaaatgagattttaggacattatctgtccatgactcaagttttattaatggttcaacagttatcttagagctataggattttaatcagattatactgatgtgtgattacatactgaccagtaaagattaatatataaacaaaaaatgtattgtaccttaaaaaattttactctttctcacctgaattgaacaactgttctctcctcaaaatacccacatttccctggtgaaacatttttgaaagacgcatccacattttcaggccactagggttagtaacaaccaaattattatttgcttaatgaaactgtaccctaatggcttgacaatgttaagacctccaaaaagaccatgtttattttgttaaaagtattttacagtctcaaaatttttggcttaaattgtacttcgggtgtttttctgaagggcagatacaaaccaccaatgtaagaactactattactgatatcttgaggatgagtgagggcacgcaaagtgtaagtgatgttcatcaccttagacatttgcaggaacattttctcactaaaaagtcattacaccaaaatttaattcttttgagagacaggggagagctgaagctctctctgaaagtacagttgtccctcattatctgcggggaactggttccagaacaccaaaatctacagataccaaaacccatgaatgctcaagtccatgatataaaatggcatagtatttgcatataacctacgcacatgctccagtctactttaaatcatctctagattatttataatacctaatgcaacgcccacatatcacttcattcatgtggattcaatgtagtgcttgaaggatgcaaatttaaattttgctctctttgaaactctgtggaatttcctcattggttgaatccatgggtgcggaacccatgtatatgcaggttgtagttacgtgcaacctgaataatccagtttataaacctaagtatcttatttattttccaaaagggctttaaatgttcttactttgtgagaaaaactatgacaaagataaaaatatgtatttattacatgcactgagtaaaattaaagtcagtatctggttaacgtttgttaaagcaaaacaaagaatcagtataatagcattatctgaaaatatatttaaattaagataggaaatttatatctagagttgtcacttttttcctctagagacttggaacaaaatgtctttcctcaaatgtgcttcattgtaccatacttagtgaaaaaacaagcctgaataagctgatggcctgcatgggaacatggatcaactcattctcattaagaatttaagaagctatcagccttctatacagttttgcctatatgagagaaagcaaggactgccttctttcaaacctacaatttatgagtttattcaaacccgccaaaaagctttaagtaaacgcctctcacatttgaaaattcccatggcaactcatttaggttggcagacaggcagtcccaaattcaatccttttatcctgcagctaaaccattacaatggtaattctgctctgacactctgaagagactgctaattaccacactctgggtccccagacagatttcccattcagattaaaatggctctgcaaggtagaaatcagtaacaacacctttctttacatgagagatgttctttcccattacagctctatcaaggagccagtacattacctctagatgtcttttaatatatgttttaatacctctccttctctcccaataaaatgaaaaggaggccaacaataccacaaatttcaatgatcaatatttgatcaaggactaaataaatgcagtaccatcaactcattaacaatttggttaaagaactaaatcaaagataaaattaccacatctctatggtcatgatgtctgttaccttctcattcattaactcttaacattttcaggttataattaatactcagttaattatgagtcaaatgcatatggcagacagaaaagaacctttggggaacacaaaatgcaaacttttaaaaagtgcattttgtaacagatgcctattatcctaaatttctataacatgtagttttttgaaaatgaattaaaattacttttgtcttgatgaatattttcaaatgtcataataatcctgatgacaactttaaatttcaaaacccgcaggtggaaatttgtcgtcatgtattagatcatttacttttatagtactgacctccatgtatataaagagatcagctatatgttaaaaactgatctgtattcaagttctcaaatacctataaagtaaacatacagagaaaacaaacacacaattttactcaccataaagaaaaagacctgttatttcaacactttatgaaatgtctaggtctgcaggcatattgtgtgccaaagtctgttttaacttatgagacaacatcaatgaacttcagttgcctgaaatcacttaatttctgtattacagtctagccctttcaagcttagtactctatctccccaatggaaaccttttacctccccacttcctattaaaactgtgggaaaattatagtgaaaacaagatacaggatccctcatctctactttctcaatcttaatatcagcataatccagcataatattcctccaatttcaccattcttgtgtgttttaggtctcttctgagaagatcacaaaagatcatagaatatgtatccatataaagtcttgactaagaaatatcatgtattactttccaactagatgaatgaggattaacggaaggaggaaggatggtatctgatacctgagaagcattcccataatgtgtgctcctgtgtggagagacagttttatatatattattttttagtaatgttatataatttcattttttgggggggctactattccttgtaaataaaaacctatattgacaaaatcatgactagcaaacagggtacattttgtagggaaggaacagaagtactctctcctggtatggtgccttttgggatcacaaattgaacttgcaaatgacatgcagttgcaagtaaccagcccatacatagttaaacacataaaatgcaaaaagaggaaggaggaacatgtatgcgcctttcatgtccacataattaaaataattactacctttacaaagtctctctaaggcaagtaggccatactgcttggtactatctttatagaaaagatgctgcatgaaataactggtatttggggagaaaaaaataaagacctcaaaattaaaagaaggaaaaagttactatcatatgaaatgaaatagagtaaaactttttaatgatgccaaaccatgttcatacaggttgtataagctataatagacggattacatacatagatatgcatgcatgtacatgtgtacaccaaattcttttgccctttcagtgccatcaagaacacactggtgtgtatatctttacaatgaatgaatggagatttttacacacctctttcagtaacagacaaaactagagaaaaggaaaaaaaaaaaaagggtagacataggagaagatctgagtgctttcaactatcttcatctataaacaatacagaatatacacgcaactactgcagaattcacattcttttaagtgtatgtgaaacattcatcaaaacagaccatatgctgggctagcaaaaagttattagattaaaaaagactaccatcttatcaaatacatactgagcataacaaattagaaatctacagtatgataaacagaaaagtctcaaatatttggaaacatttggaaataaaacacggctcaaagaagaaattacaaagaaaattggaaaaaacttttgcactgaatgataataaaaacgcagcataatattatttgttggatacagctaaaacattactcagagaggaatgtatgtccttaaaagaaaagtctcagaagtacaaaagacaggtctcaaatcactgatctacctttaaaatgtccccaagtaaaactaaaccttagtagaataaagatgtaaaagcagatatcaataaaacagaaaaaaaattgagaaaaatcaacaaaaccaaaagctgatacttagaaaacggttgataaaattgataaaactctagaactagattggatcaggaagaaaaaaaaagtagatatttgaagtcaaccaatttagactagataaaaacctacatataacttgagaaacaactcctgcctagttatttcatgttttgtcaccaggaaacaaaaaggaataaagtaaactgatcatcaaaatcaaagaaacatctgaaactaaactggtgtcattttcagagtaaacatgttctccaggtaaaatattatttgattctactaataaatggtgtgtgattatctcaaaacccttattacttttgcagtataattacaatactgaactgttctctgaaaagaaacaagtataattgcccttataatgctcaagcttctctgagtttgcacgcttgttggtaaaaaacaaagaagtctaccagattgttttgaaacccaaatacgaattgaaaagatttgaactgatttactaaacatttagttacatgtaaagttatgcaaactgatgaaatattacaatcttcaaaattattttaaaaattagaactgcatcacaaagagaaggaagtacaatctttaatcagatttattagtcttttctgcagatggaaaaacacaaaatacttattacatttccttatgaaagtttatattaagcaaaaagtctgcccctccctactccccaccctgctaggaccctcaagcctggactagatgttttttgctatacaacacctaacaaaatgggcacaaaatgattaaaatacacaaaactctttgtctttctaaaaaagaacttactctatctttccaaaaaaaaagaacttattcattctttatatgataatgtaaatggaatatttcccatttaaaaaaaaaacagttcaagatgtgaacattaaagttcttacattacaaaagtatctcatgttacgtaagtatcacaaagctccttaatataaaaactgacctaaataacaaatagttataagaaccaagagattttactcacatttttgaaattaaagggcttttaaaaaaaagcctattagaaaaagcaaagatcaaagtttgataatatccagggtttgagtgtgtgttgagaaataggcattttcctgcaatactggcaggacagtaaattggtacaaattttctggaaggcaacttagaaattttaacatgaataaaataataaaatttaaaatgcacttaccctttaacctagtaattctacttcaagagacttacccttcaagtatatatgcacaagttaattaactctgccaaattcatgcagcatctcttccactgaagagaagggaaatgttcactactggacattctgccgctgcctatttaggaaggcacctttaggggtaatggaaaggtctaaggaactaccatgaggctggatgactgaggtggagtggaagacacgatcactgcaggtgaagcaatataaaagaaccgagaggccaaagtacaggaaggattatttataaacataataaaatcttgaagagggaaaaaatcccggttctttttcctcttgtgccattctttcttgaacccatgccagtgacacttttaaccccactgttccaaaaaaaacaaattgactggcaaggtcaccaatgaccactacttgccaaatccaatggctgatgatttcctcttcctacctaaaaggtctaagcatgacttccaggactggctcacagctctcctccaaatccaggggctccccgctttgctctcccttgctggatcctccctctcttcctgttacatggtgaagcaccccaggtttagtcctcaatttttcttctatacttatatccaatttcttgatgatacatccagtctcatggctcaaaaagcttttgatctaatgacaattcttaattctacataattctaggttccactttctcacctaattcctgttataaccaaatgcccattcaacatttgctatcaacttttatactttcaaatccaattttttgactttcctcccaaacctgctcttgtaaaagtgtaaataaatgacaactccaattgcttgaagttatcacatatcatatcacaccaagtctgtcaaaattcctagcagttttaccttcaaaaaaatccatgatcttactacttctcagcaccttcaacactactccaaatcactttaatctctaacttgaactgcaaagacttccttattggaatctctgctttccccactgccctcaaagtctattctcaggccagcagctggaatgatcctttgaaatacaaattacactttgtccctcctttcctcaaattcctccaataaatagcttctcatctcggactaaaacccaatctccttcccatgcctacaggccttggatctgccagtgcctcccatccccaccgacctcacctcctactgctcttcagccggctcattaagctcctcactggacccctggatactctctgaacatgcctcagggccaccgcacttttcgctaaggttttttcttagatgtcaccttctcttaccagcccatataaaatagcagttccctaatcccagttctctattcccttattctgctttatttttcttcgcagcactttgttaaaagagaatattgcctatatttgttttcctcattgtcagtaatccaaccccaatcagaaggtaaacttcaggatggcaggcactttgctggtcagcttttatttattattggtgtatcctccacagctgtcacagtgtctaacctacagcaggcattcaattaacatttgttgaatgaactacaaggcccagaggtgagaagactgaagctttaagaaattcaaataaatacagaacaactcaatctgtggcaggatgaggaagatgtgtacatatgactgtgtgctttaggtatagcaaaaagtaaaaaaatgaaacctgaaaggtaagctatggcaaatcatgaagaaatttgtaggccatgctaaggagttttgtattcttttctcagagtaagaaggcaccactaaaaaatctttaagcagggaaaggtaacaatagactgcaaagtaaagatgggtttgagaggccccagaagaaggaataccagttgtggggttctgatacaagcatggtttgaagtaggtaaaggcaatggggatgaaggaaggtaagcaaatctgagagagacaggaagtaacctgactgaacttggtgtttttcaggaccatggtaacaagttaaaaagtctaaactacccaacagaatactgaacgaacaagaaaagcgtaactgagaattccaaaccaaaagactggcaatttctgttaatctacagggtaactgggcatctgctattcaaactgtcaacaatacaaaattatgaacctcactattaaaggtacatttcaagataaaatatctgcctttgaaaatatttaggcaatgataaactaatgagccttatgttgcattttcatagaagtcaaagcaacttctctgaaaacagtaacagtgagttggcaaggaactatttctgtacattttttccaacttgaattaatgcattcattttatcatcagcatttgtatagaaacaacaaacttttacagagcatgtatgtgctaggtattatgctaagtattctccatgtatcatctcatttaatcttcacaagaagtataggggtttataatgctccaaactttcttttcccccctaagggacagggtcttattctgtcacccaggctggcgtacagtggtgctatcatatagctcaacttcttggcctcagcgatccttccacattagcctcccaagtagctgggactataggcatgtgccaccaggcccagctactttttaaattttttgtataaaggggtcttgctatgttgcccaggctggtctcgaactcctgacctcaaatgatcctcccaccacagcatcccaaagtgttgggattataggcatgagtcaccatgcttggccatgttccaatctcatagatgagaaaatgaagacagttaaaagtcacaaagctgggattcaaaaaccaggaagtgagttctcaaaaatatgatgtattctgtctcccacatttatttaagtaaaaacccaaatcatttgatgcttcaggaaaattcagttattttatgcatttctatagtgaagatgaaggaactgattttaccttatgacaagattcaatcatttatttttcaatttactatgttattgctatgtgctgggctctatgctaaacactagaaataaaaatggtaagcaagacaagagattacaggtgactgggtaaatagaaaatttaaaagacgctaacaatatccagttgatcctcaaacaacaagggagggctcggttgtcagggacacagactgcatcaaagatccttgtgtaactttcaactctcccaaaatgtgacgaatagcccactgtcgtctggaagcctgacagttgatcaacatatattttgtatgttttatatgttatataccgtattcttacaataaagtaagctacagaaaagaaaatgttattaaagcagtaaaagtcgatgttaaataactttttctgatcatgacactaattgcccagtatactttcgaaaatctccttttctatacagtttttcaataccacacaattaaggaaaatgagaaagattccatggtttaatagtacacaaatatagattttagtttatatttaacctgatcattaaaaaaaataaaatctaccaacagaatttacataaaactcttttattccaaggaattaatttcatcaagttaatgggaaatgtttatgatttgtgagtttacttgttgaataaactatcagggtaataaagaataggctatctgggaaataaaaagcagcaggaaccataactcatttatgtaaatgccaatgctttttgttggacacaatactaacagtattcctagttttttcttttcttttttgagacagggtctcactctgtcacccaggctggagtatagtggcgcaatctcagctcactgcaacctctgcctcccaggctcaggcgattctcatgcctcagcctcccaagtagctgggattacaggtgcctgccatcacgcccgacttattttttgtatttttagtagagatggggtttcaccatgttggccaggctgggctcaaactcctgacctcaggtgatccaaccgcctcagcctcccaaagtgctgggattacaggcatgagccaccgcacccagccctagtttttccaatagcaaattagggtccacatttccatatagttttactaatataagaaaaaaaaattaatggcccagaaaaccagtaatttatttttcatttcccgttaaaaaaaaaaaaattatactctgggagtagtacaattattatttctaaaaatattaaagggttaagaaacaataaggagccaacccaaggaaggggggcagagggaagagatgggggaagagatggggaaagagaaaccgggaaggaaggagaactgataacacaaaagcatctggataatttcttacgcgacgtcaccctccaaaaccccttttaatgtctatctaaggacccctaaatacgaactttatgtttttattatgttagaagtatcagtcaggtgtttttaattttatgcttaaataaaatttctaacaaccaataacctattccttataaacattacgataatttaaaataaactgacaaaaaaggacgaggcccaaatctaaggtctggaaattattacttactgcaggtaccaataatttcttcacttcttcaactgctctcttcaatttgatttctgctctgttctgagcatcttccacagtgattagtacatgtaaatcttcatttagatgctcccaattgggcttgcctctattttgctcctcctaaaaaatttacagagtacatgattaaaattattctctttaaagagagagcacatctttcataatactaacctgttgtcaattatttcagctatgtttgcattattttgctatgatggcacaagtctttgaattatttttctgggtcctcaaagtttgattgaatgtgagactactgggtcaaatgataattaatccaacaagtatttactgagcacttactatctaccaggcacagaaccagatgctaaagatcagccccaagcgtgctcctatgcactagaagcatacatcatcatcatgtatgtagtatcatacaacatacatctgatactgtccttacattaccatgaaaaacactttgagaaacatgtcattatttctgcattttacttataagtaaacagaaggtcatcaaggttaagggggtcacctctcaatgtcacacagctaacaggctgtcaatttaggaactgaatcaaagttttcattctctaattcagtgatctttccacttcattacaactgcttttaatgacattggttgtattcagcattagaaaaggtattttgcatatagatgttattgtgtaagatgactaccacttgttttaagtatttcatgcggtaattatgaaaatagttttatctacattcccatcagaccataccttaaaattaactgtaaggctactctttaattatatcaagtcataaatactagtttcatagagaatatctatatttcatttccttaatgtcttctagtaagaaatatccccatgttgaaaacctggttaagctacagggaggttaagtagagttggcataatttcagaatcgctgttttaagttttagagaaagtgtttttaaataaaataagaatatataagtagtatataaatggtaaatataaatgcacctggcacacagcaaggtaccacagacaaacaataaatatctgctgtttttggacctttattttagaagttactatttacctaattgttagattccagtaaaagaaaataaagcaggcataataaaactgctttctgcaacaattcacatgattgagcttagccaataaggctaaaaataaattttaacagtaaatgcttctgctttatttttaatcaacacatctttaggatgaaaatgcatccacatattgtaaggggatacagggaaaaaaaaaatcagacacaatcctatgctgggccatctatgtatttccaaagagtgaactctgagtcagcacagcattttacaggggtaccatctgtccgacactgtgtgaaccaccagctcagaatatctgactgtttcaacataaggtcacattacattctttttgatgatgtcatatctttacaaagctaggttgttagcggttgctgtaataaaaatcaagaacatacaaaaatcaatgtggaacaagaaaagagggtggcagtacaaaaatctgattccaaagtttgagaatttgaacagcacccaagaaaatacaaatgctattagtaaaaatgtggttatttacaaataaaatgtatagtctgtttcaaagttgtttgtagagtaaatatttaataaacagaactctgaaatatttctttttgactagggtacaccatgcaaactaagtgggaaaccaaggagtcaatgaatcaagaaactggaaacctcagggttatctgtatggcaagaaataaaatatgtattaatatctctaactgtggcaagaaaaattagttttgttatccagatttcaattgttatgttcaagaatgctaacagtattttctcaccaaaatttgtattttttatttatctttttttttttggagagagacctacaaaagctactagtctggtattatttggtgggcctaaaagtgcacctatttgactaaacgcatatatatgagggacttctgtttccaggcaagatatagtaacaggaaccagattcaccttcctgctgaaacaaccaaaaaactggcaaaacgtatcaacaagtttcaagccactggacatcagacaactaaggacaaatgacacagagttgggaacaactgaggtgagcctataactgcccccactcactggcttgagagtctccagacaactccatgaggagactaagcaagagtccagggaaaccgaggcagccaaagctcagagagtcctgggagagctgccactcaaatattcagctgaaccctgatcgttgcatacttgagagaaaattccagaggccagggaaggaaccacccaaaaggattccaggtcaaagtgcctggctctagaaaagaacaagactgaaagacttgaaggattccccacgggtaagggacacagaaaggtcttgcctcagtggtaggaaaaaactaaacctaatctaagcattgttccagtacaactaaatacattttaaaagtaagaccaaatgccttaaattatttccaactaacttaactgtgtcccaggacaaagctcaaagatatttataggaatataaaaatatccacccaacaaggtaaaagtctggcatacaattagaaattaacgggcatgcaaagcagcaagaaaaatgcaatacatgagaccacctcccccccaatcaattcactcaaaccaatctagaagtgatacagatgttattataaatagacaaagacattaaaagctctatgtgtgtgtgtcaaacactaatgcatatagatactaatacaatgaaaactgaggaacatttataatcaaatatttttgagaaaagcttaagaataaaaactaaaatttgacttgccgcagaaacctctatacatggagaaaagccagagaatttaaaaggaataattattttcatgatagaaacaaagttgcagtattatttgccattttgctttattgcaagaatacatttttaaggtgtaaaacacttggccaatgcgtactcttactaattcaacaacttaaatgatagttaaaaatataaaaataggagaaagctacatctaccctgtttgcttcaaaatcaacatttttgcttacacttttaaaaacaattgaaggagcaaaaattttcaaagatggagaaattaatggaatggtgtacttacactcccaccaaaaattcttctacaacactgcagagtttaaaatgtacaaactcagccgggcacagtggctcatgcctgtaatcccagcactttgggggggccgaggcaggaagactgcttgagcccaggagttcaaggccagcctggggaacagtcagaccctgtgtctattataaataaataaataaaatgtccaaactcgtaagaagtaagaaaatgggaaaggaaaccatttaaaaattaagaatctagaaagcagatggttaacttaaaatttacctgactctagttaagaaagaaacttatttccttgcaatccaccccaaaaatactgaggaaatgggcagcagtgaaaacaggggtgagggtggggctgagattgcaggactagatgaactctcattaaaaagcagttcaattcccatatcccctgtccacaaatggctagctatcaagcactccctaattcccagcagtagaccagaaactgattctgaaaggaagtaaaacacttgctcaaactgcattaggagaacagttgacagggtaacttccactctgacagctgggctggccggccatctcccctgctccaaatgcagagcaagggaacccaggcccacatcttggggacaggagacttgaacaactgacccttcagagagttaataaaagacgctacaatgctgaaacaagaatgctctatttaaaaattttgaatacaaatagaaactcctgcaactaaaaacatgagagcaaagatgaaaaatttgatagaaggttggaagacaaactgaggaactctccaagtagcaaaagacagagataaaaaaaaatggtgcagaactgtataatattagaggactagtccaagaggttcagaaactgaaatgacgatgtccaactaccaatataaagaaaaagaaagcagagggagaaaaatcatcaatgttatatatttttcgcaaaactgagggatctgaggttccagatgaaaaggacccactgagttttcaccacaaggaataaatgaagcggacacttcaaaatcaaacaatgtagcaattgaaagtaaacactaaaagcacctcttttagtgttttggagggggtgcagtgtgaagagagagaccgaccaacccgttttccacatcaggcctcagaaaatctttcatccatgtgcatatcaaatgtcacacaaaaaaaggctttgaggtcatgctacgcagaagccatgaagccatattcattctactgtagtccattccagctcaagaagagttaaattccttcagtgagtttgcagcttagtaattatttaatacaaatactatttctccctgtgatctcattctgtttcttaagcagattataaaggcaatctgggattggcaaattttatagagaaatcaataaaacacaccccaaaaggtcctcttttagtcattaaggatagatgcaattataggatggttacttctgaacttaaaatatccatagtaagaatccactcacaaaacccattttctcacttaaatacatcaggacaaagaaaaggttgaaataagcagacaggagggatgatgatatggacgcacaccaaaaatgctgtatttattagaaactgtgttctacgaggcattcgtttctttttacaattatgtttcaaacaatctttcaggggttaatagctgagatactgatgtggaaaaaaatagctcatgactactataatgtctgttttacagttaccatttgcaatatcatttcataatatatgtgctactaaatcttcagcaacatagaagaacacagttttgcatcaatataatcccaaatttacattttccagcacagtactgccccctgatttctagacctccaaattcaactgccaactagaaatgtatacttcaatctctaaagcagtctgaactccacatgtccaaactggggttcatacctccctgctgcaaatctgtccacaattaatgtctcagctattactcatcctgaatgaattttctgaatcagcgtggatttttagaatttgaggctttgtaggaaatctctgaaacacagtcatggcttacttgtgctttgacagagactggctgctgcacatgcacccattcacatctatccacactaatctgaagtgccgtgttcattcacttcccacgataggctcagatttactccatgctgtattactggccattccccaaacatggattttgacacccataagtttatggaagctatctatcgcctatgtctagaatgcctcctttccctttctttaatatttacttttatttcttttttttctgtattatatagtaacttagttatctgtgcattgtctttttctagctattagaaagtttgctccaagttgaatatcagaatcatctcactgattttcatactcttgacagtatgtacacattgattttacacatatctggctctaaacaagtatttactgaattgaataattgaacttttatgattgaagagcatcattcaaatcaaatatcaaactgtgcatgaatatgctgcagctttcccacagtgctctgctgtactaatgattactgtgcctgtttagttaatccctcatatattcacctttgctcctgtatcttggtttctgggacggcttctttctttctccttagttaccaggtgtacatgacaatttttactccatttcttgttctcttacttctagtcaattctcccagattttctacaataactcttatgaggtctggttttcacaacccatcagtctgcttatcttttactctaaaacctcaatgctaccttgttttgatgtatcagaagaacaggagacaagatgggtcaaaagtattttttaaaactgcaagactaaagttctatctcaatataacagcaaagtgacagcacaggcaaattacatataaatactatatgtataaatatgttcagagctcaaaaccactaaccttccatcttttaaggtagggtgcaataacaacagaggttccatggaaatggaaaatagctctatttatacagcaaattcaaatatagtagcttgctaagcaactttataattcattcacacttgatggcagagcagatagtcacaattattaatgattatcatggtctgtattcttgacaagtatactatggtgagataaattagacttaggtgatgataagcaaacttaaaaatgaaaatgatgatggcaactaagcttttatcaaacactgcttgccaaggacaatgctaagcaatataaatacatcacctcattcaatcctcataagttacatgaacctgggactatcagtcttaccaacatttaacatgatttagtcaagtcaggcagtaagtgttgtaccaccaagctaccatacctagccagagcaactttacagcatgcaccctcaacaactaattcctagcacaacatatcacctacatgagaaattgacctaaaacagcatcataaaatagtgaaaaaccagaaacggaacacagaatagtggaatctctagaattttttactttacctttttacctttaaatatttttgtgtagaattctaagcacatcttgtcctcacagaatttagagctggcggggactttgaaggcagataaaggggtagatgagattatttagtagatttggttttgtctttctatatttgtcctatctcctaacttcatgtcaagtattctttctccataaatgaatttctgagtaagtcacatccagaataatgtcaagaactgggagaaaaacatctggtataacagatctcttgcacctagggagaaaaatgctttctccctaaatgagagactcacctatcaaattacaatgatacatatatacaaaaaggataaatctgtagctatttcacttacataaaattcctctagtctttaaagtttcgaataggtgaggttgttaaaactaaaattagatcttaatatacaatgcgtatttccaacattattactaagctaggactaattaacaccattgtttataactaaattttaccacttttcaataaaacaacttccatttcatttttgaaaccactgtatacagtgatgtaaaactacaaagtaaaaaaataatctcaacatttgagaaacaaagtatttgttttggatttttgaaaaactttatgaatcgctgccctatgaagtttaaaagtatgctctaattacaatatctgtttgaacaacaaagggattctataacatgaagcattagagtatactgattgtcccacccctgctgacagactctcttaattatgcatttgtagtcaagcaaatgagcacaagacttctgctcctactgtgctcttaatgtgaaagttcatacgccaaaacccctccaaacagaattcaaaagtgttacatgctgacaaaaaccaaggttccaataacaggcgtattgtgaatatatacattttaagacaaatattaaagcttagacatattaccatctccagttgtgcatataatcttagattagtttaagaaatgttcattgagaaactgggcataaagtagatttcacacaatttaattcctcactgactcagttataaaagcagccctcaaaaaacttttaaaaacttgaatgtgagtccaacaaaaactacactttcaaagcaaattattttctaataaagtatgaagactaggataattttatattcagtccgttgaaatcatcatctaggaagtcattcagcaggcattcaacaaatacttattaaattaggcacaaaggaacaagttcctaaattcaaataacttttattgttttttgccaaataatttccaagttaaaaacaacaggactgtaacatctatctcctacagacacagtacttattgactgccaggtatgtcttccaattttcatacattaattccactaatttaattgttaattactttatgtctaaactaaatttatataaccccaatactagccaaaatactattctggccccacgatgaccaaaatgagtgagatttctctagatatgagctgcttttagcatgcagaaacaattctgaacaagatcagttgaaaagctgaatatgatcttgatgaaacatagttaaggctgagaagagtgaattaaatatgtacaaaaagtttcccataaaaagacaaaaatcatcaagtgatttgttatttcccaacaactttaaagctggcaaatatttaacaaaaatagtggtgatagaaataaatgattgttgggaaatccttttaaactggaaactttgggctgagctcctgttgctaacaagcacccacataaaattcgttactgcccactgaagcacaaaatatttcctcacagcattaaaagaatcctttcactaattcatatgtgagattttgtacattaggtgttattctcaccatcatctaagatacacaattcaaggcacagaaaaatgaaataattgttttagaatgtgatgttttaaaatactcaattgaatatttactgatagtataccaggggaaaatacataaataaaagacatttctaccttatacccattttccttcctaaatcatcaaaatcccagtttcaataatcatctttcaatcaaatataccccttccaggtcctaccagacaggatgttccctgaatactcccattctactattttttcttttgacataatcagtctggtatgtatgattcctaaaaagtttcaagaagtatggaatcagactcatctccatatctttcagcacagactttctaataagtgctccttagagcacagcatgagatacaaaaataaagttagtgtggtcaatatcaactaaaacaaacaaacaaaaaacatatagggctttacactcagtacttgatattcataaaataacttaatccttttaataagcttagaggtaggcattattataatcacctatttctcatttaaaaatgagataaactaatgggcagaaacctgactcaatgtactcagttaaaccgacttcagatgacactcgtctgcctttgacgacctgacaactacctattaagaagaaaggctaaatacaatacttaaaagtcaacataatcaagattacaattatttcattgaaaacaataaaaagaaacaagatggccgggcgtggtggctcacgcctgtaatctcagcactttgggtggccgaggcggggaggggggaggatcacgaggtcagaagtttgagaccagcctggccgacacggcaaaaccccatctctactaaaaatacaaaaattagccaggtgtggtggcaggcgcctgtaatcccaggtactcaggaggctgaggcaggagaactgcttgaattcgggaggcagaggctgcagtgaggcaagactgtgccactgcactccagcctgggtgacaagaacaagactccgtcaagaaagaaaggaaaggaagggagggaaagaagaaagaagagagagagaggagagagagaaaagaggagagaggggagagagagagagagaacaggaaaaaaaaaaaaaaggaaacaagatgttttgaaaaatccagatatagcctgtctcaagcaaaggtcagtaacaggttcatgtactgatgttgagagtggcagcacatggttcactgtgcaaatgctccattcttcagagggaattttatttaggtataaatcccagagattcaaaacaaaacaattgttaataagatttttaaaatgcgaatgtttaatattcattttctgatactctaaggaatttatgataccacacttactaaccacttaatagctgtttagtgttaggcaaaatgcttgaatttatctatgcttcagtttcctcatctacaaaagagacataaagatagtacttacatctcagagctacaatgagttttaaatgttagtgttcggatagcacatggacgagtacccgtcatttaagagctctgaaattaatattaccataatgtaaatatggtatggacaggctagaatctagaatagatgatcgtagaaaataaacagaaggccgggcgtggtggttcatgcctgtaattccagcactttgggaggccggggcaggtagatcacctgaggtcgggagttcaagaccagcctgaccaacatggagaaaccccgtctctactaaaatacaaaattagccgggcatggtggcacatgtctgtaatcctagctactagggaggctgaggcaggagaatcgcttgaacctcggaggtggaggttgcggtgagccaagatcacgccactgcactccagcctgggcaacaagagcgaaacgaaactccatctcaaaaaataaaaaaaagaaaattaaacagaaatactgggaagggatgactgaacaacaaataaaatgacatgactagcggttataatttagaaaaataaaattggaaatgtattttcagaataaaaagagtagcttaagataatttattttttaaccaacttagttaataaaatatattaaccattacatgaaaataaaattatttttaaatacattttttaagaaaaagcttaataaagacacaactgtaatctttgggtttcagactggaagacagctcagctgatcaaaacactaaccctgccctccatgaagcatttggattagaaatgatacgtaaaggacgaccggtacagtttcctggaaagtgggataaaccgtgactattagtatgtcacaagcagtacacaaaatggacaacgaatagtaaagggaatttataaaaacttaatgaaattgaagaatgagttcaaatactacctactccttaactgttttccactaccctactctatccaaattcattctccctaagccccactttgcttccatcgaatcttatggctctaaaatgatacttaagatcatactttaatattccagtgtacataatggtaagctctagaaagcaaagactgctccttttaattttttgtattattcacaaggcatctaaaaagaaaagtttggtacacaaccagtagctttctatttctcttctgccctgcccagatttgaacttgcacatcttttatgatattttcatcagtttttaaaatattaatttctgtatttgtctcacatatgtataaacaaagtagctctgaattctacaaatgaaatcatgtcaaatacaaatatactagtttctcaacatatatgcatactatcataattaacatactacaaactcatttaaaaggaactatggaatccatggtttctgtaattatgcatttattaaacaaatgctaaactgtccttctatataagaaaccacttccctaaaatatctaccaaaatgttttgcatatagtaagcacttaaaagacatttattattgtctcttaatattcctagattataaactgaaaatagcaagtaacataaaatatactgattacatgattactaagctcctaagccatatggtgctttctcgtgcattccacatgtgtatttttctacattagttagggaaaataaatacctgaaaaattcaagatttattttaaaaactcagtcaggcaacactgaaagagagtattttacctgccttctgtgaaattaaaatgaaaaacacaaaactaaagaactgaaccagagtcccataatctacaaccacaagcaaagtaagaattatgctgaaggatccacatacagtctgccttacttcctcatcgagcaaaagatcacagcctaatgttatatattaggatttccaaaatgtaagagaacaacagcacatagctcattacgttataaaaggtgtttcatcctgggaatgttaagatacaagactaacaggaggttccatcatttgtagttggtaggttgcgacgtcctattcaacctaacggcaccgtggatagctgcagtgttcgtactccccaaatattaattcacagctgtcttcatgtaatcgtgcacacatcactgaaaagcagtgacaaaaacacaactgtgtagaataatgaccctagtttatgacgatgttcaggaatacgtatttatgtgtgtatggaagagctatgttggcataaatgaactttgagaacctcggcaaggaaacaggcacataatttataattccatggggcttaccacaatgctaaacacttatccagtactcatatttgctgactgataatcagaacgttaaaagtttgctccaaaccctgaattttcatttgctcactggagaatagagacaaaatgaaaagaactggttactcaaaaacaaacgcacaaaaaggcctctccccacactccataacccctaaaaaccagacaagggtagaaaacagagtgggggaaagaacacagactcaaatgccagtcttatttcagtgcccctgtaatcttgagcaactcactcacgtattcatttatttatttaataaatacataaataataattgagtttctactacaccctgtgagtgaacaaggtttatgacaggcaagtgaacagacatgcaagctctcaaggagcctacagactagtaactatttatttgcaattgagggagtgacaccaaagttcactgtgttatataaaagcacatatgagggttgactgatcaaggttatatgacaaaatgttaactattttttgaaatcttattttctcatctgtaaaggttacaaggttgcaagaattaaagaaagtatgttgaagacagtgactagttcataatacttaacacttttactatgtaactcctatctctgttctttcctgtatcttccttaaaaaatggcttttcagctaacagggattccccttaattccactgcaggatgtcctttctgtcattatattaacataatcaagcataagcacatcccgcttcctcaattaagaagcctcaaaatcaaagccagagtaaaaaataaattagcaattaatcaatgatccctctgggttaaaaaatacaggcctggcatggtggctcacacctgtaatcccagcactttgggaggctgaggtgggcaaatcacttgaggtcaggagttcaagaccagcctggccaacatggtgaaaccctgtctactaaaagtacaaaaatgagctgggcatggtagcatgcgcctgtaatcccagctacccgggaggctgaggcaggagaatcgcttgaacccaggaggcagaggttgcagtgagccgagatcatgccactgcactccagcctgggcgacagagtgagtttctgtctcaaaaaatatatatctaactgcctgccccaaattatttgtgatgtcatgatttttttcttggtaatgactttcaacctttgaaagttctagaattaagattagagtaataagagcgaatcaaacacaatgttaatagtctatatatgttaatctaaaatatttgttacatttaaggtttaacacatttaaatatctgtaagattatccttctaatttcaactgaaaaatatatagacaggtatctacaacacatcccagcgattcccatagggaaggatccaaagcatggtgctccttgtgcacagtcaggtggcagcaggtatagctactaagaagagcatacctctatactcatgggctgatattcggatgacataatgtctgatgcagattaaaaatataatactagatggtacaaatgcttagtgtattaaatggagttctttcttcacttaaattccaaagtattaacgtgtatttcacacacccattcttctcagcagaaaaaaaccaagggtaattttacgtcattagaaaaactaggtgactttaggtcctctaggcatacatttctcctacacttacatcacctctgtcatccaaaacccataataatcctagacttttcttccaatctttcattaaaatttggctaacaagagaactataaaaagtgatatatttctcataacccttcatcataatttgattagcaaaactataaaaagtgatagttaatgcagcagagtatattaaataatgcagtttttccattttcttgaagatactgaattattttcacttcctttgggtaagactgacatgtacattcaaatatgttaataacttgaaagcattgaaaaaatcattcttcaatgatgttgccagcatgatttggacataggtcatatgaacctagctaacagcaccactgcaaagccttgtagctaataggtggtagtcaagctaaaataggataattcttaggacaatctcgtaccacctttttttttctatagttttgaaaacaggtaaaaaatagctgtatgaatgtcttccttcatgaattacaattatgcaaccgacatttataatttccccaaacactattttaaaaaaaatcctgaacttcttgctagctaaaacctagactgttacactcatgatttttttaataaatgccattttttacatattctatacattatccagtgttataatgatgagtttgttaaacgttaaccattttattatcttatactttactgcaaacacctaagaattcaactacatcagccaagaaaacagtaatctctcagagaaatacaaaatagaagttcagagaatccatgtttttattccttcattaaaaatcatttcaagtatgttcaagtttcagagacatggtgctaaattgaaattcttcaattcctctccctattatcaacccatataactatagaatcaaaaattgtttgcttcagtctttgataacagctctaaaatgtttcactggtgacaagaaagtattttcaaagggtacgttacttgtccactagtgcttaaagccatgtttcctaagacaaaaagtaactctactctttcagaatatctttggcccacttccccttaattaagaaacagatgtaacatgccattcatcacaacactaaaatgtgaatgcaatgaaaaacattttctgagatattaaacaaactttatataacaactatataaaataactataatgcttaaaaagtaagctatcattaataattattgtggttaattatgagagcaagggtcaatttaaatgttaatagtaatcattataattggagaaaacatctttttgaaaacgaccatagacacctcaggatctatcaactgcctgtattctaaaatagtattaaagaacactaaaaataatacttttaatatctagtaagcctgaatggtagatattaacttatttttcacatgtgaaaatttcaacagcaaaagtaacttgtcttacgtccttcaatccataaatagaaggcccagaacctgaactcaaatctgactccttatttcatctctgtcgccactgtgccacataaaaatatcatcacacccactctttttaaggcccacaggaaatctggcacgatctctgaggtccccttttgtcaagctgtcttaagagctcttttgtcctgaatttctccaacagtcctactcatgtgttcttattaatgacatatgtttataaggaactctgcatgtctacatatcatttcatttcatagtactatgtgctactgaaggttaggattcctgcccagcacttcttgaaataaccttcatactcaggtgtttattcagtgaaatgaatctgattggggaaagggagaggatatatcatgttcaatgaatatcaactctctagttcagctctctacatttattaataaagcagaacacataccaacagatcttcacactgaacagaaagtccagtgactacttttgtcgctatgctactctaaaaagaaaagactataaataaattcatgtagccatacaaggtgtgtaactctaaatacctatttacattttggaagagttggaaatggcagaattgttatgtgcctcctaggcttacctcacaggtattcttgccaaaatacaaaattgacattctatggaaaagggcaatctataaattgagttagtttgattttctttgtaaatcatgctgaaagagtagttactacaatctactacagaataaatgaaacctcaacctctatgtctgcagttcataaactacaatttatttacatgtataaaacttgaccttaatgacaacagttagtaacacctaaatttgtatctcttgctcatcaatgaaatataatattttttaatatcaacagccaaaataaagccttcttcacaaaaaggtacaaaatactctcttccttaaaatgttcataaggtttttaagagtgttgaaaattatatgcaagaagcctgaatgactactttagaaatgagtctgtggctcttctcaattatacccattactggaaaaaactaagaacatggacccacaaaaaacagtatctatgtaaaacatgatttccaattttgcttatctcggccccttctagttaaaatttgtatctgtccatcctgactacaaaagggcaggcattgattgtatcttatctttgactggatattcaaacacttagcgcacagcctaccacaaaggaaaaatttttttgaagtctgttgaataaggaaataaagaaatgaactcaactaccttccgtggatgtgagtttttcctgaaaaacaagatttccctagccagcttctatagcttttttccatttaagataagaatcagacatctctctagattacacaaattctaataaactagaatcttactttggcaaaaacctcctgaattaccactttccttcacaataaatattaaaaggagtttgtacactaaacacatgaaattggtgccagggaggaaatcaaagaatatgtagggcaggggcaggtaaacccatttactaaacataagctaaatacaagccaaaaaaggaccaggttaccagatttaccttaaccttctagaaatagctgtgtatcatctaataacacctaaatttatatccctcactcatcaatgaaaatatcctttaatatcaatcgacaaaataaagagagacactatttagggaaaaaagttagttatccggtgtgatacctttgcagtgtgtcagcttaactaggctgaactagagtttccagaatttcatttcttgtatgtttccagttgggatggtctataaagtatattttttcaagaggtggactataaatggaaaacagtggccatttagtagcatacacataccttctcccagctactcaagaaaaaactaatctaagccagacgtggtggtgctcgcctataatcccagttactttggaggctgaggcaggagaatcacttgatcctgggagacggaggtttcaatgaaccaagattaagccactgcactccagcctgagccaaaagagctagagactgtgtcaaaaaccaaaaccaaaacaaaaaacaaaaaaccactctagatactgctgtgagaaattctgcagatgtaattaagaaaagtaatcagttgaatttaagttaatcaacagggagattatcctgggttaacctgacatattccattagaagtctttaaaagagggctttggtcttttctaagctcagatattccaaacaccaactgggtttacaacagtgccctctggatcttccttccttacccatctgctttgtggactctagactagtcagcatgaacttatacaagccaattcctcataataagggagacagagagagctagagagagctagagagagagagagagagagaaagagagagagagagagagagagtgagtgtgtgtgtgtgtgtgtgtcccctactgcttctctggttgaaacttgttaagcttttctttaaagcttcaccttcataaaaattctaaaataaaacttataacatcccattatggcactaacaccataattatagctcatggcatgaacccaagaggctaacattatgatatgtgtttcaaaacagttatagtatgataaggagtattttaaagccaagtaagttaaaatatattccagaatgtcaaatactctagcctacacctctacaccagtaagaacgcaagtagtattcatttcagtatgaaaacatattttatttaataaacagattaatccaataaatatggaaaatagttaagaccagaaaaataaaaagctttcttgaaataagtcatcaaggtattaaaggtatattgaaagaccataaaagccctcaagcttaatttaaaatgaagttttaggctgggcgcaatggctcacgcctgtaatcccagcactttcggaggccaaggcgggtggatcacgaggtcaagagatcaagaccatcctggccaacatggtgaaaccctgtctctactaaaaatacaaaattcagcggggcatggtggtgtgcgcctatagtcccagctatttgggaggctgaggcaggagaactgcttgaaactgggaggcagaagttgcagtgatcccagatcatgccactgcactccagcctgggcgacagagccagactccgtctcaaaaaaataaataaataaaataagctttagaaactctacatttttcccaaaaaaggccccataattgagttgcaagcaacaggtagacactgaggggtacaatgtatgtatgttgttgagtgtcatgtgtgcatatatgtactttagattttctaaaaattgcctgcactcctaaggaaagacattaatgaaggacccacaaaacaaatattaatcttaatttaccttaacatcctagaataccacatttagttactatcccatcaaaaggtattctctttaaaaataatcagattatatcacaatgaggtgacagatttgagagataaataatcagattacatcacaatgaggtgacagatttgagagataaataatcagcttataccacaaagaggtgaccgatttgagataaaaataaaaagtgaaaagctttgattacatagcaaatgtcaattgctggacttattttgtatcttaaatagaaaacagtcactaattacctatgccagaaaaagtcaaatattcaatattcaaagtgctttctgaaagtttaataaactagaaataagatcacttgaaattccacttcacatatagaatgacctatcgccatatcattatatgtaagtttcccttttgttgtaacacaccaatatatttttatcactaatcaaatatacagaataatttcaaactgttcttttgaacgttatagtatcaagatgtagtatgtgttaaatcaagtgtatttgatcaaatttcatcattttgactgccccaaaatattctgctacacaaagaaccacaatttatatttccatctctccatttatggccatttatactgattccaatttattattattataaacaatcctgcagtgaatatcctcattcccatcttccaaaacacatgtgacaagagtttcttaagaaactgacacataatgaaatttccacaaacaggaccttcttaaaaaaaaacacacactattagttgacagtgccaaattgctttccaatatgtctgtgtctatttacactgacttgtgtgggagttcatatttctccatatcctagacatagctttgataacattgaggacatcaaatggtacattattctcattaaatataaaggtgcattcgcttgagtattaataaggtaaagcatcttttcaaatgttcatttttaattcaggttttctgccctgtgaattgcctgttcacacactttgttcatttttaattgaatttgtgatcttttaaaattgtttttgaatgaatttttaataaattctaaatatacacattttgttacagatgttgcaaatacactcccactctgtggcttgtcttttaaatggggtatggtgtcttttgcataaaaaggatttttaaaatacatttcaatgtagttatagctactgatattcctttataagttttctagtcagtaatcctgctttacaatgaagtcataaatgtatctcctatgttttcttctagtggttgagttttttgctcttcatttttgggcatgtgatccatcaaaagatttatttttgcatatgcaaattcaactatcctaatatcatttattaaattcacgcttcccacttctcatgtaaatttctctccatctacctctttctttccacaatacacacatacatatccgagtaaaatagcttagtctaattccattggtcaacctgcttatccctcagtcatacagacaattatgaaactgataagaattaaatgctctgaaagcactcctccatttttcttttagaactgtcccaactaccaatgggcaattttactatcttaagaattctgtaatcaattcattaaattccaccagaaaaaaagttaggatttctaactagattttactatatagatttgaaaatacatatctttaagataaataaattattatcagttttcaaatgtatagctctaaagctgtttgttgcattttccatgattttttaaatacagtatttcaaatttggcccttgatttcacttacttacagtgtgtcacctattctaagacatttcttaaaaagtattttaaggtttttttgaaacccgatgtgtctcattaatgccataagctaggcagcagtaagccacaggtgttcctgtctaaccactgttgggtgagctctgagcagccctcaatgttcccactgagtgtgccagagtgcaagggttatctatctcctctggctgagcagtttctgcagtaacatatgcaactgaggaggtcaagggtagaggactgccttgtctgcttcttgctcaagaattgtggggaccttggccctgggctcctcttctgaaatccagcccaccaagagcaggtgttgtctggcctctgcattaccctgtgcacaccagggctcagggcatcagtgcaagtatgctaacactctgctactatttttgctgtaaataataaagcatggcttctgattcagaagtcctaggtcttctgccatcatccatgaaactgtggtggcaagctagcttatcttacaagataaaaatcttaggcgcttcacatttcttgacaacaatgtgcacaaaaacttgaaatggcctgggaagaaattctagaggagaatagtaagtcactcttttaaaaatgctgcatcatcgaacattcctggtagtatagattgctgtatgttgtgaaaaacatgactaaaaactgatactgaactctgcgaaaaagtcttaggcattcactaattaatttcacttacatttttcttttaatgtataccatgggatacaatgaaatgacaggacgaaataagtttagaaaaagcctattcatattattcatatacaaataaaaactctgtgaactgcaagttctctgtcaattaatctgcttttttgttttgtgtattttatgtatcaccaagttggtgatacataaaataattacaatcaagtttagttctacttgttttttcttaatcagttttacaaagtttgtctcatttgtaaattttcacagaaacttccttcattttagttaatcatcaatatagtcgtcctcctcttatctacaagcgatatgttccaagacctgcagtggatgcttgaagccatggacagtaccaaacactatatacactacgttttttcctataaacacatgcctatgataaagattaacttataaatgaagcacagtaagagatgaacaacaataaaatagagtataacaatatactgtaatgaaagttgtgtgaatgtgatctctcgaagcatcttgtactgtaccacaggtaactgaaaccatgaaaagcaaaactgtggataaggaaggactactatataattttcaatacattttctatttattaatttttcctctttgcttttaatctactctactgttctttccagatgcttaagttaaaacatacatcctttatggccaactcttagtttttaatttccagctcgattccactatgattaaagaatatactgtgaataatttcagatgtctgaaatttcctgaagctttatggaccagcacgtggtcaactggacaatatgtaccatgtacactttaaaataatgtaaatagtgtcattgttggatgcaatgttctttttgataattagataattaaatgaagtatgctacttgtgtagttcagaccatctctattcttactgagtttttgtctctttatcagttattaggagttgtgtgaacagtatgactgtggacttctgagcttctacttttagttctggtagtttttgctttatatattttcaagctatgttacttgatacacagagacttaggatcatgatctcttcttgctggaatgacctttttatatactttagaactttctatattaaaaaataagaaagtcttcttcttttccattctgtatgccttttattttgttttactgctttattgcacttgctaggacctttagtacaaattggaatagacagggtaaaatcaaacatcttcggcttgtttgtgaccttaggaggaacacactgagaattttactgctgagtatattactatgtcttttcataaggcgaatttatcaaactgaggaagtttccttctaagtttgctgggaagctttatcatttttgtgtattgaattttgtcaaatacttctgttgctcctagatataattatacagttttacacctttattctattgttatgattaactgcactgattagtttcaagatgttaaaactaaacttgcattctcaaaatatacctctcttggtaatgcagtatcttctttttttatcgttaatttaatttgctcaaattttgtttaaaatgtttacatctatatccatgaagaatactgattctttgttttgctgttatctttgttgaattttagtatcacagtaacaatggtagttaccaatttgttataataaaatgagttaagaagtattctcatttttttttcttaatggaagactttacataagattcacaatatttctttcttgaagtttgataaaatttattagtgtggccatttaggcttcacattgtcttggtggaataatttttaattgcaaattcagcttctctaatcaatatagggatactaaaattttctattgctcctgggtaataatttgtgttttccaaagaatttatttttttcaactaagttgtctaatttactggcttaaagctgtttatgatattctcttaaaaggccttttaatgtccatatgatcgacagtgatgtctcctattttattaaatatactggtaattagtgtcttctctcttattctggattagtctaattagagctttatcttaactaacttttccaagaactctttttagtttcattatttttctctagttgtccgtattctatttcaagaatttattattatttcctttttttacattaccttgggtttaccttgctgttttctttaaatgtttaattaggtaggaaattagataattgtagttttattccaacataattaaatatataaatttcctccaaacactgctttagcttcatctcataaattgttatcttgcatttccacaatcactcggtccaaaatattttctgatttccctttgacatctcttgaccaactgattacaaaaaagtgtgtcactttccaaatacttgaaatttaattccactgcggtcaaaattcatactctatataatcttaatcctttgtaccttatggcccagcatgtacaaagcccagcatgctctgttttggtgaatgtaccatatgcatgtgaaaagaatgagaattctctagctgtaagatataacgtttaataaacatcaatatgatcaagaatggctaataataaatttcaaatcttctgagtaatttttttttattagttgctgaaagagttacattaaaatctcaatctgattgtggaactatttctgcctttagtcagttttcatgtattaagtcattctgcattaaataaatatacacttatgattgatatgtcctcctgatgaacttttgttactatgaagaatccacattacctgatacaaaatttttctgttgcaatctattttacctgatattaatatagtcacttcaatcttttactgttttcttaaaatatgcttttcaatctatttattttcaacttacctgtgtctagtatttctctgtaaactgtacatttatttttttgagataagtctggctctgtcacccaggctggagtgcagtggcacaatcttggctcactgcaacccacacctcccgagttgaagcaattctcctgcctcagcctcccaagtagctggggttatagggatgcgccaccatgcctggataatttttgtattttttaagtagaggcagggtttcactaagttggccaggctggtctcaaactcctgacctcaagtgatccacctgcctcggcctcccaaagtgttgggattatgggcatgagccactgcacttggcttgctttttagtttacttattattattattattattattattattattattattattattttgagatagagtcttgctctgctgcccaggctggagtgcagtggcacgatcttggctcactgcaacctccacctcccaggttcaagcgattctcctgcctcagcctcctgagtagctggcattacaaatgcgcatcaccacatccagctaattttttgtatttttagtagacatggggtttcaacatattgcccagactggtttcaaactcctgagctcagggcaattggcccatcttggcctccaaaagtgctaggattacaggcctgagccaccacagccagccttgcttttaatttttaatccatgatgacaatctgacaatctctttcattcaattgaagtggttcttccatttctatttaatggaatttttgaatgattaggtgtttatctaccatttttactactgtttttctatttgtagcctctgtattttgttccttagcttcccttccggactttgaacaatatatctatatatacattatttcaatatattttataattccatttcagtttttaagttatacttaaaggctctttacatataccttttggcattgctttttcagttattgctataggggatacaatacaaatctttaacttttcaaggcctacttacaatcaatattatactgtttcacataatatgtagaaacctgtaaccacatacgtccacgtgtacacatacaagaatcaaaaactccacaggacaatactattcccccccccctttattaaatggtcatatgtaatataaagaaattaagaagggggaaggagcaaaaaaaatggttattttcctctttatgaaggtatttaccagtatcagggtaaaaatttctatgtaatcaactttccatctgctctcatttctctttagcctgtaaaattccctttagcattacctggtgtgcttatctgctggcaattagttctgtctgttatctttcatttcaaaatggctttctttcacctttatttttaagatattttcactggttatagaattcagggttggcaatttcttacttttaccattgattgattgactgactgattgactgactgactgagacggagtctcactctgtcacccaggctggagtgcagtggcacaatcttggctcactgcaactccgcctcccggattcaagtgattctcgtggctcagcctcctgagaagctaggattacagccacctgccaccacgtccagctaatttttcaatttttagtagagttggggtttctccatgttggccaggctggtctcgaactcctgacctcaggtgactcacccacctcagcctcccaaagtgctgggattacaagtgtgagccaccgtgcccggccagtaaaatatctttaaaaaggtaaaagtgcccaagcacggtggctcatgcctgtaatcctagcactctgggaggccgacgtgggtgtatcacctgaggtcaggagtttgagaccagcctgggcaacatggtgaaaccccatctctactaaaatacaaaaattagctgggtgtggtagcacatacctgtaatcccagctacttgggaggctgaggcaggggaattgcttgagctcaggaggtggagcttgcagtaagccaagattgcaccactgcactccagcctgggcaacaagagtgaaacgccatcataaaaaaaaaaaaaagaaagaaagaaagaaagaaagaaagaaaagaaaaagaaaaaaagatattttactctcttctggctctctaccatgttctgataagaagtgagcaattaatcatatcattgttcccctatatatggtgtgtaattttttcttgctgctttcatgattggttctttataatcttcggcttttcacagttttaccctctgatgtaactcagtgtagtcttccttgtgttcattctacttgctgtttcttaagcatcttgaatttgcatatttatgtctttcatcaaatttgtgagatttttctgccattagttcttcaagtattttttttcagtcttatttaccctctttttctaagactccaattatacatatgtcagaccacttcacaggccattcctacctctcaattttttttctctttgttctttacaatggaacatttctattgctctttcttcaaattcacatactctttcctcaacagttatgtcatctagtgaattttttatttcagatattctatttttcagttttaaattttccattggttcctttttttgcttctatttctctgtaagaactgtctttctgtattttgtccttatgagactagttaacagctatttaaaaaaacaaaaacaaaaaatctgtctcttagttccaaaatgtaatggttggtatcagctgattttcttttgagagtatgatttactttcagagcttaattttaaactgtatcctgattctagattattttgacgaatttttttcttttgtttctggttctggttttgttttcgttttgttttgtagtaggcaatatcttgattcaattgagggctgcacactttgtttctcaggtgccaactatggtcttagttcacatctttagatgagatgcttatgtctactctgcacatataatcctggggtcagctacaatttggggattcccgttctcttttctttcccttctttttatctttctccatcagcagagatttctctgggttggaatgagtgccacctaatgtgctttgcctcaggctaaaagccaggaaaactagtattcagtgtactaacttccttccttcaaggaccaactctatttcagactctgcttacactcatcctacagagttccttggagtagctggtttttatcgtgcatattttagagttgcttattgcaggggattaagtatgacagaaatttactcattcattaccggaaacagaaaccctcaagttcttattttggcagttcaaagcccattcttccatagaaatatcaataatccagtattcaggccatttggcagcttggccctagttctagttacagtattatctccagtcctcctgcaaccagaaacatttccttggtgacaggcataacttttaggctgtattcacaggtgatacagcacacccaaagcatcgtttactcttgtgagactggcttcaatgcccattactcatgttcaaagtcaatttcctagccatttttcctttaatcatcgcagaatcaagttggtcttctagttcagtccttgcttacagctatgtgcttgtggccacaggattactatacacaaacatgttaatcaaagttgccattggtgggtgagagtgagggatgggaggaatgaagtgggtaatataatcttaaaacacaacactgaaaggggtgtacttatgtatgaaaatagtattaataaattcaataggagatattaaaaattctagcaattaactcaaatatacaatactaagggtcatggtaagcattcctaagtgtctacaatgtgccaggcactatgcacattatagtggttaagataagagttacaactcttaaagaactctgtaatccactatagcagactaagtgcttaagtaatgatgtggctaagttataggatcaaaggagtaggaaagaactaacttttctgaaaatattgcctaagacttagaaaatacattgaaaaatctaaataaaatccagaaaccaggtgcttgggagattttccagatatcacaaatcatgtgatgtaaaagggtattcttcttcatttgtacaatgcaattttctgtggttacagatgtcctgtacaaaatacagaaatattcttaatcataaaactcccatacatggattttactgactgatcttgttcccttatcataattttaacaaccacttttatagtgcattcattattcaacagaccaacaactgaaatgtcaattcaattgggaaaatctcacaagaataatgaaaatctctctgatacctctattagctctcacactgctacaaaggtaccacctgagactgggtaatttataaacaaaagtagtttaattgactcacagttctgcatggctggagaggcctcagaaaccttaaaatcatggtggaaggggaaaagagcaccttcttcacaaggtgatggaggcgggcggggtgggaacacatctgccaaacactttttaaaccaccagatctcatgagaactcactcactatcacgagaacagcatggggaaaaccacccctatgatccaatcacctcccaccaggtccctccctcaacacatgggaattacaattcaagaagagatttgggtggagacacagagccaatccatgtaattccgcccctgacccctccaaaatttcatgtccttttcacatttcataaccatccataagatcccactagttacttccccaaagtcttaactcattccagcattaacccaaaagtcaaagtctgagtctcatctgaaaaaaggaaaatcccttctcccatgagcctgtagaatcaaaaacaagttagttatttccaagatagaatgggtgtacaggcattgggtaaatgttcccattccaaatgggagaaattggccaaaacaaaggggccacaagccctatgcaagtccaaaacccgggtaggcagtcattagatcttaaagctccaaaatctcctttgactccatgtttcacatccaggacacgttgttgcaagggatgggctcccacagcactgggcagcactgtccccgtggctctgcaaggttcagtcccctcggctgctttcatgggctgacaatgagtgcctgcagcttttctaggcacatagtgcaagctgtcagtggatctacttttctggggtctggaggatggtggccctcttctcatagctccattaggccatgacccagtggggactctgtgtgggggttccaacctcacatttcccttctgcactgccgtagcagaggttctccatgaggggtccgcccctgcagcagacttctgcctggacatccaggcgtttccatactttctctgaaatctaggcaaagattctcaaagctcaactcttgtgttctgtgcacccacaagcccaacaccacatggaagctcccaaggcttggggcttgtgtcctctgaagtaacagcccaagctgtacctcaggccctttaagctacagctagagctggagctgctggaatgccggacacccattttttcctcaaaatattaggaaacatggttttcagaaggcaaagaagtgtaagcagtgtttttaaaatgggtttaatagtatgcttggattcagagctaataaacatttttaaaaagaagaggagcaagtcccacccagatgaaccaggtaaaagaaagaaagaaaaagcatccaaatagcaaaagaagtcaaactatctctctttgctaacaatatgatttgatacctagagaacactaaagactgccaaaaggctcctggaactgataaatgacttcacagtaaagtttcaggatcaaaaccaatgtacaaaaatcagttgcattcctgtaacattcaagctgacagccaatgcatcccatttacgacagccaaactcacaccctcaaaacctagaaatacatccagccaagaagttaaaagatctctgtaaggagaactacaaaacaaaacactgctaaaagaaaccagagatgacacaaacaaatgaaaaaacatcccacgctcatggattggaaaaatcagtatcattaaaatgacaatactgcccaaagtaatctacagattgaacgctatttctatcaaactaccaacatcacttatcacagaattagaaaaaactattttaaaattcacatgtaaccaaaaaagagcccaaataggaaaagcaatcctaagcaaaaggaacaaacctagaggtatcacattacccaacttcaaactataatacaaggctacagtaaccaaaacattatggtactggtataaaaacagacataaagaccaatggaacagaatagagaaccagaacatctacagccatctgaattttgacagaaataagcaatggggaacagatcccccattcaataaatggtgctgggagagctggctagccacacacagaagaataaaattagacccacaaatttcacaatatacaaaaattaaccgctgggggtgggggctcacacctgtaatcctagcactttgggaggcagaggcaggcagactgcctgagctcacgagttcgagaccagcttgggcaacactgaaaaaccccatctctactaaaatacaaaaaaaaattagcccggtgtggtggtgggcgcctgtagtcccaggtactcaggaggctgagccaggagacttgcttgaacccaggaggcggaagttgcagtgagccaagatcgagccactgcactccagcctgagtgacagagcaagactctgtctccaaaaaataacagtttaaaaaaaacctcaaaacagattaaagattaaaatgtaagacctcaaactgtaagaatcctagaagaaaacctaggaaccatcattctggacatcagccttgggaaagaatttataactaaaccctcaaaagcaaatgcaacaaaaacaaaaattgacaagtgggacttaattaaactaaagagtttccgcacagcaaaagaaactatcaggacagtaaacagacaacctacagagtgggagaaaatattcacaggctacgcatccaacaagggtctaatatctggaatctataaggaacttaaacaattcaacaagcaaaaaaacgactccattaaaaagtgggccaaagcaatggggaaaagaccccctatattcaatcaatggtgctgggagagctggctagccacatgcagaagaatgaaattagacccacatctttcactatatacaaaaattagcagctgggcgcagtggctcacgcctgtaatcctagcactttgggaggcagaggcaggtggattgcctgagctcatgagtttgagaccagcctcatctcatttcttttgagaagtgtcttctcaaaaaaaaaaaaaaaaaaaaaaatacaaggggccaacaaacatgaaaagatgctcaacattactatcatcagagaaatgcaaataaaaaccacaattagataccatctcacacaagtcagaatggctactacgaaaaaggcaaaaaaacatagatgctgttgaggctaagaggaaaagagaacatttatatactgttggtgggaatgtaaattagttcagccactgtggaaaagaatttggagatttctcaaagaactcagaactaccacttgacccagcaatcctattactgggtatacatccgaaagaaaacaaccactctaccaaaaagacacatgcaacttgcatgttcatcacagcactactgacaacagcaaagacatggaaccaccaaggtgaccatcaacagtaaagtggatgaagaaaatgcagcaaatacataccatggaataccaccaaataaacagttgtggaaattagtgagttcatgtataaaataagttcaaaatgataatataaatttcaagtttgccataaatacaatcactatttttctcttagattcaacctacaatggagcccctttatgaagcacaaaaattttaggtggggggcagggggataaacattcactttatcttaattttggtccaggttgaacttgctctctcagagtttaaatcatcgagaagtgcttactgactcaacattaggttcaaatgggttaacatataaaaagctttaactagtctacaaggcttctaaatgacatttaaccaatattaagaatatacatatatatatatttttgtttgtttgtttgttttgttttgttttgagacagggtctcactgtttaacccaggttggagtgcagtggtgcaatctcagctcattgctatctccacctccccagctcaagtgatcctcccacctcagcctcccaagtagttgggaacacaggcacaggccaccatgtctggctagtttttgtattttttgtagagatggggtttcgctgtgttgcccagtctggtcttgaactcctgagctcaagcgatccacccacctcaacctcccaaagtgctgggattacaggtgtgaggcaccatgcccggcaagaatataaaatatctcttaataacctttttgtgaggcagcaaaaaataaaatatttagtctatgaaagcatacaggacacataacaaacagttttttatcctcaaaggatttaccaaaaacaaagctgccaacaaacagctggaaaaaataaagttaattttcttcacctcatgtcttccaaacagataaataaaggcattatagctgcttaatacaagttttaattgagtgctgtcactggtggaaagaaagtgtagaaccactactttctgtatcacataaagtacgtaattaacagccattctggcacaatcccttatcaccaaaatacacaatggatgctaacttctctcaaagccaatgctcagttacaacaaagctgagctggtgtttcagggtcacattcatttctttattacacaagcataaatttactgctcagtcagacacctataattaaacacaagaagactataatgctaatattcaggctagcttgcatggaacggggttctccctcctccccgtaagatgattgcctttcattttagagtttcaagtagctacagttcacttagttttgattacatagcaattagatatgcaaatgcataagatccagaaaaatacttttcaaacatcagattgtgagcaatcaggcccattctcttctcttgtatgtacaagcagctcattaaacaactattgtctaaaaaaatctctgcctcaaatgctttgggttttttttttttaatgttaaaacattcaaaacacatccataaacgaaatctcttttggccacctagtgagcagtccatgccagtgttgggtggggagcactttgagtggccaaagaacacgccttaattcacattatccatctgagtatttcacagcttgccataaaacttttaaaaatttcttttaatatataatttaaaagtcattgtattaaatgacacctgttattaacaaaataaaaaatactgccaagtattactaaatattccaaccatttgactgagaaactattttcatcttattttgtgggtttctatcagaagctacatgtgggtgttactatggagaatcacgcatacattggaggggagaatttgtacttcataagtatcaaaaattgtcagttatgtgtgtgggcgtggcttgaaaacctaatatggccaccaaagtctttgcaaaatatgctcacatattgcctctagcttagcaattaattttacttttaggttttacattcaactttccttaacttcgactccaactaattcataaagtatttgttggttttttctctattctgtaatttaagtcttattcagttgtttatttaaatttctaagtgtatgcattatttgatgctcctctacgtcagaaaataagaaatttcctgtaaaattctgtaggaagaacataatttttttagtaggcaccaattatgtccacatttcattgaggaaattggaaatataaattagtccctcctgaagaagacagcctgggtaaggaaacaaaagcaaacaataaatataaacattacattgtatatttagagaacaagtgctttggaaattcagccaagattagcaaatgttgaagaattctaacagcatggaaataaaatgaatctgaagacgattcccagtccatgccaccatctcttgcctcaacaactgcaacagccaactaatgaatccccttccttcaactcttgcccaactccctacacacatacatgtctctaattgctaaagacaactcttgctaaaaataaatatcatatcatccctctgcttaaaaccatcaactgacttcctggtacttccaataaaattttaccaagcctatagagaagcatatgaacagggacataaacgtcttctcttcccactttccacccttgctgactttgctattccttggacagtcccatcacattcacaactgagagcttttgctctaacttcacccagaaacattcagtctgcagacctccccatgtcaaccacccatcagagtctctgtttagatgtaacttcctcagagtccttcattggccctcctagttaaaagccttccacccagcccatacttacattgcctggcattattataattttcatggcacttatccctatctgaaattacctttgttcgtttaattgtttagcttctatcttcctaaattatgctccatgagagcaagaacctcccagttttgtgtctagtccagagtaggaaataaaaaatacttactaaactatttaacaaactttgaaaagtagaagaaagaatagtctagggggtggcgggtgggtagaacatgtgaaaggaataaagatagcttgattttttagaaggtgaggacaggattgacaacacagaagatactggaaacattgtatgagggagacaaaggacttggttgaattatttccattaaatgttaaactaaacgtacactgtcagtgatgctaacaaaacaaattcacgttttagcatatatttaatcaagcctagcacttaatgtcacaaagtgtcctagtcttccttgccaacttgataaaatgttcttcttttacatttaatcatatcatcaaaggagaattcctcaaaagtgatgagtcaatgactatcttcatctctttatcgtcaaaaaaactcacttgctgtgtctagattagctttggtttatcagtggcctatctaaatattacaaattggtccaagatatgtcatacatgtaggtaaacacgaatagaagtcaaataagttcaatcatcactattcctgaattatttttaatactgcaagagtttttcagcaaaacacgttgaaaccagtgtaattgagcccagattgagcatccttaatccaaaaaaacaaaacgcttcaaaatgacacattttgagcactgacatgatgccgcagtgtagaactgcatacctgtgtcgacacccttgccctttgatagttcaatatacacaaactttgtttcgtgcacaaaatttaaaatactgtatgaaactaccttcaggctatgtgcacatgaatcaatttcgtgtttagtattcggtctcatccccaagatatctcattgtatatatgcaaatattccaaaatccaaaaaaacccaaaatctgaaacattactgatcccaagcatttcggatgctccatctgtataactaaattcatatgatatcaaaggcaatggaaaaataaaatgagcacgcttagagtctagttttatattctaacagcagacacacgtacaaacctgtcaaatatctagaatcagtttttaatcataaaaaattatttctaaaaactagtgtaatattcttcaaaacaatgtgaggaaaaaaacaaactaagtctggggaattactccaacttaaaaggggagaggagggaaagagggagacagacataagaacaaaaggaagaagggaggggcctgaaagtgaagggggatgagggacacaaacatggtggccaatgcaccaagagtcacatatggtaacatgctacacatggctaagtgaggtgaaaggtgtgtaggagagctttgtactgtttttataattctgcaagtttaaaattatctcaaaacataaaattacaaacaggaattatttgtccaaacttttatttcttcaaattttctgtataaagttgctctgcctaaaccaacattgtccaataaaactttctttaacactgagaatggtctttatctgtgctgtacaattgtgcaaatttgttaaatgactgagggcagaaaggagttgaggataccttccacatatacattttttttttttttttttaccacagctgcggtaggagcaaactaatgaagaacatgaattaaatcctataagcaaataagactactggaggacaaaaacatccactgatttacatatttttccataacttattttcttcaaggatcatacaaaatttagttcttattctaacagcaatacagtaacagaaatttttaaagtagtattttaattttatatcaaaaacttcataaggccgcagtatcactccttaacaaatcccatgatagctagtaacaaaagtagatttaagaatgacactagtgttttgtagaagtcacaaacactaaaacaacacccaaatgtgaaggtgactatgtaagttttcatctcaaccagaatgttttggaagtgaatggagatgctattagtaattacaactagacaataaatatagctaaaactatcctaggcaaatcaaaacttaatgccactcttccaaaaagctatactgagaagaaaaattaagcatgctatcaaaatacaaaggtaatagggttttaacaaaaacatggattttttttttttaacaaacaatatctactcttattttttcctaggtcattaggtaataaatatagcacatctagataaaatagaactaattgcctgagtaaattcttacttatacagtaaaagcaaattcctccaaagactaaaacactgcaccaaaaaattctttaataagttaaaaaaaatttgctactgaattaagaatttcaaatgtgaatttttcatttttaacatacagaaaaaagtaaactatacaattattaaaagcaattttaaaaattttaagtcaataaaattgttttaaacagcaaaataattgataaagagcgaaatttccaatcttcccctagagaatgaatttccaaaagaatttaagatttaactgaacaaatgctagaacaaaactaatgatggcacaaaatggcaaatatctatataaactactgaacaaggtaaaggccttaaagcacaacactaaagacagaatccacaaaaccacaataaaatatactttaaaatattcaattaataatgtctttatgcaaaataattataagcaaaattaaaagacaaactactccttccttcaacacatatttactgagtaccaactacatggcaggtatgtacaattctattactgaggacagaacaatgaataaaagagacaattctgctctcaatgaacatattcccttaagtgagggtggtagtaatatatatgtagaacatgtcagggctgttgatggtaagatgaaaaatacaagagagcaaaagggcaagaaggtttactctatgggggccaagtggttatggaaagtctctctgaaaagtgagattcaacaggatctgaaataaagggataaatcaagtttacacatacataagggcagagtattccaggcagagggagtagcaacaccaaagccctatgatgagagcatgtgtatgttcgaggaatacacaaagaggaggcaaagagtagaaaactctagggaggagcaagctacaaggccacgtagggcctttagccacagtaaagacctgactctaactgaatacattaaaatatgctagaagattattctttaaattcactctggttgctgaaaagagaaaagggcggaagaatggaaataaggaaatcagaagactacttagaggaaaggcacaatgtagtagttaaactcaagccagcctgggttcatatcttggggccaagcaactcaccagccacagaaggtactttacctcctccttaatgcttcatttcctcatctataaaattagaacaataactgcctcatagggctttcagaggactagatgggttaattcacatggactgataacaatgcctaaatcaaagctcagtgtgttgaagcccttaacaataacatcaacttattgttgtcaccacaaccactactatcaccatctaaccaagtaaagatatcaagcagtgtaaaagtcaaggagagagactctaaaatcagcaaacgaatgggatatgcaagaatacatgtaatactgaaagagatcttaacctattagaaatgtcagacaatatattcattacaattaaatgttaactaacaaatgtaaagggaatgatacgaaaattggacaaaagacattacaatcctaaatttgttaggaaagaatatttacaaagtttcaaagtatttctcctcagatatgatttaaaaggagaaaaagttacctttacggtgacaatacataactcacactactttaaccaaatgatcagttatcaacatcaaaaatgaggcaaattgacatcatctaactgctaatgtgatggctgagaaggacacaacatcactttttaaaacattcttgtgaaaaatgcatggcctgaatctagtcatgaagaaagacacacacaaattataaaagataatgaaaagtctgaggaactgttccaaattacactgtaagagacagggcaaataaatgtaatctgtgatctggactagattctgaatcagaaagaacttacaactaatgaaaaattggaaaatttgaatttagaatgtccatcaaataacaatattgtaataatattaaattttcagaatttgataaagtaactatgtaaaagaatgtccttggttataggaaatgcactctaagacagggatgaaggatcataatgtctgcaagttgctctcaaatgattcagcaaacggtaataattattttatatatgtacatacatacagacacacacgcgcatgctcacacacacacgcaactctcattatttgtggtaaagtcaccaggaacactgaattagccaatactgctcctcaaggaaatacagggttggttcccacaaacctctggtcacattttcatcaaccatcaatacataattcagttttatatgtgtttctgttcaaagacaccttatttaggccaagcgcggtggctcatgcctgtaatcccagcactttgggaggccgaggcaggcagatcacttgaggtcaggagttcgagaccagcgtggccaactggtgaaaccttgtctctactaaaaacagaaaaattagccaggtgttttgacacgctcctataatcccagatacctgggaggctgaggcaagggaatcgcctgaacccaggaggcagaggttaatgtgagccaagatcgcgccactgcactccagcctggacgacagagtgtgactctgtctcaaaaaaaaaataaataaataaataataaaaaaagacaccttatgattctttaacattcaacagccaacagcagttaactcatgcctgaactaagcttctctaacataagtattttctccataaggcacatcacacacagtcttcttgctgttaggaatcctaaatcctagacaccacctcagcactatgcttgagggacattttaaacagcaaaatcataataaacagtcaaaaaacacaaaaacaacaataacaacaacaacaacaaaaacaaaaaaaaaacccaaaacgtgacactaagcagaccatgaaaataactttttttaacagtgtatgaactgaagtaaaaaggtggtggtgtgtcatcttgttctatctcaatatcaaaaaagagcatttgggtgactcagatttttattgccactgtgtgcgtgtctgaatgaccgtgaaagtgtcgccagtaatgatttgagggttacacataagtttcagcaagtaggtgaacttccaaataaaaaatcaacactgtgtgtacacacaaatgaacaaaacgttactacagttgtcccttagtatccctgtgggattggtcccaggaccgcctccctaccagtgctcaagtcactgatataggaaggtacagtatttgcacagaactcaggctcatcctccatatactttaatcactagattacttaaaatactgaatacaacgcaaagactacgtaaatcattgtaccatattttttatttgtattattttctattgttgtattattattttttattatttttcctcccgaatattttttgatctgtggttggctgaattggaggatgtggggcctgcagtatggagggccaaggtatacagcaaatttaggttgaaggtatacacaaattcactttgttagccttgtaattattctgcatgtataattttttattttttcaaaatgaggatgaaaagaaaatacaaagtgggggtttacagatggcagcaatgttaggcaataaacaagtgaaacagataagctttaaccttgttaaccagaagtatgtttgttgtatttttgtctatatttttgtccctttaaaaaagtgattttttagaagattcgttacataagcattttcattttctgagggagcttacaatttcaaacagtgaagttgaaaggcaattttgaaatgcattttcaaccaaccaattctacacatttatctttttttgttgtacttttaagttagagaagggtccaaggtggtctcgaactcctaagctcaaatgatcctcccacctcagtggtggaatcccacctatagtgctggaattacaagcatgagccatggagcccagtcacatttatcttaatgataaagtacagatattcttcacagcatttttatagtaaaaacaattattttaaaacttcaacaaacaatatacctcagtacacatatgtacaattaaatgctacttataaccattaaaaagtattgtaggctgggcacggtggctcatgcctgtaattccagcactttgggaggccgaggcggtggatcacctgagttcaggagttcaagaacagcctgaccaacattaaaaccccgtcactattagaaatacaaaaaattagctgggagtggtggcatgcgcctgtaatcccagctattcaggaggctgaggcaggagaatcgcttgaacccaggaggtgaaggttgcagtgggccaagattgcccaatgccctccagcctgagtgacaagagcaaaactccatctcaaaaaaaaaaaaaaagtattgtagatgactttttagtacgtaatatacttaaacaaaatatatcaggtcacaaatacatagatctcaaaatatgtattaacacataagtaacggcgctaaatggggaagattagatttttaaaataccagaattatctaaattttttctacactaaacgtgaaaggctttcataattaagaaaaaattcatttttatgttataaaagatgaggttcagtatttgctttcacttcttttgactccttttaaagtacttactcgtcttaaatcttaaacgttctaaacaatgtgctgttgtaacacttgataatattacacaccctgaagcatccatataggcatccgtttactcacttgtctattattcaataatctcactactgagataacacaaattattattcaaacattaatcttattagttacaaagataaaattactccaaattttcttcacattagattttttaagaaaatttttttctatttgaagtgactagtcctctatatttagactaccttatacttattttaattcaccaaaaatcttaagtttttgcagacctttttaaaaacattcttcactatctgctataatttctattactgtttttaaaaatagttaaacgtaacaattcacaaaatgaagaataatttcaacaatctgagattcacaattgttgttaaacattaaacacagccccacaaactatgtcctataacaacctgtgatttaaaaacaccaaactaaaaattataggtatttaaaatcgagagttaacaattacatgttttaaaatctaaagaacaacaaaataatttaatagtggtctctcataactgaagaaataaacagaaaactaaaactaataggatagaataggatggctccctaggcttatgaaacggcctaataatttgttgttaatatattagactgaaaaattatttccaactaaggttaacgggttttgaaaagatcaattgctgcagcattaatacacatcagcaacattccactactcactctgtcaacagagagctgaatcctctaaaaagaaaatgttacataagacacaactacaagatgctcaaatattccttaacgaaattgactgcaatccaatcaagacttaattttaaaaggctcattaagagcatctagtgataaaatggactctcccttttcactgagactcacgtctcatttcattagacatgggcaattaactcatcctggagttatatctatggctgagtaatgagatgaagttttacaggttaaagtattactttactaataaaaacaaaagtctattcttattgggtccatctttttacctctcaaagggtgtctcacaaattttaataaatgtattttcaaataaattttttatttcaagtcttcccaatctttcttaacaatgggcaaaaagcagtgactccactctataaatgtactgagatattatcaacccggaaataaacatttaatctttattgcactgttttgtactcttctatcttaaaacaaagctaagccatttgagtccttaatgaacatgtaaccagaaatcaaacttaaaaataatctagtcaataatctaaaatgaattttattttataaacacagagcaaaaaaataaaaaataaaaaaaaatgagggagtgagaagaacaaaagtagaggaggagggacaccagggagctagtttacaatcctgaaacaaacataccacgtcacagttggcatttaaaccagtgcggccggaagtgcagcctacaagtacagaaatcaagcctgttcagaaactctttgagcattctgacaggataattttatgtctcttgataaaagacagttttaaatggggttaaatatatgtctttttaaaactccacttctctggtaactaattttattgtatttcaccaaaagatataatggattgaatttttttagtgggtctcttaccacagacagtttgaaaagcactgaaaaggatagcgggtcttcttttctctttaaaaacaaaccaatctaccacttttgaagttgaattcaacaccatatcacatgacatcttaacaaaaaagagaactaaggctactaggcaataaacttttagctagggcagaacacctttaagacaagcactgtcattaaatatgtcaaagtctctaaagtttaagagattatatttgttttgaattcaaagtagattaagatcagaggactgaagtttcaaagattttatcctaacacaagaaagaactttctaggcagagttgtgtgagacttgatcatttgtcttctgcctttagtcacttcccacttctgtccatctcttccactactgtcaagttacctttccaaaacaattaatacatcatataacttctcatctttaaaagagaagagtgtcaatgcactgctttcaaaatgaaataaatttggatataaggttcatggtcctttatcctcagacctcagccttatctccaataccaacactccactgtgccccataccttccactgagacacaccaagcatccacatagcaacataccctggttgattctatttctgatgtctagaataccattttacttatttgcctggtaaactcctacttcaatcttctccagcttcctttaaaaaccttcaaccttcaaagaacacattacttcttgacttcctgcacaatgtatatatcatctccgctgcatcagttcactgtcaatatatcagtcttccaggggtgaaagttccttgagggtaaaaaatcacaggcattcaaaaacataactgctgccgcagattgtattaaattaactatggtagaaggtaatgaaaactgactaacagtcatttatagtactacttactgaaatatcatggaattaagtatcacaaatatggtttagactcgatgacttaataaggttccctctaaaccaggttatacaagagtatacatttcattgccacttttctaaagcaactcatctgttttcatagcgaattctactattcaattggattcatgaaagttgataagaatacaatttgtaagattaaccctctaacaaacaacctgtaacagttcctactccctaatcatctcgtcaaatggtaccaataagggaggctgaaggaagagggggagatatatatggtttgatggagaggcagtaatataaaatgcgagaaaaaaaccatttctcacagggtacacctttctcaactaagaattccacatgagaatcaaatttcaatgcccagcccaagacataaaaattatatgtggttaacttctctcctgtgtaactataatggttctcttgatgagtcatctttaataaaatgaaataattcctattttctgtggttcagatgaggaaccctagctgagaaaagcttgttaagcttacagaaaaatcaaagcatatttccacttaaaaacatttaagaagtagtttcttaagcccagccagaagttattacaattagtgtgccttaagacatgttgtaatggtaccatttcaagtaagtctaaccattatttataaactgcttcagtcagaatattaaaaaacgcactacaaacaatagttgggaaactgaaggtggtaacagtgttcataacagtaatgacttttacacacaacacacacacacacacacacacacacacacacagcataacttctttgaaagtgcctttaacagatgctcaatctcctgcacaacagagcaaagttttgtgaagctggggggaaactgctactctcatacactgctgatggtaacgcaaaccatcaccctaagacggaggaatttagcactaactaataaaaccacacacgatcctgcttctacaattctattcaaacataaactagcaacttcaagaaacacttttcaacacagcactatacctttttgtaacggcaaaaaaaaaaaaaacgaataaaggctattctttatacactcccattaaatgaccacaatatactattaagtgaaaataaataataaaggtattaaaaagtgctgagagtataataatctatgaagagtgagaaattatacacagatacacacacaaaactgttacataactgtttatgtttaaaaaaaaaaaaaaaaagaaatggaaggataaaccaaaaactaaaaataaaaaatctacccaaacagcaagggaggactaggtaaataaatgggcctgagatgaaagccatactttataaaaattctctgctttgcatattttgctttggaaccatgtaaatattctaaggtagaaaacaggaaaatattttatgcaatttccacaactagaaaatcaagtgcaacaaatgaacctaaccatggatctatatactagcacaactgttacatagtaaaaattattccagctgctttaagagatggtaacttgtatctagtggatataccctcaaaatagtaagagctcagtgtaaaattgtcaccaactgtatcactggtagtagtggttatagttattctgagactgctttgtattccttttttgaaataaagcaaatgaatcattattttgtgtcactaggaaccagaattttcagtgagaaaataagatacagatagaagattaaataaaaacattatagtcctaaatttaatgagaatgagcttgtgaaaatattcgtgtgtatttcacagctctgaaaagcctacaataatgagaatcactagagcccagactataatctctgcactatttctttctctctctctctctttttttttgtcactttttgttaacaaagcttccctaaaaaattggctgattccaagtctgaggaagaattctcacaagagtgcagactgtcatatcacactacactagacggcaaagttactattcccatctactaggattatgttgaaaagatttagaagtcaatgtgaagaagtccctccaatggccaaacaacttgagcgccagttaaaaataatatcttcaatgaacggaaacatataaaactgtttaaatgcattcgtagtgatacccaaaggcggggggcagggaaacactcattctttcagtctggaggattcttgggaaccaattcactatttaaaaactagcaaataaagaattaaacatttattccgcctttctgataaaaactgtatctagctaatatgaatgaagaaacagaatatagctattctgcaactcccactgaaaaaaaggacctagaaaacaatcaacaatgattgctaaaatcacagagaggaaatgagactttatgtactaccatcaaaacactagttatgaaatattctttcaaaaaagaacagaaatgagaaagagaaggtgggagagctgaatttaactaaacctttgtcattaccaatttacaagaaatatggggaacagagataaatgttaaacaccaccaagaaaatgccaccagcaaaatccacaggaattcaagacaaatcacccagtgaagccaagaaagagaaatggaggtttgggaagtggcttaagagatctatcaattacaatgtagatgaccctcatttgtatgctcattaaaacaaattattttaaaagcatattaatgagacaccagagaaactattaacactgacaacatatttgaggataaataattttctagatattaaaacacaaacacgttatcattagagttctattttagagatagctaataaaatatttacagttgaaattatatgtctgaatttgattctaaaataatctgggaggcaaaaggtgaagtgaggcaatggggaatgagagagttccctcttgaaaggagagaggcaatgctgaccctgggtgatgggtaaattagagttcactacactacttgtctttccattgcttaaaattttgcataatgaaaacgtaaaaaaaaaaaactatatccatgctagagcttgtcagagagctaagtattcaacaagatcgataaaacaggctgtttggaaccctacttgtacttgatgtcatgccaccaattgccaaagccactctggtgtatcaatcacaagactgaattaatttctctctttcaaagtgttgacacagcagtaacatatttcataagaataaaatcttgtaagttcccccacccaaaaattcaaggaaatttatttttgcatatcactatgaatgctgccttgaaatgtcctttaagtgtactttcctatcacctatcacagtcttaggcataaagctctactattcggtgaactgacataggacaggatacagagttgcaggaaaaaaatgttgattataaagcagcaaatataatatgatccacttaatataccatacgtgtacatatgcataactgcatgaagaacaatctacaagacataccaaactataaacaagggtagtgtctaaactaatggaatgtcaggagcctttaattttcttgagaccctctaggactttctcacttttctaaaaatataacatattgaccaattaaaatatattttaagcataacaaatagagctaagaaatctctgctataagagatacttaacaatttgtaatgtatatgaaaagcatcacgtaaaagaagttattaaatgctctacctaaacaagtcctgcaaaacaaaattcaagaattccacctatgtctgcaattatacaatatgactctaataacatttcgtaagtcatgttccacaaaacactgtagttcttcaaggagttatagggacatcttcaaaaaaggggagactatggccaaatacatttgggaaacaaatattaagttaaaaactattaccaatttatttcaaagcccacattctgacaagaatgatttgtacaactgaatttgaatatccagtgagagatggaagtttctatattgtgtactcttcaggtagaaatgagcaactgggtgggttactacacttctttaagcctccatttccgttggaagagtgtaactcttttccaaggttgtcccatggtctgaacatgatgcagcacagatagtaaaagtggctgataccatctagcccaagcttgtccaacccccggtccataggccgcatgcggcccaggaaggctttgaatgtggccccacacaaattcataaactttcttaaaacatgaggtttttgtttgtttgtttgtttttagctcatcagctattgttagtgtattttatgtgtggcccatgacaatttgtcatcttccaatgtggtccagggaagccaaaagattggacacccctgctctagccactgttattagcagccctggaatggctagaagaagaatgcacatcccttcattttgagcaaagaacttgaactggaattgctaagtctttgcacatttccagatgatgcaacatctgactgacatggctttgataaactgcatacatttcacccatcaacacaatgggagagaaggaaggacagaaaaaggaggtgagaaggaggaacccacaagcatggctacttattctcctcttgtttatgagaagggagacctcagaagagctgacaaattgcagacggataagacaaaaccacaaatggtgtcccctacaatgaccatgcatatatatacccaaagggtgaacttcaatgtactacttgtcactccacaacaatttgccaagtacctaattacgtgcaaaacactgttctgttttaatggcttacatgttctcatttgctacattagaaccagctgactcccacctgtttctaaaggtggaccatgcctcctagcatgaatacatttctttcacagccctggatacggcctctgcaacctcaagtgaaacaccataattactttcttttcctaaaattcatcctctagtctacaccataccatactgaatgcacccgatctcatctaaaattactcctctagcatttgtaatctgctcaagtatatagatttccattaagtacatgggattaaatcctctagggagaattcctgaaaaatcaaaggaatgatagtatgatattgtgatttatgatgaaataaatatatttggtctttgtttcctggcacaaatctcctaaaacccctgaatctcccaagtaatacaggcatacctccttttattgtacttcacatatactgcatttttccaaattgaaggcttatggcaaccctgcatcaaacaaatcttgtggcaccatttttccaacaccatgtgctcaattcgtgtctccaagccacattttggtaattctcacaatatttcaaacttttacattactattattattatgtctgccatagtgacctgtagatagtaatctttgaaattactactgtaattgttctggggcacaccaaaccatgcccatataagacagtgaacttaagtgacaagtactgtgtgtgtctggactgctaatggaagaagattacatctaaaactttcatagctagagagaagtcaatgcctggcttcaaaccttccaaagacaggctgattctcttgttaggggctaatgcaactggtgactttatgttgaagcaaatgctgattgaccattccaaaaatactagggcccttaaaaattatgctaaatgggacaggtgcagtggctcacacctgtaatcctagcactttggaaggccaaggtgggcagatcacttgaggccaggagttcgagactagcctggccaacacggcaaaaccgcatctctactaaaaatacaaaaaattagctgggtgtggtggtgcatgcctctaaccccagctactcagcaggctgaggcatgactgctcgaacccagaaggcggaggttgcagtgacctgagattgcaccactacacaccagcctgggcggtagagtgagactctgtcttaaaaagaaaaaaaaaaaaaaaggctaatgtaccctgcctgtgctctacaattggaacaacaaagcctggatgtcagcagagaaaggtttattgaatattttaagcctactgttgagacatattgctcagaaaaagagattcctttccaaatattactgctcattgtcaatccacctggtaacccaaaatctctggtagagacgtacaaggagatgaatgttgttttcactcctgctaacacaacattcattctgtaacccatggatcaaggagtaatttagactttcaagccttattatttaagaaatgtctttcataggcctatagctgccacagacagtgattcctctgataaatctgggcaaagtatattgaaaacctcctggaaaggaatcaccattctcaatgccattaagaacattcatgattcatggagagaggtcaaaatatcaacattagcaggagtctggaaaaagttaattccaaccctcaaggatgactctgaggggtttaggagtatgatggaggaagaaactgcagatgtggtggaaagagcaagagaactagaattagaagtgtagcctgaagatgtgactgaattgctgcaactgcatgatcaaacttgatcaggagttgcttcttatggatgagcagagaaagtgatttcttgagatgaaatgtatttgtagtgaagatacagtgaacactgttgaaatgacaaaaaaaaatttataatattacataaacttagtttataaagcaacagcaaaagttctgtgggtaaaatgctatcaaaaagcactgcatgctagagacatctttgtgaaaggaagagcaaatccatgaggcaaacttcgttgttcttattttaagcaatcgtcacagtcaccccaaccattggcaaccaccaccctgatcagtcagcagccatcaacatgccatcaacatccaggcaaggccttccaccagcaaaagattaaaactctctgaaggctcagatgatcattagcatttttcagcaataaagtatttttaaactaaggtatgtatattttttagacataatgctgttacaaatttaatagactatagtatggtataaacataacttttatatgcactaggaaactaaaaaaatgtgtgactagctttatcgcaatgttcccttattgtggtggtctggaacctgtttgtgtctttctgtataatgaagtgacaaatgggtgggggccctggatagtctcaagatcaaggctgattccagagaaaccctaaccaagtatacagagggctgagactttcagcctcattccccaacctctaaggaagggagaaaggctgaatgttgagtcgatcaccaatggccaatgatgaacatcagtcatgcctacataatgaaacctccacaaaaaaacagaaggacggggtttggagagattccaaatagctgaacacatggatgcacctggagggtggcacactggagaagggatgggagctctgagccccttcccacatgtcttgccctatgcatcttttccatctgctgttcgtcggtatcctttgtaatatcctttataataaataagtaaagtgcttccctgagttctgtgaactactctagcaaattaattgaacccgacgagggacttgcaaaaaaacacatttacagctggtcagtcaaaagcacaggtcaccactggggcttgtaactggcatctgaagtggagacagtcttaggggactgagccctcagcctgtggtatgtgacattattcccagttttgaactgaattagaggacattcagatggtgttttctggagatttgtttggtttgtggggagaaacccttacaacatctggggtcacaagtgtactgggtggtgtgtgaaatggtagtcaaagtttctaatactcaatattcaagttgttctagtatgtctgaagttatcactcttagaaatggtttataattagaaaataatgtaccacagaatagaactcagaattcagtttctttttcttttttcccccgagacagagtctcgttctgtcacccaagctggagtgcagtggcacacaatcatagctcactgttgcctcaactcctgggctcaagcatcctccctcctcagcctacctagcagctgggactacaggtgcacgccaccacacctggctaattattttttaagttttattgtagagatgggggtctcactatgttgaccttgttggtcttcaactcctgggatcctcctgcctcagcctcccaaagtgctgagattacaggtgtgagccactgtgcccagcctagtttcaaatttgactgccacattttggcgtgtgacctttggcaaattactcaacctccccaaggctttggtctcttcatttacaaaatagctggtacagacaagaagttcataatagttttcaagccctggttccatgatcttaactagtaccattccactgggtatttatgcactaaatcaatgctgttgagcccatcaataatgctgaaataataacaatccaagaaaatgaaaactaaagtggcatattaacttacttgctaaaaaccagcagcttagaataatatagtactaacttccccaaagcattagaagtacatagcatttacaattttctttatttaaccaaccttttcggggaacatgagggaaggtacacctaagcctttcatttattacctgaactagtcactcctttcacaggtatttttttcaagtgcctgcactctgtgccaggtactcaccaaacaccaaggaaattaatactccatagaatagccatggtaggctctcactgagtttaccagtgtagggaaggattcagaccagcacacaccattcccatcgtagcattttgtgttaaaagtaaaacaggcaatcagtatatacacacatatagatatacacattatatatatacgcacacacatatatatatatacacacatgtctatatatacatggacaactctgtagaaaagtttaaagcaaatggcttttcctcttgaactcctgaaatacatctcaatgagctatctttattacttacatcaatacttctttttgtttccatctcttttcatgttctttaccaaatggccaagcattccattctgactttacttttattataaacacttataagagtgcaacagtataatcacacagttataagctctaatgctcattgtctgtgagggcttgaaacagtaagcaaggttgagtggggggccattactgcagaattcacagaaactcagaagcagggaaaaaggggttttgttaactggctgacagaatagcctaactgatgaatatatactaatcttttcatacagatttatatatctgccagttgtcaagacttcattcattgtccataggcaattaaactagtattacttaatgaccacataatcctaagtccaaacatgagaaccaaaacttcatggcaacgttcatttgaaaagattatcactcaactgattcaaaatatgcacatttttttaagattctcataaaaaaatttaatacatctaaaattgctcaaggagaactcacagactcccatgaacatatctttaaacacagttgacaaggaatacattataataagatttttaaataatcaatattatgagaactttttgcccaaatttcttggctactaaatcattgatgaggagcaaaaatgaatgagatccagtcagcttatgtgagggcttaaaagacatgaggcggagggctcagaaaacaagtttatcagataccctgtgggtttggtattcattccgtaagttccacaaagcgattcagcgtactggtctaacacagctaaccacgcactattcctagatagccccttcaagtcaatggaaagaaaggaaggaaggaaggaagaaagagagagagagagagagaaagagacagacagacagacagacagaccaaaccttcctaaaacacttttaatctttggccatcaaaatctatttttttaaatccgccaatttttacaagaatagaaattcaaaactatcctgcctcacagtattgctgggtaagacaaactaggtaaataaaatcttcctaacaataatatttagatagttgggtctttactaattaaaccagcaaaagaagaaatggcaggagaaaaaaacccacagaaacagaaacaatatactttaaaatgtaaaatcaacacaaaatgttgatgaaacccaaagtgtatctcatatggctagtgatagccttccttctaatagatttctgtcttctaactctcccagtgatctgacatacatccaaagttatttgaccattcttatttaaatctcatcaaaagaaaaatttcagatttttcaaaacttttatatacttttacacacattacagtctgactaatttccaaactggcagcttcccaaaagtaaatgacaaaggaaggtaacatgatgaactgatattttaatttgctaagtaaaaaatgataattaacaaggggaaaccgccaggcgtggtggctcacgcctataatcccagacctttgggaggctgaggtgggtggatcacgaggtcaggagttcgagaccagactgaccaacatggtgaaaccccatctctactaaaaatacaaaaattagctgggcatggcggcgtgcgcctgtaatcccagctactcaggagcctgaggcaggagaaacacttgaatgcagaaagcggaggctgcagtgagccaagattgcaccactgcactccagcctgggtgacatagcgagactccgtctcaaaaataacaaacaaagaaaaaagaaaaacaagggaaaatcatgacaacacctttaaaaagtttaaaagttcctgacatggaacatagtgggtttgtttgttcgtttttgagacagagctttactcctgttgcccaggctggagtgcagtggcacaatctgaaatctctgcctcccgggttcaagcaattctcctgcctcagcctcctgagtagctgggattacaggcgcccgccaccacgcccagctaatttttgtattttttttagtaaagacagggtttcaccatgttggctagggtggtctcaaactcctgacctcagacgatccgcctgcctcggcctcccaaagtgctgggattacaggcgtgagccaccgcgcccggcctggaatatagtgttttaagcacaaaaaaatctggaaattttattattacgatgtaaaagtatagtaagttactcacataaagacttagtccattttcaaggacttaccttttttttatccctcattgagcctttgcctcggaccatgattttacatccggtttctgcttcaagttgtttggctgtaagtcctctaggtccaaggattctcccaacaaaattaaactgagaaaaaaaaaaaaggatcactatacattattcacttgctggaacttacagctcttaaaatataaagtatatctacatttacttactgaagttaaatgtctttttaatactaagttgaaataaaatctagagcccttatgaatttcttgctaagtctcaggtctaattacaatagctcatcgtttagcattatattttcacaagtattaacacaaactatgaactgggaacagtatacagctagaacagatacaactgtccatcaacaaataacctaaaacagagagtattaaagagtttgacaaaatattagatgccagccaagaatacaagtcccttccacaaaatgtccaactgtctctttgtcatgacagtgttgaagaaattgttaggcactgccctttctaccaaaatcctttggggaaagtcctcttttatttacctaagaaaaattatactttctccaaagcaactgttcagaaatatgttacgaaaactatgggttggctacactaaatgtgtcttaagagtacatattcctttctacctttaacttataagaaacctaaactctgaatatcactaaataggccagtgatatcaataattgtataaattaaaaactgtacaataaaaaaataaaaaattaccatccctcaacagaaattcctaatattcatatatacaagttatttctttaaagccaataggaaaaacgggctaaatcgtgaaaagtaaattttcctcatttgcatgttatctgcataaaggccaaaatataagagtttgctatcagttccacaaaattccacaggtggttttcatttacttattcaatcaaataggtactgattcttatgcatatggtcttctacttttttcttgcatttatccaacttttagtatatcattacataaaagtaacgtgctagaaaatccactgccatcagggcttaagaagctgggtacttctggtatcatctgtactccactggctcttattttgcattgtcacaccttagaaaagtgattctcaaatgaaaggtggtaggtagtacgcctgtatcattcgaagaaagtctccgaggggattttcatacatcttatttcaccctctgttgagactcacagactcatctataagcacttaatttagctcttcaagatcctagattctgaaatctgctaatagctctttatattcagataaagtcccttatctttgcccagtgcttcagtatatagtaattttacctctttacccaacctaaacccccaccatgatccattttaacaaagtacttccaatttagaaactcatcaacttaaccttcctacatctccaatttaaataaactcaagtagtatactacggttatgtgcttaaactctgagagcacacagattctagctggtatccaagctcaaatatgaaaacagtaatcaggaatctgaatattggccaggcgcagtggctcacacctgtaatcccaacactttgggaggccaagacggggtggatcacttgaggacaggcgttcaagacgagcctggccaacatggtgaaaccccatctctactaaaaatacaaaacttagccaggcttggtggtgcatgcttgtaattccagctacctgggtggccgaggcatgagaatcagttgaacccaggaggtggaggttgccgtgagctgaaatcatgcctctgcactacagcctgggcaataaagcgagactctgtctcaaaaaaaaaaaaacaaaacaaaacaaaacaaaaaaaggaatctgaaaatcacatcaaataagcctcaattacagaatggggataatactatctgacagagctatagtgatgatggcatgtacagatatgtatgtgtatagcacaatacatacacaaggtccagtaaaaagtttgccatacagtcacaatagcctaccaagtctaatacaaatcctttgcttaaaacctcaggctcttactcttaattaagcttggaatgtcatttctagaaggagatgtgatcagcagcaaacttgccctacagaactccagagagactggacactcacacactgagttttgcagaaaacaagaatgaaaaggtggaactaatacacagaacaagcgaccatcactgcccacagaacagcaaaggccaggcttctgacttgtaggtaatgggctagttttttctctagaaaaattgaaataacccacgaaaagaattctgtgttccattatatgacttccatctcaaagactagcactttagggggtcaccccaaattaaggttggcagcggacagctctgttcatgaacacaagctcctaattcagattttcattgtttcacacttaaacaatgttcaccaaaggttcaagaagggctctatcatgagagagacaggacaagataaagaagcaggacaagagactgacccttgagaaaaaaaagactacaggacaaagaagatgatttaaaaaaaaaaaaaaaaactttagtacatagtgttaaattattttctaaaatggttgtacatatttttatcctccgtatagtataaaaatttattttgatccacttcctctccaatatttattatcagtgtttttatattttaaccattctagtgtatgtattaaatgtttcaattagcattcctctgactactaatgaagctaagcatttttttcacatttgttggccatttggatatgcattttttgaaggacatttgaagtttcctgtgtttttctattgtgttaccttttccttattgatttctactttgtggttacacaactgacaagtatttttcccatcctgtggctcgtcttctccctctttaatggtgtcttatgatgactgaaagtttttaattttaacacagttcaaattttcaaccttatcttcatggttagtgttttctgtgtcctgtttaaaagaagtctctccccaccctaaggtcaccaagataccttctggtgttatcttctagaagctttattgttaagtctttcgaatttacatctacagtgtaccaggaattgatgtctgtgttataattttcttttcttctctcacatgaatatccaaatgttattaaatatacgaatgtcactgaatagaaatgttattgaaaagactactcttttccaattgctccagtgtcatcactgtcataaatatttatctacacaatcgtcccttggtatctggggtgggggggattggttacaggtccccacacaaacaccaaaattcacagatgctcaagtcccttatataaaacggtgtcatatttgcacataacctatgcacaacctccaatataatttatatcatctttagattacttaaaatacctaatacaatgtaaatactgtgtaaatcactgttatgctgcattgcttaggaaataatgacaagaaaaaatttgtatatttcagtacaaatgcaaccattttaaatatttcccctaaaagttttgatcctaggttggttgaatccacagatgtggaacctgaggatacaaacagctgacagtacttaggtctgttttggagctctctagtctattccatttatttatctttactttaacatcatactgtattaattatggtaaattatatggtacaccaagttcttctctcttgctcttcctcaagagtggcttagctattcctggccctttccatttccacatattttagaataagtccatcaatttctaaaataatacttgcaagaattttcactgagatcacattataatatagactcttcaaaaaccataaacatggtaaaatttctccatttggttaagttatctctcatctctctcaataacgtcaagtttatttttgtttaggctaaagtgcaagtggcacaatcatagagcactgtagccttgaattcttggcctcaagcaatcctcccacctcagcctcaccatgcctggcttttttttttttttttttttaacttttttgtagacatcaggtctcactacgttgcccaggctgatctcaaaattcctggactcaagccatcctcacccccactccaccccagtgcctaagcctcccaaagagctaggattacaggctggagacaccatgtctagcctcaaaaatgtagagcttttttgattgtgcctttacttgtttttacttttgttgttgttaagattcattcctacaaatttacagggctttttctgctaccgtatatcataattttaagttttcattttctgtttctggtatatgaacatataattgggtttttttctatcaaccttacaaccagcatttcttcattactgactctcataaatcttttgtagattcttttggatgctaaacaatcacatcacctggaaataatgacagttctctattttcctttcctatcatatatttttatttctttttcttgctatccttacagtactggtcagcataccttgagttcaaagccaaataaaagtgtgtcatccttgacttgttccaaatttcaagaataaaggtttcaacagtccaccataaagtttaatcttaaactttttgaagatacactttatcacattaaaattcccttctatttcttagtttgctaagagttcccaactacaagtggatatctaaatttatcatttttcactatctattaaaacaacatttctccttaattctgttattgcagtggatttcaactgcaaatgttaaccaacttcaacttcaaatttaatttcaaattcaatttcaacttcaaatgttaaaccaatttaatgcaaaatcaacttgagcaaattgtttcctggcattctggtgatttttttttttaagaaatgtccattcataaatagaactggcccacaatttttctttctcataatacacgtctcaggttttggtatcaaggttattctggtagcaaaacatgttggaatgtattcctcctttttccactctccagataggcttgtatatggctgttatttcttccttaaataatgaataaaattcactggtgaagctacctgagcctagagatttcactacagaaagttttaaattatggattcagactttctattccttcgtatgtcaatttttaagttgtatccattttgtctaaattttcaaatttgttgatttaaaatagatgcctaatttatttttaataccaataagatctgaaacgatgtctcatttttttattcttgactggttacctgtatcttcctttctcttgatctgtcttcaaaagtgttttaaaagaacctgcttttgttgactgaggtagactgatttcaaaaatgaccataattctctgcccctcattgtgtccatgccatctgcaaagggaatctgcatctcctcccacctcctgaatctaggctagcattgtgacttgctttggccaatacaacgtagtggtgagaatgatatgcctcagtgttagtcttacgtggttctactctcttagagcccctttcccccatgtaaacaagcttggactaaaacttgttggggaatgaaagacagtgacccagtcatcatcaatatctgcaaccacgcaactcccagaagtagaactacctgactgaccttacagctgactggaagaaggactaaggagctcaacaagtggtttacttaagattttggagtagtttattataatgtagagatagctagctgatatattgaattacttcattttgtgtttgtctttaattgatttctactcttcatttatttccttccttctacttccttcgtttaatctgctgttctttttcccttccttcgtttaatctgctgttctttttccaattttttgaaatgaatattttgcttattgtattccttcttttctaacatatacatctaaagctttacatatacctctaagctggttttagttgtatcccacaaattcagatagggagcagtttcattttcattcaaagtcaaggtaatttgacatctactaaatatttaaatatattatgctcatttcaacatataatttcctgtagttttgatttttagcttcctacagtgtaatcagcaaacatgttatatgtaatagccatccttaatatttgttcaaacttgcttttcagcatagcatatggtcaatttttgtaaatattccataggtgcttaaaaagaatgcaaagtctggtgtgattaaattttacctgtttcgccttttacttctatttttgctgtatatgtgtaaaggcaattacaaccaacccttaaacaataggtctgaactatgtgggtctacttacagaacatttttccacaaatattacaccaagtatgacacccctcccacctccatcacctccttctgcctctgccacccttgagacagtaagaccaaacctgaatcttcctcctcttcctcagcctactccatgtaaagaccaccaggatgaagacctttatgatctacttccacttaatgaataataaacgtattttttcttccttatgatttctttaaaacattttcttctcaatggcttattttattgtaagaatacagtgttaatacatgtaacatacaaaatgtgttgatcaactgtttatgttatcggtaaggcttccagtcgacagtaggctatcagtagttacgtttggaggtagttaaaagttatacgtggattttttaccgcaaagggagtcagtgcccctcagccccatgttgtttaagggtcaagtgtatatctttctgtcattatgaagtggccttctttattatctctagagatgccttttgccattaagcttacactgatactaatatagatagaatttattttcttatgtgtcttttcttgatccaatctattaccttcaaacttttgttatccttattttaaacaggactcctgtaaaaatcatctaaatgagttgtttcttcattgaattttaacaggaacagccaatttatactacatggtttactaaatctttttactaagtgttttctatgtcctctacttattttcttttctttcttgcctctttttcctggatgtgggcggacgaagaaaatatgaacgtattttcttcgttctcttcttctattagtttggaagttatatgcttgttcaccctagtatttacaacatgcttccttgacttatcaaacattaatgttcatttgtacttttacccttttcccatacaaatacaaggacctcagaaagtgtaatatttatcctcaatccagtttatatgcctttgtttttcaaattctgtatcttttaaactcaacaggccattattttcactttgtacaaatatgcatttaggtttatcaacaattttaccatttttgttgctctttattcctttatgcatcttcaacttttcaaataatcatcattcttctgcctgaaaaacaaccttcagcatttcctttagtgaacgtcttctagtaatgaactctctccatttttccttatctgaaaatgtcttatttttgaagggcaccttaaagattctttatacaccatctcctggattcattccactgttactaatggaagtgaactaagtcttcccgctgctcctttgaaggtgatcttttctctcttctagctgctttaagattttctcatcattacttttcagttgttttattatcacttgccaaggtgtggtctcctttatcatgtttatcagtaagtatgataaatataaagaaaaccacaatttcacaaatctgtgactttatttctttctttggttttatagttctgaaacacacttccctcaaactctgcttctgtcccattccacctctcctcttcttctaatactacaactacatatattaaattttctcactatattccttttacttttcacattcccttctacttttttccatccctctgcatctccatgctgaaaattttcttctgagctatcttccagtttactaattctctcttcaaatgcttctaatcttctgttaaacccacctgttaatagtaggtaaataattttctggcttagtttttcttttatagcttccatttctcttccttttcttctgtctccttccacattgaaaacttacagatcttataaagtctgggtctgaaattctaaaatctagagtatgtggattttgtattgtttttcagactgtttcttcagatttttgttaatgtcatcttgtctccttgtgtgcttattttctagtgtgtgtcagacaatacacttaactaaatagcttataaaaataatataaggccaaagacaataatatcttcctccaggaaagatacatatcagcttctgccaggcacctactattactagcaacccaggatcaatgcaatttcacttactgagatagacaattttgagctgagatactgtctctgtgaggacctgcaacctcctagttcattcttactcctaaagtacgtatccatcagtgtccctacccccaagcgaagactaggctgggcatggcaagggaggttcacatagacaaattatagactccaaacgctatcccccaaagctcagcctttcgtctgtcctctccagattctgcaaacgtgctcagcagaaaaagagatcccccaaaacacggttatatccttgatcatctcacctcctgaagaccatgaactagtaattcttcacaatcttgctgattcacaatctctgatgtgttcagttattttttttcctattgtatcctattttcctggaattgctcagctggcctgcattatcttgtcagtccttaacaaacacaagtctactggcactttttgagcagttgctttttaatctaaagaggtctagaattgacataaggtagtatggtgtaacaatgttgaaatgaggatctgaataaaaaagaaacataacagaaaatctatcaacatgcctggccttatgttcatctccaataagctcttcctacttttttctacaacatcatcacttaaccagtttatgtaagtcacagattacattaaatttcacttccccactcctccaacctggacagagataataatctttacatgctatcactcacccactgtttttcagtaaaacagagaacagcctttcattttcaaattcaacaaaacatttacttaaggcttattatgtggcaaggagtgaagtaaatgtgaaggattgagaataacgaaactctgctctcaagaagtctgtgaaaatgcctctactatatttgttaccttggctatttctttaagtaaccttgccagctactcttcaataatagttgtactctatacagatcttttcccaaattgtcactaactagatacacattatatacttcacatatggcccaaaaatgtctggaaaaatgcattatgaacagagatactttagtacaaatcactaatatgtaattggttttgacccgtaccctttgtgaaaccagctgccctacactctgtgaccacatatagagccttgtttggcataccccatgcttttcaagtattaaccctccttggctggaaccacatcaagattacatagaaaagggcttctaccacagctaattaatcctcacaattatgatttactaaattaaaaatatttgtaaagcagttaaaatcacattaaatcttactaaccttactaatcttactaaccttaaaaaattttactaaccttaaaaaatgaaacaatcactattgccccaagaagccacaaacagctcaaggatgttaaggtgcaagccatcaggactctagtacagctgaaattgtcgaggtcatccttctcaaaatgttgtaagtagagaatgaagaaaaaaaaaaaactaatcacagcagctgctttgtctactgcaaccaatttccaggttaatatcgtttgccttgcattaaaattcattctgtgttgatttatcacgccagttctgcagcttcattcaattaaaacaatgtcacaacactttcaaagaaaatcatttcaaacagcctgagctaagtgcaactttaaaggccaaaagaagggaaagaaaaaggggaaaaaaagatattcattaaccctactgtttaaatacagaccttctctgtggctcaccaattatatttctgccaagtggcatgttaatttacaaagaagaggtttaacaacaattatgtctaatgctgttcattgctgctcacacttcattttaaatggaaatgatagatttttcccaatgacaaaatgtaaagcattatagaaaacccttccattaacctttttaaaattccctaattaaagataaactcctgcaacacattatcacaatagataataaaaaatggatttcgaaaagcacctcaagtgaaacacttctaagaactgataaagtgtaatctgtgcctaaaatttggggacaaggggagagaccaagttttcatttaaaaaatgcacttttttggattgctttttgcacaacagattgataatgtttttaaatattgtgtctagttatttctagggtgattttagttagatgccttacaaatctttcattatatcacataagcaacacagtgggtatgaaacaaatacattcacagaagcgtatatgtatattttctgaagtctttcacttagcagaagacaaaaaacggaccacacccaatctagtcaacactagtgggcctatcttatacaagtatgtaagatgagagaagagttgtgtctatatattaacagcacaactgtttttaattaaaaatacagaatgaatacagatgatccttgacttacaatggagttaagtcccaataaacccaccactgagttgaaagtgcagttttaaatttacgatattttcagttgcaatggttttatctggagatggccccatcataaattgagaagcatactgaaaacatatcctttcaaaccattgtaaacaatcctaagtcagaccattgtaagttggagactatataccaaaatgtcttgtgttttgagggaaaacgagcatcttatgccttgttaccttcatattaattcttataaattaataagtggctaaatacatctcctggagaaatagctaatttataaaatataattaacattacaggaaacatttggcaaaacctttcacatattaggcctttataaacatttttgttcatagcacacatggcacatgttacgtacaagtgctgtgtaagaaaaggtttcttacaaggctatgtaaaaacaaaacaaaaatttaaagctgcatacttccatgttgaaatagaaagtggaaatagtaactgttttgttttttattactgactttgtcctttgggatttatcctgagaacagccagtcaggcttattatatgagaaagttctaaacatatgagttcctgtgctgcatacaacttacaatttagtgactgaatccctccctccagctttactgagatataatgaacaaggtttaacttgtgatgatttaatacaaggtatacattgtgaaatggttaccacaatcaagctaattaacacatccatcacccacacagctactgtgcccacgcatgtacacgcacgtgtgtgtgtgtgtgtgtgatgttaagcaccttttcataagccttttggacatctgtatattctcttttgaaaaaatgtctaaaagttatttgcctatttttaaattgggtgatgtcattttttttttttttttgctgttttgttgttttgggctgagttaatattctggtatcttttggatattaaacccttagcagacataaggtttgcagatatttcctcccattctgtaggttgccttttcattttgttgattgtttctttgctgtgcagaagcatgtcagcttgatgtagtcctgtttatttttgcttttgttgcttgtgttttttgggtgtaatatctagaaaaatcattaccaagaccagtatcaaatacctttataattcagtgttttttcctacatgttttatagtttcagggaattcatttaggtctttaatccattttgactaaatttttatgtacggtgtaagtaagggtccactttcatctttggaatgtcaatatccagttttcccagcaccaactgttgaagagacgattctttctccattgtgtagtcatggtacccttgtcaaagattagttgactctatattcataggtttatttctgagattctgttctgtttcattggtctatgtgtctgtttttatgccagaagcaaattgttttaatataatttgaaatcaggaactgcaatgtcttcagctttgttctcaagactgttttggcgattaggtgctttctgtggttccacgtgaattttaggattgttttttcctatttctgtgaaaaatgccaatggaattttgacaggaattgtactggatctatagattgctttgggaagtatggaaattttaacaataatcttccaatctacgaacatggaatatttttccatttatttgcatctttaatttatttgatcagtgttatacttttcagcgagcaggcatcttttacctcctgggtattatttctaattatattattctttccgatgctattgtaaatgagatagcccttttttttttttttgagatggagtttcgctcttgtcacccaggctggagtgcagtgatgtgatctcggctcactgcagcctccgtctctcccaggctcaagcaattctcctgcctcagctttccaagtagctgggattacagcctgcaccaccacacccagttgttttttttgtattttttgtagagacagggtttcaccatgttggccaggctggtctcaaactcctgacctcaggtgatccgcccgcttcggcctcccaaagttctgggattacaggtgttaaccaccatacctgacctcttaatctcttttttgaatagtttgttgttagtgtatagacagaaaactgatttttgtatgttgatttttgtatcccagaacttgactaagtgaacagatttcttgatgaagtcttgggtttttctacatacaagattatgccactgcaaataaagataattttatttcttcctttatgatttaggtgtcttttacttttttttttttttttttgagacagtcttgctctgttgcccaggctggagtgcaatggtgcaatctcagctcactgcgacctccacctcttgggctcaagtgattctcctgcctcagcctcccgagcaagctgggattacaggcatgcatcaccatgcctggtgaatttttgtattttttagtagagacagggtttcatgttggccaggctggtctccaactcttgacctcaagtgatccgcccacctcagcctcccaaagtgctgggaatcagagccatgagccaccactcctggctgcctttatttctttttcttggcctaactgttctggctagaacttaccatatttaatggaagtagcaagggtcttcttcctgacctcagaggaaaagctttcagcttttcaccattaagtatgatgtcagctgtgggcctgtcacacatagcctttattatgttgtggcatactgttctataccttacttgttgagaattttcattgtgaaaggatgttacattttgtcaaatgccttttttgcatcttttaagatgatc

SEQ ID NO: 2106 - DNA, 6108 bp, Homo sapiens
caaaaaagtggtgcagtttttgatgaaattgtagagaactgagtatagtcatggccaacagcaaaaaactcaagagggggaactgaaaattagtgctgtgttttcagtcagtggcagccctcttgctccacagttgactactggctttcagccctcactggcgtcatctggcatgaataaaatgcttccttcagttccagccacagctgttcgagtttcctgttctggttgtaaaaaaatcctccagaaggggcaaactgcttatcagaggaaagggtctactcagctattctgctccacactgtgcctcactggatatacagttccacctgcccgcccaccgcctcctctcaccaagaaaacttgttcaagttgctcaaaagacattttaaatccaaaggatgtgatcagtgcccagtttgaaaacaccaccactagtaaagatttttgcagtcagtcatgtttgtcaacatatgaactgaaaaaaaaacctattgttaccataaatacaaatagtatttcaaccaaatgcagcatgtgtcagaagaatgctgttattcgacatgaagttaattaccagaatgtggtccataaactttgcagtgatgcctgcttctctaagtttcgttctgctaacaacctcaccatgaactgttgtgagaactgtgggggttactgttacagtgggtcgggacaatgccacatgcttcagatagagggacagtctaagaagttttgtagttcatcgtgtatcacggcatacaagcagaaatcagccaaaattacaccgtgtgcgctttgcaaatcattgagatcctcagcagaaatgattgaaaataccaatagcttggggaagacagagcttttctgttctgttaattgcttatctgcttacagagttaaaatggttacttctgcaggtgtacaagttcagtgtaacagttgtaaaacctcagcaattcctcagtatcacctagccatgtcagatggaagtatacgcaacttctgcagctacagctgtgtggtagctttccagaatttattcaacaaaccaactggaatgaattcttcagtagtgcccttgtctcagggccaagtaattgtaagcatccccacaggttccacagtgtcagccggaggaggtagcacatctgctgtttctcccacctccatcagtagctctgctgcagctggtctccagcgtctcgctgcccagtcccagcatgttgggtttgcacgaagtgttgtgaaactcaaatgtcaacactgtaaccgtctttttgccacaaaaccagaacttcttgactataagggcaaaatgtttcagttctgtggcaagaattgttctgatgaatataagaaaataaataatgtaatggcaatgtgtgaatattgtaaaattgagaaaattgtaaaggagactgttcggttctcaggtgctgacaagtcattctgtagtgaaggttgcaaattgctttataaacatgacttggcaaaacgctggggaaatcactgtaaaatgtgcagttattgtttacagacatctcccaaattggtacagaataatttaggagggaaagtggaagagttctgttgtgaagaatgcatgtccaaatatacagttttgttctatcagatggccaaatgtgatgcttgtaagcgacagggtaaactcagtgagtccttgaaatggcgaggggaaatgaaacatttctgtaacctgctttgtatcttgatgttctgtaatcagcaaagtgtatgtgacccgccttcacaaaataatgcagcaaatatttccatggttcaagctgcttcagcaggacccccatctctgagaaaagattcgactccagttatagccaatgtagtatcattggcaagtgcccctgctgctcagcctacagtgaattctaacagtgtcttacaaggtgcagttccaacagtaacagcgaaaatcatcggtgatgcaagtactcaaacagatgccctgaaactgccaccttcccaacctccaaggcttttgaagaacaaagctttattatgcaaacccatcacacagactaaagccacctcttgcaaaccacatacccaaaacaaagaatgccagacagaagacactccaagtcagccccagattattgtggtgccagttcccgtaccagtgtttgttcccatacctcttcacctttatactcaatatgctccagtcccatttggaattccagttccaatgcctgtccctatgcttattccatcttcaatggatagtgaagataaagtcacagagagtattgaagacattaaagaaaagcttcccacacatccatttgaagctgatctccttgagatggcagaaatgattgcagaagatgaagagaagaagactctatctcagggagagtcccaaacttctgaacacgaactctttctagacaccaagatatttgaaaaagaccaaggaagtacatacagtggtgatcttgaatcagaggcagtatctactccacatagctgggaggaagagctgaatcactatgccttaaagtcaaatgctgtgcaagaggctgattcagaattgaagcagttctcaaaaggggaaactgaacaggacctggaagcagattttccatcagactcctttgacccacttaataaaggacagggaatccaggcacgttcccgaacaagacgacgacacagagatggcttcccccaacccagacgaagaggacggaagaagtctatagtggctgtggagcccaggagtcttattcaaggagcctttcaaggctgctcagtgtccgggatgacactgaaatacatgtatggggtaaatgcttggaagaactgggttcagtggaaaaatgccaaggaagagcagggggatctaaaatgtggaggggttgaacaggcctcatctagcccacgttctgaccccttaggaagtactcaagaccatgcactctctcaagaatcctcagagccaggctgtagagtccgctctatcaagctgaaggaagacattctgtcctgcacttttgctgagttgagtttgggcttatgccagtttatccaagaggtgcggagaccaaatggtgaaaaatatgatccagacagtatcttatacttgtgccttggaattcaacagtacctgtttgaaaatggtagaatagataacatttttactgagccctattccagatttatgattgaacttaccaaactcttgaaaatatgggaacctacaatacttcctaatggttacatgttctctcgcattgaggaagagcatttgtgggagtgcaaacagctgggcgcttactcaccaatcgtccttttaaacaccctccttttcttcaataccaaatacttccaactaaagaatgttactgagcacttgaagctttcctttgcccatgtgatgagacggaccaggactctgaagtacagtaccaagatgacatatctgaggttcttcccacctttacagaagcaggagtcagaaccagataaactgactgttggcaagaggaaacgaaatgaagatgatgaggttccagtgggggtggagatggcagagaatactgacaatccactaagatgcccagtccgactttatgagttttacctgtcaaaatgttctgaaagtgtgaagcaaaggaatgatgtgttttaccttcaacctgagcgctcctgtgtcccgaatagccccatgtggtactccacattcccgatagaccctggaaccctggacaccatgttaacacgtattctcatggtgagggaggtacatgaagaacttgccaaagccaaatctgaagactctgatgttgaattatcagattaaaacggaagtgaggttcttattttcatacatattggtatgcaccaaactgtgaatgcatccagctgttggaaaatgatgtataagtctaagtcctcttgacttgaccataagatcatggaaaacagatgacttgtgaaccccacagtgtggatgtgcaaatgaaaattgaaggaaagaatatgaactgagaaatgttctttggcagtgatatagttcttagacatcttcagaatgactaatttctccgagtggtgcataatcttattttgtttgggagtaacaaatcgtggaatatttttaaggaaaactgttgtataaaactttaccatagtaaccttagaccttagagaggtagctttggagtgaaactttggctgcaataggctactttggcaagccctccgtaaaagtcagaggagagatcagtacagagctaagagtgacatcaaatgaggactgtgggacccagatttgaagacccaataaaaatactcaactttttaaaaaagatagtgaagtggtcttgattgattttgattttcactgccaagccaatcatgtgaaggacagaagcttttgccatgggcccctcacatcagggaaaatgaccttcactgctgttaacagtaatgtgtccctttcattttctggatcaagccttctcagcggtgggtctggatgtgggtaaactaaggtaaaggggatgatattccacaaactaattatgcacacagaaaatctgtggagcctatcagaccccaagtgtcttgaaatgtttgtagaaacccactaaaatgccccttctctgggtgtgggcccttattgcagctgtctcacagcctgagctgtggtacagagaaatgggggttctccttttattttcattttttttccccaatggcagcttttctcccgttgttttaccttcctatttcccaaacagttcctcttattttgtcttttgcaccagtttctggaggcccttgtcatttcaaaaaggatagtctcttttcttactctggcaaacctgtgagtgattccacaaagatacagtattacttagctatctgaattatgatagaaaaggtcctagttaggttcctatataaagcatttggaagatgaccttgttgcccttgaaacttgaaaatagggattctggggtgaggatacaaagacattgtcttgcatatccataagcaggtcttagagcattattccaaactctagctgtttcagtagttctatgaggattgcaagtcataggtgtgtgtggcatatcagtccatctccctcatctccattctcagtttcttccccacaaaatttggaatcaaagcttttatgacgtttgccaattgcagaacttcttcagctaaggttaatttgacgctatgataaaactgagagatgtcaaaaagcctcttagaaattttaatcttgaaagacttttcagggtatctcattttttaggtgggggtggcaggtgtatttcttttttaacaaataaaaggcatttaagtaaaactaaaatgaaaaaagtaggccttctgacattgtgtacttggtggttctgtccctctgcctgtaacaaatctcatttttgttaccaagaactgtatgaaagaagtaaatccaccccgattctgtatgattaattccatctgtgtttgtcatttctgactggaaaacttcttactccataccttgttcgatatggaggacaaataattggattgtctgataagtctgccaataaactatccagaaatagcaagtgtaatagtccccactatacgaattttatggtttgtataaacactaacattttccccttctgtagttgtatgaaaaaacaaatattgttagcatagtagataaattgttatgaaataccagaaaaaaaaatctgtatcttttactgagaacacccaatacccagataaatgactgtatcaggatttcatttgcatgttagtccacagagttgcccagaaccctaaatttattcataagagaaaatattgattaattattggtcattcctcataagtgtagctgttgatgtgtgcgtctgattattgcttttttaattttatgaaaattgtgtaaaattacattttttttccaggggagaaaaaaacatcaaacaaaaacatctaaatcatcctttttgttctttttcagtttttaaccacttttaggttttccccttacagaaaccacagaaatattcccttagaataaaatagtatatttgt

SEQ ID NO: 2107 - protein, 1224 aa, Homo sapiens
MNKMLPSVPATAVRVSCSGCKKILQKGQTAYQRKGSTQLFCSTLCLTGYTVPPARPPPPLTKKTCSSCSKDILNPKDVISAQFENTTTSKDFCSQSCLSTYELKKKPIVTINTNSISTKCSMCQKNAVIRHEVNYQNVVHKLCSDACFSKFRSANNLTMNCCENCGGYCYSGSGQCHMLQIEGQSKKFCSSSCITAYKQKSAKITPCALCKSLRSSAEMIENTNSLGKTELFCSVNCLSAYRVKMVTSAGVQVQCNSCKTSAIPQYHLAMSDGSIRNFCSYSCVVAFQNLFNKPTGMNSSVVPLSQGQVIVSIPTGSTVSAGGGSTSAVSPTSISSSAAAGLQRLAAQSQHVGFARSVVKLKCQHCNRLFATKPELLDYKGKMFQFCGKNCSDEYKKINNVMAMCEYCKIEKIVKETVRFSGADKSFCSEGCKLLYKHDLAKRWGNHCKMCSYCLQTSPKLVQNNLGGKVEEFCCEECMSKYTVLFYQMAKCDACKRQGKLSESLKWRGEMKHFCNLLCILMFCNQQSVCDPPSQNNAANISMVQAASAGPPSLRKDSTPVIANVVSLASAPAAQPTVNSNSVLQGAVPTVTAKIIGDASTQTDALKLPPSQPPRLLKNKALLCKPITQTKATSCKPHTQNKECQTEDTPSQPQIIVVPVPVPVFVPIPLHLYTQYAPVPFGIPVPMPVPMLIPSSMDSEDKVTESIEDIKEKLPTHPFEADLLEMAEMIAEDEEKKTLSQGESQTSEHELFLDTKIFEKDQGSTYSGDLESEAVSTPHSWEEELNHYALKSNAVQEADSELKQFSKGETEQDLEADFPSDSFDPLNKGQGIQARSRTRRRHRDGFPQPRRRGRKKSIVAVEPRSLIQGAFQGCSVSGMTLKYMYGVNAWKNWVQWKNAKEEQGDLKCGGVEQASSSPRSDPLGSTQDHALSQESSEPGCRVRSIKLKEDILSCTFAELSLGLCQFIQEVRRPNGEKYDPDSILYLCLGIQQYLFENGRIDNIFTEPYSRFMIELTKLLKIWEPTILPNGYMFSRIEEEHLWECKQLGAYSPIVLLNTLLFFNTKYFQLKNVTEHLKLSFAHVMRRTRTLKYSTKMTYLRFFPPLQKQESEPDKLTVGKRKRNEDDEVPVGVEMAENTDNPLRCPVRLYEFYLSKCSESVKQRNDVFYLQPERSCVPNSPMWYSTFPIDPGTLDTMLTRILMVREVHEELAKAKSEDSDVELSD

SEQ ID NO: 2108 - DNA, 5732 bp, Homo sapiens
gctccgaggagcctgagagacccacggaggcttcgcgggaagacgcggcggcggcggcggaggatgagcctgcagagcgcgcagtacctccggcaggcagaagtcctgaaggctgacatgacagattctaagctgggtccagctgaagtctggacatccaggcaggctctgcaggacctgtaccagaaaatgctagttaccgatttggaatacgctttagacaagaaagtagaacaggatctgtggaatcacgcctttaagaatcagatcacaacactgcaaggccaggcaaagaatcgagcaaatccgaatcggagtgaagttcaggcaaacctttctctgttcctagaggcagctagtggcttctatactcagttattacaagaactgtgtacagtatttaatgtagatttaccatgccgtgtgaagtcttcccaattgggaattatcagcaataaacagacgcataccagcgccatagtgaagccacagtctagctcctgttcctatatctgccagcactgcctcgtccaccttggagacattgctcgatacagaaaccagaccagccaggcagagtcctactataggcatgcagctcagcttgtcccctccaatggtcagccttataatcagttggctatcttagcttcttccaaaggagaccatctgaccacaattttctactactgcagaagcattgctgtgaagttccctttcccagctgcctccactaatctgcaaaaagcactttctaaagcactggaaagccgagatgaggtgaaaaccaagtggggtgtttctgacttcatcaaggcctttattaaattccacggtcatgtgtacctgagtaagagcttggaaaagttgagccctcttcgagagaaattggaagaacagtttaaggagctgctattccaaaaagctttcaactctcagcagttagttcatgtcactgtcattaacctgtttcaacttcatcaccttcgtgactttagcaatgaaaccgagcagcacacttatagccaagatgagcagctatgttggacacagttgctggccctctttatgtcttttcttggcatcctgtgcaagtgtcctctacagaatgagtctcaggaggagtcctacaatgcctatcctcttccagcagtcaaggtctccatggactggctaagactcagacccagggtctttcaggaggcagtggtggatgaaagacagtacatttggccctggttgatttctcttctgaatagtttccatccccatgaagaggacctctcaagtattagtgcgacaccacttccagaggagtttgaattacaaggatttttggcattgagaccttctttcaggaacttggatttttccaaaggtcaccagggtattacaggggacaaagaaggccagcaacgacgaatacgacagcaacgcttgatctctataggcaaatggattgctgataatcagccaaggctgattcagtgtgaaaatgaggtagggaaattgttgtttatcacagaaatcccagaattaatactggaagaccccagtgaagccaaagagaacctcattctgcaagaaacatctgtgatagagtcgctggctgcagatgggagcccagggctaaaatcagtgctatctacaagccgaaatttaagcaacaactgtgacacaggagagaagccagtggttaccttcaaagaaaacattaagacacgagaagtgaacagagaccaaggaagaagttttcctcccaaagaggtgagaagggactatagcaaaggaataactgtaactaagaatgatggaaagaaggacaacaacaagaggaaaactgaaaccaagaaatgcaccttagaaaagttacaggaaacaggaaagcagaatgtggcagtgcaggtaaaatcccagacagaactaagaaagactccagtgtctgaagccagaaaaacacctgtaactcaaaccccaactcaagcaagtaactcccagttcatccccattcatcaccctggagccttccctcctcttcccagcaggccagggtttccgcccccaacatatgttatccccccgcctgtggcattttctatgggctcaggttacaccttcccagctggtgtttctgtcccaggaacctttcttcagcctacagctcactctccagcaggaaaccaggtgcaagctgggaaacagtcccacattccttacagccagcaacggccctctggaccagggccaatgaaccagggacctcaacaatcacagccaccttcccagcaaccccttacatctttaccagctcagccaacagcacagtctacaagccagctgcaggttcaagctctaactcagcaacaacaatcccctacaaaagctgtgccggctttggggaaaagcccgcctcaccactctggattccagcagtatcaacaggcagatgcctccaaacagctgtggaatccccctcaggttcaaggcccattagggaaaattatgcctgtgaaacagccctactaccttcagacccaagaccccataaaactgtttgagccgtcattgcaacctcctgtaatgcagcagcagcctctagaaaaaaaaatgaagccttttcccatggagccatataaccataatccctcagaagtcaaggtcccagaattctactgggattcttcctacagcatggctgataacagatctgtaatggcacagcaagcaaacatagaccgcaggggcaaacggtcaccaggagtcttccgtccagagcaggatcctgtacccagaatgccgtttgagaaatccttattggagaagccctcagagctcatgtcacattcatcctctttcctgtccctcaccggattctctctcaatcaggaaagatacccaaataatagtatgttcaatgaggtatatgggaaaaacctgacatccagctccaaagcagaactcagtccctcaatggccccccaggaaacatctctgtattccctttttgaagggactccgtggtctccatcacttcctgccagttcagatcattcaacaccagccagccagtctcctcattcctctaacccaagcagcctacccagctctcctccaacacacaaccataattctgttccattctccaattttggacccattgggactccagataacagggatagaaggactgcagatcggtggaaaactgataagccagccatgggtgggtttggcattgattatctctcagcaacgtcatcctctgagagcagttggcatcaggccagcactccgagtggcacctggacaggccatggcccttccatggaggattcctctgctgtcctcatggaaagcctaaagtctatctggtccagttccatgatgcatcctggaccttctgctctggagcagctgttaatgcagcagaagcagaaacagcaacggggacaaggcaccatgaaccctccacactgaggccaaagtggcaacctgggaatgaaggctccataaaccatggcatgttgggtttgcaggactggcccacacagtcccctgcaggtggcagccctcttttctgtttctcgctgtcaagagggtgtaagtattccaccagcccgctgagtgtgcacgaaatgttcgcagtgcaacaaaaagaaaaatccatcaggaactctccgtccccccggggccctccggagggagagagagaggaactgctgtttatctcactcagttacttggtatcaccgcctctcaccttctccatcgtgcatgtccccagccacatgggaagtgaaagctgagaagggaaggcagatgggagaagccaatgggaacttctcagtccttttttcctctttggggaataaaataggaatccattaatgattgctttgctgactgagaatgtagttgaaattattcttaaacatcttttattattattactctcagtagtaaaatatcacactgaattcttccatacacaggtgtgcttctagtcagtgtgtagcaaggaaagccccgttcactgctcctgtgagaggttggtggtgacaggatggggaaccgacctcttcagccagtggaaatgttccataagggagagttcaaggcctgtcagaaggctctggtaggccttcctctggccaggagactccagcagggaatgcccttcactctgtaggtgctcgagccccaatcgaggatacagtgtgggtggtggtgctgggctggactagcaggtagactgctgtaggatttcaaattacgtttttgattcctgtacattttacagtcgcacagcaagcagtctcacagaaggcaggctagtccattcacagcctgacacgttctaataggtagaagctttcagtgtggttattttttctttggttggtttttgtgcccccattctacttcccaccctcctgccccatctccatcccttcttttacccaatgctgtatgctagtaattgtttttattcctaatgtgtgcaacatcacatctccccaagaagcaacagcatggggtccagcagttggggcccaaaagacagtctgaagaggaaggaagcagcagtatctgcgtagcccacagagggcccaggcccctgcccagctgcagtctcccagcctccactttcagagtgaaattcaaggcagcacggacatgtgcccatcaggcacagaagaaaacacgacgtcgtccattttggaagagacgaaagaaaggaaaataaactctttgtatgatatttattaggaggaaagaggactgaaaatgttcttgtgtagaaacagaaggacagcatttctgttagtcatttcctggaaaagtaatattttaaggggaaattatggaaacaatctaattgttcaattgctgtgctagtggtagggtttattttctgggaggtctctcctttgtgtgtctgtatgtttgtgtacacacacgtgcccatctgctgtcccagaggggaggggttgtgtgtgcgagtgtatggagttagtgtggaacttaagagctggaagacagctgtagagcaaagcacatccaggagccccagttgtcactgcagtctgggcaaccccagcaatgaaaaggggtgagataacgctcattgctcttcagagagagtggttggagccccccccgccccgtatgcttacattattgctcttttagtttgacatggtgtttgggttttgtttttttgaaaggtctgaaaaggtgaagccccctacccaatggcaatatgaaaccttttgtgcttctcttcagccccttccctgtgtccacctttctctcctcttcccaagcctttttcctactacctttacccagtttgtgtgtttgagctctgcattcaggcagctgcaacattccagtgtttgaactgtcactgattcttgcgccctagacaagctaaccaggtttaccatctcactcccagtaatacccagctcctatctaaagccccattctgcatgagaatttggtgtttggaatgttttctgactcttggggcgggattcctcgccttatcatcctcactgtggagtaatgagggggaggagaatctttatcagaaactggttttgtgtagtaaactttcttttgtggttttttgttttgttttctgggttttgttttttgtttttgtctgtgcaagacctgcagctgctgaaaatcagctttgcctttaattaaaccatgttctctcc

SEQ ID NO: 2109 - protein, 802 aa, Homo sapiens
MSFLGILCKCPLQNESQEESYNAYPLPAVKVSMDWLRLRPRVFQEAVVDERQYIWPWLISLLNSFHPHEEDLSSISATPLPEEFELQGFLALRPSFRNLDFSKGHQGITGDKEGQQRRIRQQRLISIGKWIADNQPRLIQCENEVGKLLFITEIPELILEDPSEAKENLILQETSVIESLAADGSPGLKSVLSTSRNLSNNCDTGEKPVVTFKENIKTREVNRDQGRSFPPKEVRRDYSKGITVTKNDGKKDNNKRKTETKKCTLEKLQETGKQNVAVQVKSQTELRKTPVSEARKTPVTQTPTQASNSQFIPIHHPGAFPPLPSRPGFPPPTYVIPPPVAFSMGSGYTFPAGVSVPGTFLQPTAHSPAGNQVQAGKQSHIPYSQQRPSGPGPMNQGPQQSQPPSQQPLTSLPAQPTAQSTSQLQVQALTQQQQSPTKAVPALGKSPPHHSGFQQYQQADASKQLWNPPQVQGPLGKIMPVKQPYYLQTQDPIKLFEPSLQPPVMQQQPLEKKMKPFPMEPYNHNPSEVKVPEFYWDSSYSMADNRSVMAQQANIDRRGKRSPGIFRPEQDPVPRMPFEKSLLEKPSELMSHSSSFLSLTGFSLNQERYPNNSMFNEVYGKNLTSSSKAELSPSMAPQETSLYSLFEGTPWSPSLPASSDHSTPASQSPHSSNPSSLPSSPPTHNHNSVPFSNFGPIGTPDNRDRRTADRWKTDKPAMGGFGIDYLSATSSSESSWHQASTPSGTWTGHGPSMEDSSAVLMESLKSIWSSSMMHPGPSALEQLLMQQKQKQQRGQGTMNPPH

SEQ ID NO: 2110 - DNA, 14807 bp, Homo sapiens
tcttggagcgttctcagtttctcaacagatcttcacttgctaggcagccagaagccggcggcagtggcggcaccgcctcctcctcacattcccggggtggcggggttagatgagcggccccagtcgcggcgccgggggcgctgttcatgccggttcccgacggctccgtggctgctgcggggctggggctggggctacccgccgcggactccccgggtcactaccagctgctgctgtcaggccgggccctggccgaccgctaccggaggatttataccgctgcgctcaatgacagggaccaggggggcggcagcgctggacacccagcctccaggaataagaaaattttaaataagaagaaattgaaaagaaaacagaagagcaaatcaaaagtgaagacaagaagcaagtctgaaaacttagagaatacagtaatcataccagatatcaaactacatagcaatccttctgctttcaatatttactgtaatgtacgccattgcgttctggaatggcagaaaaaggaaatatcattggcagccgcatctaagaactctgtgcagagtggagaatcagatagtgatgaagaagaggaatccaaagagccccctatcaagcttccaaagattattgaggttggcctttgtgaagtttttgaattgatcaaagagacacgattttctcatccatccctgtgtctcaggagtctccaagccctgctcaacgtgctgcagggccagcagccagaagtgctccagtctgagccacctgaggtcctagagtctctcttccagcttcttttggaaatcaccgttcgaagtactgggatgaatgacagcacaggacagtccttaacagcactttcctgtgcttgcctctttagtctggtggcttcttggggagaaacaggaaggacacttcaggccatctctgctatcctcaccaacaatggaagccatgcttgccaaactattcaggtgccaacaattctaaattcgctacagagaagtgtacaagcagttttggtgggaaaaattcaaattcaggactggtttagtaatggcattaagaaagcagctttaatgcacaagtggccattaaaagaaatatctgttgatgaagatgaccaatgtctacttcagaatgatggattttttctttatctattatgcaaggatggattatataaaataggctctggatacagtggaacagttaggggccatatatacaattctacatcccgtattagaaacagaaaagaaaaaaagtcttggttagggtatgctcagggttatttattatatagagatgtgaataaccacagcatgacagccataaggataagccctgaaacactggagcaagatggtactgtgatgttaccagattgccacactgaaggtcaaaatattttattcactgatggagaatatattaatcagatagctgcttcaagagatgatggctttgttgtcagaatatttgccacaagcactgaacctgttctacagcaagaattgcaacttaaactggctagaaaatgcttacatgcctgtcgtatctcattattcgatctggaaaaggacttgcatattataagtacaggatttgatgaggagtcagcaattcttggtgcaggacgagagtttgcgctaatgaaaacagcaaatggaaagatatattacactggcaaataccagagtcttggaatcaaacaaggtggtccttcagcaggaaaatgggttgagctaccaattacaaaatctccaaagatagtacacttctcagttggacacgatggctctcacgcccttttagttgcagaagatgggagcatattctttacaggatctgctagtaaaggagaagatggagaatcaattaagagcagacggcaatccaaaccttataaacctaaaaagataattaagatggaaggaaagattgtggtatatacagcctgcaataatggaagtagttctgttatttctaaagatggagaactctacatgtttggaaaagatgccatttactctgatagttcaagtttggtaactgatttgaagggccattttgtaactcaggtagctatgggcaaagctcacacttgtgttttaatgaagaatggagaggtgtggacatttggtgtaaataataaaggacagtgtggacgagatactggtgccatgaaccaaggtgggaaagggtttggagttgaaaatatggcaacagcaatggatgaagacctggaagaagaactagatgaaaaagatgagaagtctatgatgtgccctccaggcatgcacaaatggaagctggagcagtgcatggtttgcactgtctgtggagactgtacaggttatggagccagctgtgtcagtagtggacggccagacagagtccccggagggatctgtggttgtggttccggagaatctggttgtgctgtgtgtggatgttgcaaggcctgtgcaagagagttagatggtcaagaggcaagacaaagaggaattcttgatgcagtgaaagaaatgatacctttagatcttcttttagctgtcccagtgcccggggttaacattgaagaacaccttcagttacgacaagaagaaaaacggcaacgtgtaatcagaaggcacagattagaggaaggaagaggcccccttgtatttgctggtcctatttttatgaaccatcgagaacaggctctagccagactcagatcccatccagcacacgtaaagcataaacgggacaagcacaaagatggaagtggagaaagaggcgaaaaggatgcaagcaaaatcacaacataccctccaggctctgtgcgatttgactgtgagctccgggcagtccaagtcagctgtggatttcaccattcagtggttttaatggaaaatggagatgtctatacatttggttatgggcagcatgggcagctaggacatggagatgtcaactccaggggatgtcccactcttgttcaagcattgccaggccctagcacacaagtcactgcaggcagcaaccatacggcagtacttttaatggatggacaggtcttcacatttggaagtttttctaaaggacaactgggcagaccaattttggatgtgccatattggaatgcaaagccagctcccatgcctaacattggatcaaaatatggaagaaaagctacttggataggtgcaagtggggaccaaacttttttacgaattgatgaagcacttattaattctcatgtacttgctacatcagaaatttttgccagtaaacacataataggcttggtacctgcttctatatcagaacctcctccatttaaatgccttctgataaataaagtggatgggagttgtaaaacttttaatgactcagaacaagaggatctgcaaggatttggtgtgtgtcttgatcctgtatatgatgtaatttggaggtttcgaccaaatactagagagctgtggtgttacaatgcggtggttgctgatgccaggcttccctctgcagcagacatgcagtccagatgtagtatcctaagtcctgaacttgccttaccaacaggatcaagggccctcactacccgatctcatgcagctttgcacattttaggttgtcttgataccttggcagctatgcaggacttaaaaatgggtgttgcaagtacagaggaagagactcaagcagtaatgaaggtttattctaaagaagattatagtgtggtaaacaggtttgaaagtcatggaggaggctggggttattctgcccattcagtagaagctatacgtttcagtgccgacactgatattttacttggtggtcttggtctgtttggaggtagaggagaatatactgctaaaattaagctgtttgaattgggtcctgatggaggagatcatgaaactgatggtgaccttcttgcagagactgatgtattggcttatgactgtgctgctagagaaaaatatgcaatgatgtttgatgagcctgttctcctgcaagctgggtggtggtatgtggcatgggcccgagtgtcaggacccagcagtgactgtggatctcatggacaggcatctattaccacagatgatggggttgttttccagttcaagagttcaaagaaatcaaataatggtacagatgttaatgcgggtcagatacctcagttattatacagacttccaaccagtgatggcagtgcttcaaaaggcaaacagcaaaccagtgaacctgtacacattttaaagaggtcttttgcaagaactgtctcagtggaatgttttgagtcattgttgagtattcttcactggagctggaccaccttagtcttaggagttgaagaacttagaggattaaaaggattccagttcacagctacactcctagatttagagagactgcgctttgtgggtacctgttgtctgaggttattgcgtgtctatacctgtgaaatttacccagtgtcagctacaggaaaagcagttgtagaagaaactagcaaattagcagagtgtattggaaaaaccagaactttgttaagaaaaattttatcagaaccacttgatcactgcatggtgaaattggataatgatcctcaaggatatctcagtcaacccttgagtcttctagaagctgtccttcaggaatgtcataatactttcactgcctgctttcattctttctacccaactcctgccttacagtgggcttgcctttgtgatctgctgaattgtttggatcaggatatccaagaagcaaacttcaagacatcaagtagccgactccttgcagctgttatgtcagctctgtgtcacacgtctgttaagctgacttccatcttcccgattgcgtatgatggagaagtattactacgatcaattgttaaacaagttagtacagagaacgactcaacactagttcatcgttttccccttttggtggcacatatggaaaaactcagccagagtgaagagaatatctcagggatgacaagcttccgtgaagttctggagaaaatgctggtcattgttgtgctaccagtcaggaacagcctgaggagagaaaatgaactcttctcctcccacctcgtctctaacacctgtggattactggccagcattgtcagtgaactgacagcgtcagccctgggatctgaggttgatggacttaattctcttcactctgtaaaagctagtgctaaccgatttacaaaaacaagtcagggcagaagttggaacactgggaacgggtcccctgatgcaatctgtttttcagtagacaaacctggaatagttgtggttggtttctctgtctatggaggaggtggaattcatgaatatgaattagaggtgttggttgatgatagtgaacatgcaggagattcaactcattcccacagatggacatctctggaattagtgaaaggaacgtacacaacggatgactcacccagtgatatagctgagatcagacttgacaaagtggttcctttaaaggaaaatgttaaatatgctgtgcgcttgaggaactatggaagccgtacagccaatggagatggaggaatgaccacagttcagtgccctgatggtgtgacattcacattcagcacgtgcagcttgagcagtaacggcacaaaccaaaccagaggacagatcccacagatactctactataggagtgaatttgatggagatttacaatcccaacttctgagtaaagccaatgaagaagataaaaactgtagcagagcattgtctgttgtaagcactgtcgttcgagcctctaaggacctcctgcacagagctcttgctgtggatgctgatgacattccagaactgctgagttcttccagtctgttttccatgctgctcccccttattatagcctacataggaccagtagctgctgctattcccaaggtggctgtagaagtctttggccttgtccaacaattgcttccgtcagttgccattttgaatcagaagtatgcaccgcctgccttcaaccctaatcagtcgacagatagcaccacaggaaaccagcctgaacagggcctctctgcttgtacaacctccagtcactatgctgtcatagagagtgagcacccgtataaacctgcctgtgtgatgcattacaaggtgacattcccagaatgtgtgaggtggatgacaatcgaatttgaccctcagtgtggtactgcacagtcagaagatgtccttcgtttgttgattcctgtcagaactgttcagaattcaggatatggaccaaaattgacatctgttcatgaaaatcttaattcatggatagaattaaagaaattttcaggatcctctgggtggcctactatggttttggtgttgccaggaaatgaggcccttttttcattggagactgcatcagattatgtgaaagatgacaaagcttctttctatggttttatgtgttttgcaattggatatgaatttagccctggacctgatgagggagtcatccaattggaaaaagaattagccaatcttggtggggtttgtgcagcagctctgatgaagaaggacctagcacttcctattggtaatgaattagaagaagaccttgaaattcttgaggaggctgcattgcaggtgtgcaaaacccattctggaattcttggaaagggtctagctctttctcattcaccaactatattagaagcacttgagggaaatttaccactccaaatccaaagcaatgaacagtcttttctggatgattttattgcctgtgtcccaggatcaagtggtggaaggcttgcaaggtggcttcagccagattcatatgcggatcctcagaaaacatctttgatcctgaataaggatgatattcgttgtggttggcctaccaccataactgttcaaacaaaagaccagtatggggatgtggtacatgttcccaatatgaaggtggaagtgaaagctgtccctgtttctcagaaaaaaatgtctttacaacaagatcaagcaaagaaacctcaaaggattcctggcagtcctgcagtaacagctgcatcttctaatactgacatgacttatggagggctggcatcaccaaagctagatgtttcatatgaaccaatgatagtgaaggaagctcgatatattgccataacaatgatgaaggtttatgaaaattattcatttgaagaactacgttttgcatcaccaactcctaagagacccagtgagaatatgctgatccgtgtcaataatgatgggacttattgtgcaaattggactccaggggctattggactctacactcttcatgttaccattgatggcattgaaatcgatgctggtctggaagtaaaagtaaaagacccaccaaaagggatgataccaccaggaactcagttggtcaaaccaaagtctgaacctcagcctaataaggttcgaaaatttgtggccaaggacagtgcggggcttcgcatccgtagccacccttcccttcagagtgagcagataggcatagtgaaagtcaatggaactatcacttttattgatgagatccataatgatgatggtgtgtggctgaggctgaatgatgagacaataaagaagtatgtccctaacatgaatggttacactgaagcctggtgcctctcttttaatcaacatcttggcaagagtcttctggtccctgttgacgaatctaaaactaatactgatgactttttcaaagacataaactcctgctgcccacaggaagcaacaatgcaagaacaagatatgccattcttgcgaggagggccaggcatgtacaaggtagtgaagacgggaccttcaggtcacaacatcagaagctgccctaaccttagaggtatcccaattggaatgttagttctgggaaacaaagtcaaagcagtgggagaggtaaccaattctgaagggacatgggtgcaactggatcagaacagcatggtagagttctgtgagagtgatgaaggagaggcatggtccttagctagagacagaggcggaaaccagtacctccgacatgaagatgaacaagctcttctggatcagaattctcaaactcctcctccaagccctttctcagtgcaagcttttaataaaggggcaagttgcagtgcccaaggatttgattatggactcggaaatagcaaaggtgatcgaggaaacatctcaacatcttctaaaccagcctctacatcaggaaaatcagagctgtcctctaaacacagcagatcgcttaaacctgatggacgtatgagccggactactgctgatcagaagaagccaaggggcacagaaagtttatctgctagtgaatccctcatcttaaaatctgatgctgcaaagttgaggtcagattcccacagtaggtcattatcccccaaccataacaccttgcagacattgaaatctgatgggaggatgccttctagctccagagctgaatccccaggaccaggttctcggttgtcatctcctaagccaaagactctcccagccaataggtctagcccatcgggtgctagttctccacgctcctcctcaccacatgataaaaatctacctcaaaaaagtactgctcctgttaagacaaagcttgatcctcctcgggaacgttctaaatcagactcttacacacttgatccagataccctccgcaagaagaaaatgcccctcacagaacctttgagaggacggtcaacgtcaccaaaaccaaaatcagtaccaaaggattctacagattcccctggatctgaaaatagagctccctctccccatgtggtacaggaaaacctccacagtgaggtggtcgaagtctgcacctcaagtactttaaaaacaaatagtctaacagacagcacctgcgatgacagcagtgaatttaagagtgtggatgaaggttcaaataaagttcattttagcattggaaaagcaccactgaaagatgaacaggaaatgagagcatctcccaaaataagtcgaaaatgtgctaatagacacaccaggcccaaaaaagaaaaatcgagttttcttttcaaaggagatggatccaagcctttagagccagccaagcaagccatgtctccttctgtggccgaatgtgccagagctgtgtttgcttccttcctctggcatgaaggcatagtacatgatgcaatggcttgttcttctttcctaaagtttcatcctgaactttccaaagaacatgctcctataaggagtagtttaaatagccaacaacctacagaagaaaaagaaaccaagttaaaaaatagacattcattagaaatatcatctgcactgaatatgtttaatattgcaccccatggaccagatatatctaagatgggtagcatcaacaaaaacaaggtattgtctatgcttaaggaaccacctctgcatgaaaaatgtgaggatgggaaaaccgagaccacttttgaaatgtccatgcataacacaatgaagtctaagtctcctcttcccttaactttacaacatttagtggctttttgggaagacatctctttggctactatcaaagctgcttcccagaatatgatttttccaagtcctggttcctgtgcagttcttaaaaagaaagagtgtgagaaaggaaggaataagaagtccaaaaaggaaaaaaagaaaaaagaaaaggcagaagttaggcccaggggtaatttgtttggagagatggcccagctggcagtaggaggaccagagaaagataccatctgtgaactgtgtggggagtcacatccatacccggtgacctatcacatgagacaagctcacccaggttgtggccgatatgctggtggacaaggttacaatagcattgggcatttttgtggaggatgggctggtaactgtggtgatggtggcataggaggaagcacttggtatctggtatgtgatcgctgtagagaaaaatacctccgcgaaaaacaggctgctgcaagggagaaggtcaaacaatctaggagaaaaccaatgcaagtcaagacccctcgtgccttgcccaccatggaagctcaccaggtgattaaagccaatgcactcttcctgctgtccctgagcagtgcagcagaaccgagcattctgtgttaccatcctgcaaagccattccaatctcagttgcccagtgtaaaagaaggcatttctgaggatcttcctgtgaaaatgccttgtctgtacctgcagacattagctaggcatcatcatgaaaattttgtgggctatcaagatgacaatctattccaggatgaaatgagatatctacgttcaacatctgtacctgccccgtatatatcagtaactcctgatgcaagtcctaatgtatttgaagagccagagagcaatatgaagtctatgccaccaagtttagaaaccagtcccataactgatactgatcttgcaaagagaactgtcttccaaagatcatactcagttgttgcttccgaatatgataaacaacactccattttacctgcacgagttaaagctattcctagaagaagagttaacagtggagacactgaagttggttcttcccttttgagacatccgtctcctgagctttctcggctaatctcagcccacagctctctttctaaaggagaacgaaatttccagtggccagttttagcttttgttatacaacatcatgatctagaaggtcttgaaatagcaatgaaacaggccctaaggaaatctgcttgtcgagtttttgctatggaggctttcaactggcttctgtgtaatgtcatccaaaccacttctctccatgatattctgtggcattttgtggcatcactgactcctgcaccagtggaaccagaggaagaagaggatgaagaaaataaaacaagcaaagaaaattcagaacaagagaaagatacaagagtatgtgaacatccactctcagacatagtgattgccggggaacgtgctcatcctttaccacacacctttcaccgcttgctgcagaccatctcagaccttatgatgtctctccccagcggcagttcattacagcaaatggccctgaggtgctggagtctcaaattcaagcaatctgatcaccagttccttcatcagagcaacgtctttcatcacattaacaatattttgtcaaagtcagatgatggcgatagtgaagagagttttagcatcagtatacagtctggctttgaagctatgagtcaggaattatgcatagtaatgtgcttaaaggacttaaccagcattgttgacataaaaacttcaagccgacctgccatgattggcagtttgacagacggctccacagaaaccttttgggaatcaggagatgaagataaaaacaaaactaagaacatcaccatcaactgtgtaaaaggaatcaatgcccgctatgtgtctgttcacgtggacaattcccgagatcttgggaataaagttacctcaatgaccttcttaactggcaaagcagtagaagatttgtgcagaataaagcaggttgatctggattccaggcacattggctgggtaacaagtgaacttccaggaggggataatcacatcataaaaattgaattaaaaggcccagaaaatacactgagagttcgacaagtcaaagtcctgggctggaaagatggtgaaagcacaaaaatagctggccagatttcagccagtgtggcccagcagaggaactgtgaagctgagactctgcgagtattcagactgattacgtctcaagtatttggaaagctcatctctggagatgctgaacctacaccagaacaagaggaaaaagcactattgtcatcacctgaaggagaagaaaaagtatacaatgcaacatcagatgctgacctgaaagaacatatggttggaatcatattcagcaggagtaagctgactaacttacaaaaacaggtgtgtgctcatattgtccaagctattcgcatggaagctaccagagtccgtgaagaatgggaacatgctatatcaagcaaagaaaatgccaattctcagccaaatgatgaagatgcctcctctgatgcctactgctttgagctgctctctatggttttagcactgagtggctctaacgttggccggcaatatctggctcaacagctaaccctgcttcaggatctcttctcgctgcttcacacagcctctcctagagtccagagacaggtaacctctttactaagaagagttttgcctgaagtaacccctagtcgtctggccagcatcataggagtgaaatccctccccccagcagatatcagtgatatcattcactcaacagagaaaggagactggaataagctgggtatcttggacatgtttctaggatgcattgccaaagcactcactgtacagctaaaagccaaaggaaccaccatcactggaacagctggtaccactgtgggcaaaggagttacaacagttactcttccgatgattttcaattccagttatctccgacgaggtgaaagtcattggtggatgaagggctcaacccctacccagatctcagagatcatcattaaacttatcaaggatatggcagcaggtcatctgtcagaagcttggtcccgagtgacaaaaaatgctattgcagaaaccatcattgccttgaccaagatggaagaagaatttaggtctccagtgagatgtattgcaacaactagactctggcttgctctcgcatccctatgtgttcttgatcaggaccacgtagatcgtctctcctcggggagatggatgggaaaggatggacaacaaaaacaaatgcctatgtgtgataaccatgatgatggtgaaactgcagcaatcattttatgcaatgtctgtggaaatttatgtacagactgtgacagattccttcaccttcatcgaagaaccaaaactcatcaaagacaggtcttcaaagaagaagaagaagctataaaggttgaccttcatgaaggttgtggtagaaccaaattgttctggttgatggcactggcagattctaaaacaatgaaggcaatggtggaattccgagaacacacaggcaaacccaccacgagtagctcagaagcatgtcgcttctgtggttccaggagtggaacagagttatctgctgttggcagtgtttgttctgatgcagattgccaggaatacgctaagatagcctgtagtaagacgcatccttgtggccatccatgcgggggtgttaaaaacgaagagcactgtctgccctgtctacacggctgtgacaaaagtgccacaagcctgaagcaagacgccgatgacatgtgcatgatatgtttcaccgaagcgctctcggcagcaccagccattcagctggattgtagtcacatattccacttacagtgctgtcggcgagtattagaaaatcgatggcttggcccaaggataacatttggatttatatcttgtcccatttgcaagaacaaaattaatcacatagtactaaaagacctacttgatccaataaaagaactctatgaggatgtcagaagaaaagccttaatgagattggaatatgaaggtctgcataagagtgaagctatcacaactcctggtgtgaggttttataatgacccagctggctatgcaatgaatagatatgcatattatgtgtgctacaaatgcagaaaggcatattttggtggtgaagctcgctgcgatgctgaggctggacggggagatgattatgatcccagagagctcatttgtggtgcctgttctgatgtttccagggctcagatgtgtcccaaacatggcacagactttttggaatataaatgtcgctactgctgttcagtggctgtttttttctgttttggaacaacacatttttgtaatgcttgtcatgatgattttcaaagaatgactagcattcctaaggaagaactaccacactgtcctgcaggtcccaaaggcaagcagttagaaggaactgaatgtccactccatgttgttcatccacccactggggaagagtttgctctgggatgtggagtgtgcagaaatgcccacactttttagaacacgcagatcctttgtctacagagagaaaaattgccttcatcccccaagaggatgcggtgaagtttaaactctgctcaccataaggacgggaccatttttacatccatgaaaatgaaccattcacagtgcaagaaggataccaaataccatgtacataattcttgctatgaaaagtttccccattattttggtttatcttcttttgaacaaatgacatcaaacttgtgaggtgtttgcatgtggccattaccgtcattggcctgtgaagcattggacatttatagataattgatataaaagaatcgccatgcccatggactaagaacgatgctggctttcaagcaaaaaagaaaaataatcattgtttattgtatactgcctttttgtaatcctgtacaattgcatcacgggtggggataaaaagaggaatattctggtttatttcctagactgttatttaaaaaaaaaaaaaacattgtgttaggacagcatataaatgtaataagtatcacactgtatataaacatatcaatgtttgtcctgtataagaattactaaattacaaatgcaatttcatttaaacttctaggttaagtttgagcctgaaattttaatgaagtgcaatactgagtgtgcctcattatcttgcagctgtaaacatattggaatgtacatgtcaataaaaccactgtacatttttatacagtgataaagtctaaaaaaaaaaaaaaa

SEQ ID NO: 2111 - protein, 4641 aa, Homo sapiens
MPVPDGSVAAAGLGLGLPAADSPGHYQLLLSGRALADRYRRIYTAALNDRDQGGGSAGHPASRNKKILNKKKLKRKQKSKSKVKTRSKSENLENTVIIPDIKLHSNPSAFNIYCNVRHCVLEWQKKEISLAAASKNSVQSGESDSDEEEESKEPPIKLPKIIEVGLCEVFELIKETRFSHPSLCLRSLQALLNVLQGQQPEVLQSEPPEVLESLFQLLLEITVRSTGMNDSTGQSLTALSCACLFSLVASWGETGRTLQAISAILTNNGSHACQTIQVPTILNSLQRSVQAVLVGKIQIQDWFSNGIKKAALMHKWPLKEISVDEDDQCLLQNDGFFLYLLCKDGLYKIGSGYSGTVRGHIYNSTSRIRNRKEKKSWLGYAQGYLLYRDVNNHSMTAIRISPETLEQDGTVMLPDCHTEGQNILFTDGEYINQIAASRDDGFVVRIFATSTEPVLQQELQLKLARKCLHACRISLFDLEKDLHIISTGFDEESAILGAGREFALMKTANGKIYYTGKYQSLGIKQGGPSAGKWVELPITKSPKIVHFSVGHDGSHALLVAEDGSIFFTGSASKGEDGESIKSRRQSKPYKPKKIIKMEGKIVVYTACNNGSSSVISKDGELYMFGKDAIYSDSSSLVTDLKGHFVTQVAMGKAHTCVLMKNGEVWTFGVNNKGQCGRDTGAMNQGGKGFGVENMATAMDEDLEEELDEKDEKSMMCPPGMHKWKLEQCMVCTVCGDCTGYGASCVSSGRPDRVPGGICGCGSGESGCAVCGCCKACARELDGQEARQRGILDAVKEMIPLDLLLAVPVPGVNIEEHLQLRQEEKRQRVIRRHRLEEGRGPLVFAGPIFMNHREQALARLRSHPAHVKHKRDKHKDGSGERGEKDASKITTYPPGSVRFDCELRAVQVSCGFHHSVVLMENGDVYTFGYGQHGQLGHGDVNSRGCPTLVQALPGPSTQVTAGSNHTAVLLMDGQVFTFGSFSKGQLGRPILDVPYWNAKPAPMPNIGSKYGRKATWIGASGDQTFLRIDEALINSHVLATSEIFASKHIIGLVPASISEPPPFKCLLINKVDGSCKTFNDSEQEDLQGFGVCLDPVYDVIWRFRPNTRELWCYNAVVADARLPSAADMQSRCSILSPELALPTGSRALTTRSHAALHILGCLDTLAAMQDLKMGVASTEEETQAVMKVYSKEDYSVVNRFESHGGGWGYSAHSVEAIRFSADTDILLGGLGLFGGRGEYTAKIKLFELGPDGGDHETDGDLLAETDVLAYDCAAREKYAMMFDEPVLLQAGWWYVAWARVSGPSSDCGSHGQASITTDDGVVFQFKSSKKSNNGTDVNAGQIPQLLYRLPTSDGSASKGKQQTSEPVHILKRSFARTVSVECFESLLSILHWSWTTLVLGVEELRGLKGFQFTATLLDLERLRFVGTCCLRLLRVYTCEIYPVSATGKAVVEETSKLAECIGKTRTLLRKILSEPLDHCMVKLDNDPQGYLSQPLSLLEAVLQECHNTFTACFHSFYPTPALQWACLCDLLNCLDQDIQEANFKTSSSRLLAAVMSALCHTSVKLTSIFPIAYDGEVLLRSIVKQVSTENDSTLVHRFPLLVAHMEKLSQSEENISGMTSFREVLEKMLVIVVLPVRNSLRRENELFSSHLVSNTCGLLASIVSELTASALGSEVDGLNSLHSVKASANRFTKTSQGRSWNTGNGSPDAICFSVDKPGIVVVGFSVYGGGGIHEYELEVLVDDSEHAGDSTHSHRWTSLELVKGTYTTDDSPSDIAEIRLDKVVPLKENVKYAVRLRNYGSRTANGDGGMTTVQCPDGVTFTFSTCSLSSNGTNQTRGQIPQILYYRSEFDGDLQSQLLSKANEEDKNCSRALSVVSTVVRASKDLLHRALAVDADDIPELLSSSSLFSMLLPLIIAYIGPVAAAIPKVAVEVFGLVQQLLPSVAILNQKYAPPAFNPNQSTDSTTGNQPEQGLSACTTSSHYAVIESEHPYKPACVMHYKVTFPECVRWMTIEFDPQCGTAQSEDVLRLLIPVRTVQNSGYGPKLTSVHENLNSWIELKKFSGSSGWPTMVLVLPGNEALFSLETASDYVKDDKASFYGFMCFAIGYEFSPGPDEGVIQLEKELANLGGVCAAALMKKDLALPIGNELEEDLEILEEAALQVCKTHSGILGKGLALSHSPTILEALEGNLPLQIQSNEQSFLDDFIACVPGSSGGRLARWLQPDSYADPQKTSLILNKDDIRCGWPTTITVQTKDQYGDVVHVPNMKVEVKAVPVSQKKMSLQQDQAKKPQRIPGSPAVTAASSNTDMTYGGLASPKLDVSYEPMIVKEARYIAITMMKVYENYSFEELRFASPTPKRPSENMLIRVNNDGTYCANWTPGAIGLYTLHVTIDGIEIDAGLEVKVKDPPKGMIPPGTQLVKPKSEPQPNKVRKFVAKDSAGLRIRSHPSLQSEQIGIVKVNGTITFIDEIHNDDGVWLRLNDETIKKYVPNMNGYTEAWCLSFNQHLGKSLLVPVDESKTNTDDFFKDINSCCPQEATMQEQDMPFLRGGPGMYKVVKTGPSGHNIRSCPNLRGIPIGMLVLGNKVKAVGEVTNSEGTWVQLDQNSMVEFCESDEGEAWSLARDRGGNQYLRHEDEQALLDQNSQTPPPSPFSVQAFNKGASCSAQGFDYGLGNSKGDRGNISTSSKPASTSGKSELSSKHSRSLKPDGRMSRTTADQKKPRGTESLSASESLILKSDAAKLRSDSHSRSLSPNHNTLQTLKSDGRMPSSSRAESPGPGSRLSSPKPKTLPANRSSPSGASSPRSSSPHDKNLPQKSTAPVKTKLDPPRERSKSDSYTLDPDTLRKKKMPLTEPLRGRSTSPKPKSVPKDSTDSPGSENRAPSPHVVQENLHSEVVEVCTSSTLKTNSLTDSTCDDSSEFKSVDEGSNKVHFSIGKAPLKDEQEMRASPKISRKCANRHTRPKKEKSSFLFKGDGSKPLEPAKQAMSPSVAECARAVFASFLWHEGIVHDAMACSSFLKFHPELSKEHAPIRSSLNSQQPTEEKETKLKNRHSLEISSALNMFNIAPHGPDISKMGSINKNKVLSMLKEPPLHEKCEDGKTETTFEMSMHNTMKSKSPLPLTLQHLVAFWEDISLATIKAASQNMIFPSPGSCAVLKKKECEKGRNKKSKKEKKKKEKAEVRPRGNLFGEMAQLAVGGPEKDTICELCGESHPYPVTYHMRQAHPGCGRYAGGQGYNSIGHFCGGWAGNCGDGGIGGSTWYLVCDRCREKYLREKQAAAREKVKQSRRKPMQVKTPRALPTMEAHQVIKANALFLLSLSSAAEPSILCYHPAKPFQSQLPSVKEGISEDLPVKMPCLYLQTLARHHHENFVGYQDDNLFQDEMRYLRSTSVPAPYISVTPDASPNVFEEPESNMKSMPPSLETSPITDTDLAKRTVFQRSYSVVASEYDKQHSILPARVKAIPRRRVNSGDTEVGSSLLRHPSPELSRLISAHSSLSKGERNFQWPVLAFVIQHHDLEGLEIAMKQALRKSACRVFAMEAFNWLLCNVIQTTSLHDILWHFVASLTPAPVEPEEEEDEENKTSKENSEQEKDTRVCEHPLSDIVIAGERAHPLPHTFHRLLQTISDLMMSLPSGSSLQQMALRCWSLKFKQSDHQFLHQSNVFHHINNILSKSDDGDSEESFSISIQSGFEAMSQELCIVMCLKDLTSIVDIKTSSRPAMIGSLTDGSTETFWESGDEDKNKTKNITINCVKGINARYVSVHVDNSRDLGNKVTSMTFLTGKAVEDLCRIKQVDLDSRHIGWVTSELPGGDNHIIKIELKGPENTLRVRQVKVLGWKDGESTKIAGQISASVAQQRNCEAETLRVFRLITSQVFGKLISGDAEPTPEQEEKALLSSPEGEEKVYNATSDADLKEHMVGIIFSRSKLTNLQKQVCAHIVQAIRMEATRVREEWEHAISSKENANSQPNDEDASSDAYCFELLSMVLALSGSNVGRQYLAQQLTLLQDLFSLLHTASPRVQRQVTSLLRRVLPEVTPSRLASIIGVKSLPPADISDIIHSTEKGDWNKLGILDMFLGCIAKALTVQLKAKGTTITGTAGTTVGKGVTTVTLPMIFNSSYLRRGESHWWMKGSTPTQISEIIIKLIKDMAAGHLSEAWSRVTKNAIAETIIALTKMEEEFRSPVRCIATTRLWLALASLCVLDQDHVDRLSSGRWMGKDGQQKQMPMCDNHDDGETAAIILCNVCGNLCTDCDRFLHLHRRTKTHQRQVFKEEEEAIKVDLHEGCGRTKLFWLMALADSKTMKAMVEFREHTGKPTTSSSEACRFCGSRSGTELSAVGSVCSDADCQEYAKIACSKTHPCGHPCGGVKNEEHCLPCLHGCDKSATSLKQDADDMCMICFTEALSAAPAIQLDCSHIFHLQCCRRVLENRWLGPRITFGFISCPICKNKINHIVLKDLLDPIKELYEDVRRKALMRLEYEGLHKSEAITTPGVRFYNDPAGYAMNRYAYYVCYKCRKAYFGGEARCDAEAGRGDDYDPRELICGACSDVSRAQMCPKHGTDFLEYKCRYCCSVAVFFCFGTTHFCNACHDDFQRMTSIPKEELPHCPAGPKGKQLEGTECPLHVVHPPTGEEFALGCGVCRNAHTF

SEQ ID NO: 2112 - DNA, 2992 bp, Homo sapiens
ggcacgaggggcggccggtgagggggaagcaagtctggtctctgtgattgaagaagtcggctctgggctccagtgcgggaatcacacacatacctcagaatgccgggtctaagttgtagattttatcaacacaaatttcctgaggtggaagatgtagtgatggtgaatgtcagatccattgctgaaatgggggcttatgtcagcttgctggaatacaacaacattgaaggcatgattcttcttagtgaattatccagaaggcgtatccgttctatcaacaaactcatccgaattggcaggaatgagtgtgtggttgtcattagggtggacaaagaaaaaggatatattgatttgtcaaaaagaagagtttctccagaggaagcaatcaaatgtgaagacaaattcacaaaatccaaaactgtttatagcattcttcgtcatgttgctgaggtgttagaatacaccaaggatgagcagctggaaagcctattccagaggactgcctgggtctttgatgacaagtacaagagacctggatatggtgcctatgatgcatttaagcatgcagtctcagacccatctattttggatagtttagatttgaatgaagatgaacgggaagtactcattaataatattaataggcgcttgaccccacaggctgtcaaaattcgagcagatattgaagtggcttgttatggttatgaaggcattgatgctgtaaaagaagccctaagagcaggtttgaattgttctacagaaaacatgcccattaagattaatctaatagctcctcctcggtatgtaatgactacgacaaccctggagagaacagaaggcctttctgtcctcagtcaagctatggctgttatcaaagagaagattgaggaaaagaggggtgtgttcaatgttcaaatggagcccaaagtggtcacagatacagatgagactgaacttgcgaggcagatggagaggcttgaaagagaaaatgccgaagtggatggagatgatgatgcagaagaaatggaagccaaagctgaagattaactttgtgggaaacagagtccaatttaaggaacacagagcagcgcttcctggctgtaaatcctagacttgaaagttttccagtattgaaaacttcaaagctgaatattttttatttctaagtatttaaatgttctaacagatcagaacatgaaatgccctcctaaatgtcagctgttgtcacacagtagctccaacactttgagcatttttaagggagtggcctcatttcactagagacaaatctttaagaatagttctaaaattgggcttgtgatttccatttctgatgtctccagattggcacccctttctagttcaatgcctcacgagatttgccaggggcatccaaggcaaacaatcccaatctttctatataaaatgtattcaagcaaacatcaaataaatttctgggatatttaactataggcttcttccttcttgtcaccagttaaaagcattttaatactaagaccctaattcttttatctttattttagtcttgatgtggaactgtaggagcaggtgaataaaggatctctataacagatcctttcaaaagaagagttttagagaaaataaatttaactttaaccacagtgaaagttgacccttagcgggacaaagccttaaaatgcattgaaagaattagatcggttctgtgccttttatctatttgagattgatgacaacctgtgtgagagaatttatcacaccacgtccttattggaataataagctacttgccttgagtttataattcagggtggtaaagtatgtttttaaattttaaaaagcagctgcattttttatttagttggaatatcacccaattttttatttttattgctattaaaatatccactagatgccacctagagctccagttctttataacaaaacagggatctgtttgaacacttactgttgtttttttttttttacatgtttccatcatttctgtctttaagaactaattcgtacataataagtttcataggtaacacattatattctcttatgatacttgaggtaccagttgtatttaattttattcattatccctagatagctattaagatacttagattagacctaacccaccatagtcaatccaagactagactactcaatattaaagggtctggaaaatagaagagtgtgttgggcaggtagtttgtaccatttatgaaggtttgttcctttgttaaatttagcagcctgtactagcttttgaaatccagaagttttaacttccagtggctggtttctgagagagtgccatgattgctagccagcattccatattgggaatatgtagaggagaacctggatgtacttaagagtggcatataattttcacttctgtctgttgaggcaaaaaaaaaacaagtttagaaagctggcaacatgaagaatgcattcaaaatataacaggtgcttctttgttgtacgcagaggaattttttcttttgattttgtttactgaaatttgttatacttcaaaagccataacttgaaaaatactggtggcgtcgatggtgagtgatttttatcccacgtgggccttttgctcagttccatggcaattttgtaaattgaccctagccagagaatagatcagtatttcactgataccacgaggaaaagaacaaacaaaacttaaaagtattcatacaccttgctaacctaaaagacagcagggacaagatacatatgaggacaaggtatacacccagttctgaataacttgaagaacaggcttggcaaagaagtaagtttatccaaatcttgaatttctgccaggcatggtagctcatgcctgtaaccctggcacttaaggggccaaggcaggaggatcacttgaggccagtgagctgtgatcactccagtgcactcgagcctgggtgacagggcaagaccctgtctcaaaaaaaaaaaaaaaaaa

SEQ ID NO: 2113 - protein, 315 aa, Homo sapiens
MPGLSCRFYQHKFPEVEDVVMVNVRSIAEMGAYVSLLEYNNIEGMILLSELSRRRIRSINKLIRIGRNECVVVIRVDKEKGYIDLSKRRVSPEEAIKCEDKFTKSKTVYSILRHVAEVLEYTKDEQLESLFQRTAWVFDDKYKRPGYGAYDAFKHAVSDPSILDSLDLNEDEREVLINNINRRLTPQAVKIRADIEVACYGYEGIDAVKEALRAGLNCSTENMPIKINLIAPPRYVMTTTTLERTEGLSVLSQAMAVIKEKIEEKRGVFNVQMEPKVVTDTDETELARQMERLERENAEVDGDDDAEEMEAKAED

SEQ ID NO: 2114 - DNA, 3942 bp, Homo sapiens
gggtgattcagcgcccggcgaggcggaagcggccgcaagaggaggaggggagagcccgtccgcgcctgggctcccggggtggcacgagcccgcggccggagtgcgaggcggaggcgaggaggccgcggggacgggaggcgaggccggccgggcccccgaagccatggagaacgcgcacaccaagacggtggaggaggtgctgggccacttcggcgtcaacgagagtacggggctgagcctggaacaggtcaagaagcttaaggagagatggggctccaacgagttaccggctgaagaaggaaaaaccttgctggaacttgtgattgagcagtttgaagacttgctagttaggattttattactggcagcatgtatatcttttgttttggcttggtttgaagaaggtgaagaaacaattacagcctttgtagaaccttttgtaattttactcatattagtagccaatgcaattgtgggtgtatggcaggaaagaaatgctgaaaatgccatcgaagcccttaaggaatatgagcctgaaatgggcaaagtgtatcgacaggacagaaagagtgtgcagcggattaaagctaaagacatagttcctggtgatattgtagaaattgctgttggtgacaaagttcctgctgatataaggttaacttccatcaaatctaccacactaagagttgaccagtcaattctcacaggtgaatctgtctctgtcatcaagcacactgatcccgtccctgacccacgagctgtcaaccaagataaaaagaacatgctgttttctggtacaaacattgctgctgggaaagctatgggagtggtggtagcaactggagttaacaccgaaattggcaagatccgggatgaaatggtggcaacagaacaggagagaacaccccttcagcaaaaactagatgaatttggggaacagctttccaaagtcatctcccttatttgcattgcagtctggatcataaatattgggcacttcaatgacccggttcatggagggtcctggatcagaggtgctatttactactttaaaattgcagtggccctggctgtagcagccattcctgaaggtctgcctgcagtcatcaccacctgcctggctcttggaactcgcagaatggcaaagaaaaatgccattgttcgaagcctcccgtctgtggaaacccttggttgtacttctgttatctgctcagacaagactggtacacttacaacaaaccagatgtcagtctgcaggatgttcattctggacagagtggaaggtgatacttgttcccttaatgagtttaccataactggatcaacttatgcacctattggagaagtgcataaagatgataaaccagtgaattgtcaccagtatgatggtctggtagaattagcaacaatttgtgctctttgtaatgactctgctttggattacaatgaggcaaagggtgtgtatgaaaaagttggagaagctacagagactgctctcacttgcctagtagagaagatgaatgtatttgataccgaattgaagggtctttctaaaatagaacgtgcaaatgcctgcaactcagtcattaaacagctgatgaaaaaggaattcactctagagttttcacgtgacagaaagtcaatgtcggtttactgtacaccaaataaaccaagcaggacatcaatgagcaagatgtttgtgaagggtgctcctgaaggtgtcattgacaggtgcacccacattcgagttggaagtactaaggttcctatgacctctggagtcaaacagaagatcatgtctgtcattcgagagtggggtagtggcagcgacacactgcgatgcctggccctggccactcatgacaacccactgagaagagaagaaatgcaccttgaggactctgccaactttattaaatatgagaccaatctgaccttcgttggctgcgtgggcatgctggatcctccgagaatcgaggtggcctcctccgtgaagctgtgccggcaagcaggcatccgggtcatcatgatcactggggacaacaagggcactgctgtggccatctgtcgccgcatcggcatcttcgggcaggatgaggacgtgacgtcaaaagctttcacaggccgggagtttgatgaactcaacccctccgcccagcgagacgcctgcctgaacgcccgctgttttgctcgagttgaaccctcccacaagtctaaaatcgtagaatttcttcagtcttttgatgagattacagctatgactggcgatggcgtgaacgatgctcctgctctgaagaaagccgagattggcattgctatgggctctggcactgcggtggctaaaaccgcctctgagatggtcctggcggatgacaacttctccaccattgtggctgccgttgaggaggggcgggcaatctacaacaacatgaaacagttcatccgctacctcatctcgtccaacgtcggggaagttgtctgtattttcctgacagcagcccttggatttcccgaggctttgattcctgttcagctgctctgggtcaatctggtgacagatggcctgcctgccactgcactggggttcaaccctcctgatctggacatcatgaataaacctccccggaacccaaaggaaccattgatcagcgggtggctctttttccgttacttggctattggctgttacgtcggcgctgctaccgtgggtgctgctgcatggtggttcattgctgctgacggtggtccaagagtgtccttctaccagctgagtcatttcctacagtgtaaagaggacaacccggactttgaaggcgtggattgtgcaatctttgaatccccatacccgatgacaatggcgctctctgttctagtaactatagaaatgtgtaacgccctcaacagcttgtccgaaaaccagtccttgctgaggatgcccccctgggagaacatctggctcgtgggctccatctgcctgtccatgtcactccacttcctgatcctctatgtcgaacccttgccactcatcttccagatcacaccgctgaacgtgacccagtggctgatggtgctgaaaatctccttgcccgtgattctcatggatgagacgctcaagtttgtggcccgcaactacctggaacctgcaatactggagtaaccgcttcctaaaccattttgcagaaatgtaagggtgttcggttgcgtgcatgtgcgtttttagcaacacatctaccaaccctgtgcatgactgatgttggggaaaaagaaaagtaaaaaacttcccaactcactttgtgttatgtggaggaaatgtgtattaccaatggggttgttagcttttaaatcaaaatactgattacagatgtacaatttagcttaatcagaaagcctctccagagaagtttggtttctttgctgcaagaggaatgaggctctgtaaccttatctaagaacttggaagccgtcagccaagtcgccacatttctctgcaaaatgtcatagcttatataaatgtacagtattcaattgtaatgcatgccttcggttgtaagtagccagatccctctccagtgacattggaacatgctactttttaattggccctgtacagtttgcttatttataaattcattaaaaacactacaggtgttgaatggttaaaatgtaggcctccagttcattttcagttattttctgagtgtgcagacagctatttcgcactgtattaaatgtaacttatttaatgaaatcagaagcagtagacagatgttggtgcaatacaaatattgtgatgcatttatcttaataaaatgctaaatgtcaatttatcactgcgcatgtttgactttagactgtaaatagagatcagtttgtttctttctgtgctggtaacaatgagcgtcgcacagacatggtttcaggtaaataaatctattctatgat

SEQ ID NO: 2115 - protein, 997 aa, Homo sapiens
MENAHTKTVEEVLGHFGVNESTGLSLEQVKKLKERWGSNELPAEEGKTLLELVIEQFEDLLVRILLLAACISFVLAWFEEGEETITAFVEPFVILLILVANAIVGVWQERNAENAIEALKEYEPEMGKVYRQDRKSVQRIKAKDIVPGDIVEIAVGDKVPADIRLTSIKSTTLRVDQSILTGESVSVIKHTDPVPDPRAVNQDKKNMLFSGTNIAAGKAMGVVVATGVNTEIGKIRDEMVATEQERTPLQQKLDEFGEQLSKVISLICIAVWIINIGHFNDPVHGGSWIRGAIYYFKIAVALAVAAIPEGLPAVITTCLALGTRRMAKKNAIVRSLPSVETLGCTSVICSDKTGTLTTNQMSVCRMFILDRVEGDTCSLNEFTITGSTYAPIGEVHKDDKPVNCHQYDGLVELATICALCNDSALDYNEAKGVYEKVGEATETALTCLVEKMNVFDTELKGLSKIERANACNSVIKQLMKKEFTLEFSRDRKSMSVYCTPNKPSRTSMSKMFVKGAPEGVIDRCTHIRVGSTKVPMTSGVKQKIMSVIREWGSGSDTLRCLALATHDNPLRREEMHLEDSANFIKYETNLTFVGCVGMLDPPRIEVASSVKLCRQAGIRVIMITGDNKGTAVAICRRIGIFGQDEDVTSKAFTGREFDELNPSAQRDACLNARCFARVEPSHKSKIVEFLQSFDEITAMTGDGVNDAPALKKAEIGIAMGSGTAVAKTASEMVLADDNFSTIVAAVEEGRAIYNNMKQFIRYLISSNVGEVVCIFLTAALGFPEALIPVQLLWVNLVTDGLPATALGFNPPDLDIMNKPPRNPKEPLISGWLFFRYLAIGCYVGAATVGAAAWWFIAADGGPRVSFYQLSHFLQCKEDNPDFEGVDCAIFESPYPMTMALSVLVTIEMCNALNSLSENQSLLRMPPWENIWLVGSICLSMSLHFLILYVEPLPLIFQITPLNVTQWLMVLKISLPVILMDETLKFVARNYLEPAILE

SEQ ID NO: 2116 - DNA, 4205 bp, Homo sapiens
gggtgattcagcgcccggcgaggcggaagcggccgcaagaggaggaggggagagcccgtccgcgcctgggctcccggggtggcacgagcccgcggccggagtgcgaggcggaggcgaggaggccgcggggacgggaggcgaggccggccgggcccccgaagccatggagaacgcgcacaccaagacggtggaggaggtgctgggccacttcggcgtcaacgagagtacggggctgagcctggaacaggtcaagaagcttaaggagagatggggctccaacgagttaccggctgaagaaggaaaaaccttgctggaacttgtgattgagcagtttgaagacttgctagttaggattttattactggcagcatgtatatcttttgttttggcttggtttgaagaaggtgaagaaacaattacagcctttgtagaaccttttgtaattttactcatattagtagccaatgcaattgtgggtgtatggcaggaaagaaatgctgaaaatgccatcgaagcccttaaggaatatgagcctgaaatgggcaaagtgtatcgacaggacagaaagagtgtgcagcggattaaagctaaagacatagttcctggtgatattgtagaaattgctgttggtgacaaagttcctgctgatataaggttaacttccatcaaatctaccacactaagagttgaccagtcaattctcacaggtgaatctgtctctgtcatcaagcacactgatcccgtccctgacccacgagctgtcaaccaagataaaaagaacatgctgttttctggtacaaacattgctgctgggaaagctatgggagtggtggtagcaactggagttaacaccgaaattggcaagatccgggatgaaatggtggcaacagaacaggagagaacaccccttcagcaaaaactagatgaatttggggaacagctttccaaagtcatctcccttatttgcattgcagtctggatcataaatattgggcacttcaatgacccggttcatggagggtcctggatcagaggtgctatttactactttaaaattgcagtggccctggctgtagcagccattcctgaaggtctgcctgcagtcatcaccacctgcctggctcttggaactcgcagaatggcaaagaaaaatgccattgttcgaagcctcccgtctgtggaaacccttggttgtacttctgttatctgctcagacaagactggtacacttacaacaaaccagatgtcagtctgcaggatgttcattctggacagagtggaaggtgatacttgttcccttaatgagtttaccataactggatcaacttatgcacctattggagaagtgcataaagatgataaaccagtgaattgtcaccagtatgatggtctggtagaattagcaacaatttgtgctctttgtaatgactctgctttggattacaatgaggcaaagggtgtgtatgaaaaagttggagaagctacagagactgctctcacttgcctagtagagaagatgaatgtatttgataccgaattgaagggtctttctaaaatagaacgtgcaaatgcctgcaactcagtcattaaacagctgatgaaaaaggaattcactctagagttttcacgtgacagaaagtcaatgtcggtttactgtacaccaaataaaccaagcaggacatcaatgagcaagatgtttgtgaagggtgctcctgaaggtgtcattgacaggtgcacccacattcgagttggaagtactaaggttcctatgacctctggagtcaaacagaagatcatgtctgtcattcgagagtggggtagtggcagcgacacactgcgatgcctggccctggccactcatgacaacccactgagaagagaagaaatgcaccttgaggactctgccaactttattaaatatgagaccaatctgaccttcgttggctgcgtgggcatgctggatcctccgagaatcgaggtggcctcctccgtgaagctgtgccggcaagcaggcatccgggtcatcatgatcactggggacaacaagggcactgctgtggccatctgtcgccgcatcggcatcttcgggcaggatgaggacgtgacgtcaaaagctttcacaggccgggagtttgatgaactcaacccctccgcccagcgagacgcctgcctgaacgcccgctgttttgctcgagttgaaccctcccacaagtctaaaatcgtagaatttcttcagtcttttgatgagattacagctatgactggcgatggcgtgaacgatgctcctgctctgaagaaagccgagattggcattgctatgggctctggcactgcggtggctaaaaccgcctctgagatggtcctggcggatgacaacttctccaccattgtggctgccgttgaggaggggcgggcaatctacaacaacatgaaacagttcatccgctacctcatctcgtccaacgtcggggaagttgtctgtattttcctgacagcagcccttggatttcccgaggctttgattcctgttcagctgctctgggtcaatctggtgacagatggcctgcctgccactgcactggggttcaaccctcctgatctggacatcatgaataaacctccccggaacccaaaggaaccattgatcagcgggtggctctttttccgttacttggctattggctgttacgtcggcgctgctaccgtgggtgctgctgcatggtggttcattgctgctgacggtggtccaagagtgtccttctaccagctgagtcatttcctacagtgtaaagaggacaacccggactttgaaggcgtggattgtgcaatctttgaatccccatacccgatgacaatggcgctctctgttctagtaactatagaaatgtgtaacgccctcaacagcttgtccgaaaaccagtccttgctgaggatgcccccctgggagaacatctggctcgtgggctccatctgcctgtccatgtcactccacttcctgatcctctatgtcgaacccttgccactcatcttccagatcacaccgctgaacgtgacccagtggctgatggtgctgaaaatctccttgcccgtgattctcatggatgagacgctcaagtttgtggcccgcaactacctggaacctggtaaagagtgtgtgcagcctgccaccaaatcctgctcgttctcggcatgcaccgatgggatttcctggccgtttgtgctgctcataatgcccctggtgatctgggtctatagcacagacactaactttagcgatatgttctggtcttgactgacagttttccataaagaagatgtttaacttaatcaattaatttttttattgtttaaagcaactgtctatttctgctgaattttcacatgaacatactggctggtgatggaggtttcatactctagattttgttttgctttttctgactccagtggggcaagattttccttttttatacacataattaaagtgtccattgacatgtacagagaactaacactattttatgcaaatatttttttgtagatgaaaaagcatgtacagtgttctgtttaatactcatccttgtataaaaaaaatagttgagccagcagacattgtcagcaaattaattggcagcagattttaggaaatgaatgtgtgtggttttttttctaaaactaaatagcatgtattgtgtcttttgcatgatgatccggatttaatttgatatcacagtctaatttttattcataagccaatttttctgcactgagcagagtcttgctacctcagtcagtattgttttggtttgctacttccctcacccactttggcctccgttcaccccaccccaccccacctctccccaccttacccccgccccgcttggcttcttctttaggattgtgatggttcgttctgtttacatcagttttaacgagaggtatgcctgtactcgcttgtgcagaaaacattgttccagattcaatcgactgggtttatgtcccttcacatagtttttaaggttatttatttaaatgtctaatgtattttattgtaacagacattgttttgccaacattgcctatttcagtggcacgtcatctagttttaaaaaaataaaacattttaaatggacagagaaaaaaaaaaaaaaaaaaaaaaaaaaaaaaaaaaaaaaaaaaaaaaaaaaaaaaaaaaaaaaaaa

SEQ ID NO: 2117 - protein, 1042 aa, Homo sapiens
MENAHTKTVEEVLGHFGVNESTGLSLEQVKKLKERWGSNELPAEEGKTLLELVIEQFEDLLVRILLLAACISFVLAWFEEGEETITAFVEPFVILLILVANAIVGVWQERNAENAIEALKEYEPEMGKVYRQDRKSVQRIKAKDIVPGDIVEIAVGDKVPADIRLTSIKSTTLRVDQSILTGESVSVIKHTDPVPDPRAVNQDKKNMLFSGTNIAAGKAMGVVVATGVNTEIGKIRDEMVATEQERTPLQQKLDEFGEQLSKVISLICIAVWIINIGHFNDPVHGGSWIRGAIYYFKIAVALAVAAIPEGLPAVITTCLALGTRRMAKKNAIVRSLPSVETLGCTSVICSDKTGTLTTNQMSVCRMFILDRVEGDTCSLNEFTITGSTYAPIGEVHKDDKPVNCHQYDGLVELATICALCNDSALDYNEAKGVYEKVGEATETALTCLVEKMNVFDTELKGLSKIERANACNSVIKQLMKKEFTLEFSRDRKSMSVYCTPNKPSRTSMSKMFVKGAPEGVIDRCTHIRVGSTKVPMTSGVKQKIMSVIREWGSGSDTLRCLALATHDNPLRREEMHLEDSANFIKYETNLTFVGCVGMLDPPRIEVASSVKLCRQAGIRVIMITGDNKGTAVAICRRIGIFGQDEDVTSKAFTGREFDELNPSAQRDACLNARCFARVEPSHKSKIVEFLQSFDEITAMTGDGVNDAPALKKAEIGIAMGSGTAVAKTASEMVLADDNFSTIVAAVEEGRAIYNNMKQFIRYLISSNVGEVVCIFLTAALGFPEALIPVQLLWVNLVTDGLPATALGFNPPDLDIMNKPPRNPKEPLISGWLFFRYLAIGCYVGAATVGAAAWWFIAADGGPRVSFYQLSHFLQCKEDNPDFEGVDCAIFESPYPMTMALSVLVTIEMCNALNSLSENQSLLRMPPWENIWLVGSICLSMSLHFLILYVEPLPLIFQITPLNVTQWLMVLKISLPVILMDETLKFVARNYLEPGKECVQPATKSCSFSACTDGISWPFVLLIMPLVIWVYSTDTNFSDMFWS

SEQ ID NO: 2118 - DNA, 5268 bp, Homo sapiens
atggcgtcggagctagagccagaggtgcaggccatcgaccggagtttgctggaatgttcggccgaggagattgcggggaaatggctgcaagcaactgacctcactagagaagtgtaccagcatttagcccactatgtacccaaaatctactgcaggggtcccaacccttttccacagaaagaagacatgctggcacagcatgttttgttgggaccaatggaatggtacctttgtggtgaagatcctgcatttggatttccaaaacttgagcaagcaaacaaaccttctcatctttgtggtcgtgtttttaaagtaggagagcctacatattcttgcagagactgtgcagttgatccaacttgtgttttgtgcatggagtgctttttgggaagtattcacagagatcatcgatataggatgacaacatcaggaggtggaggtttctgtgactgtggtgatactgaagcctggaaagagggtccttactgtcaaaaacatgaacttaacacctctgaaattgaggaagaagaggatcctcttgttcatttatcagaagatgtgatagcaagaacttataacatttttgctattacgtttcggtatgcagtagaaatattaacctgggaaaaagaaagtgaattgccagcagatttagagatggtagagaagagtgacacctactattgcatgctgtttaatgatgaggttcacacctatgaacaagttatttatactcttcagaaagctgttaactgtacacaaaaagaagctattggttttgcaactacagtagatcgagatgggcgtaggtctgttcgatatggagattttcagtattgtgagcaagcaaaatcagtaattgtgagaaataccagtagacagacaaagccactcaaagttcaagttatgcattcgtctattgtcgcacatcagaattttggtttgaaacttttgtcttggctgggaagtattattggatattcagatggccttcgccggattttatgtcaagttggtttacaagaagggccagatggtgaaaactcttctctagtggacagactgatgcttagtgattccaaattatggaaaggtgctaggagtgtatatcatcagttgttcatgagcagtctgcttatggatttgaaatacaagaaactatttgctgttcgatttgcaaaaaattaccagcagttgcagagagattttatggaggatgatcacgagcgagcagtgtcggtgactgctctatctgtccagttcttcaccgcacctactctggctcgaatgctcatcacagaagaaaacttgatgagcattatcattaagacttttatggatcatttgagacatcgagatgcccagggcagatttcagtttgaacgatacactgctttacaagccttcaaatttaggagagtacagagccttattttagatctcaagtatgtgttaattagcaaaccaactgaatggtcagatgagctgaggcagaagttcctagaagggtttgatgcctttttggaattactaaaatgtatgcagggaatggatccaattacacgtcaagtaggacaacatattgaaatggaaccagagtgggaagcagccttcacactacaaatgaaattaacacatgtcatttcaatgatgcaggactggtgtgcttcagatgaaaaagtgttaatcgaagcttacaagaaatgtctcgctgtactgatgcagtgtcatggtggttatactgatggtgaacagccaatcacactaagcatttgtggacattcagtggaaactatcagatactgtgtttcccaagaaaaagttagcattcacctcccagtttctcgcttacttgcaggtttacatgtattattaagcaaaagtgaagtggcatataaatttccagagctcctacctctaagtgaacttagcccacccatgttgatagaacaccctcttagatgtcttgttctgtgtgcccaagtacatgccggaatgtggagaagaaatgggttctctctagtaaaccagatttattactaccataatgtgaaatgcagacgtgagatgtttgacaaggatgtagtaatgcttcagacaggtgtctccatgatggatccaaatcatttcctgatgatcatgctcagccgctttgaactttatcagattttcagtactccagactatggaaaaagatttagttctgagattacccataaggatgttgttcagcagaacaatactctaatagaagaaatgctatacctcattataatgcttgttggagagagatttagtcctggagttggacaggtaaatgctacagatgaaatcaagcgagagattatccatcagttgagtatcaagcctatggctcatagtgaattggtaaagtctttacctgaagatgagaacaaggagactggcatggagagtgtaatcgaagcagttgcccatttcaagaaacctggattaacaggacgaggcatgtatgaactgaaaccagaatgtgccaaagagttcaacttgtatttctatcacttttcaagggcagaacagtccaaggcagaagaagcgcaacggaaattgaaaagacaaaatagagaagatacagcactcccacctccggtgttgcctccattctgccctctgtttgcaagcctggttaacattttgcagtcagatgtcatgttgtgcatcatgggaacaattctgcaatgggctgtggaacataatggatatgcctggtcagagtccatgctgcaaagggtgttacatttaattggcatggcactacaagaagaaaaacaacatttagagaatgtcacggaagagcatgtagtaacatttaccttcactcagaagatatcaaaacctggtgaagcgccaaaaaattctcctagcatactagctatgctggaaacactacaaaatgctccctacctagaagtccacaaagacatgattcggtggatattgaagacttttaatgctgttaaaaagatgagggagagttcacctaccagtcccgtggcagagacagaaggaaccataatggaagagagttcaagggacaaagacaaagctgagaggaagagaaaagcagagattgccagactgcgcagagaaaagatcatggctcagatgtctgaaatgcagcggcattttattgatgaaaacaaagaactctttcagcagacattagaactggatgcctcaacctctgctgttcttgatcatagccctgtggcttcagatatgacacttacagcactgggccccgcacaaactcaggttcctgaacaaagacaattcgttacatgtatattgtgtcaagaggagcaagaagttaaagtggaaagcagggcaatggtcttggcagcatttgttcagagatcaactgtattatcaaaaaacagaagtaaatttattcaagatccagaaaaatatgatccattattcatgcaccctgatctgtcttgtggaacacacactagtagctgtgggcacattatgcatgcccattgttggcaaaggtattttgattccgttcaagctaaagaacagcgaaggcaacagagattacgcttacatacgagctatgatgtagaaaacggagaattcctttgccccctttgtgaatgcttgagtaatactgttattcctctgctgcttcctccaagaaatatttttaacaacaggttaaatttttcagaccaaccaaatctgactcagtggattagaacaatatctcagcaaataaaagcattacagtttcttaggaaagaagaaagtactcctaataatgcctctacaaagaattcagaaaatgtggatgaattacagctccctgaagggttcaggcctgattttcgtcctaagatcccttattctgagagcataaaagaaatgctaacgacatttggaactgctacctacaaggtgggactaaaggttcatcccaatgaagaggatcctcgtgttcccataatgtgttggggtagctgcgcgtacaccatccaaagcatagaaagaattttgagtgatgaagataaaccattgtttggtcctttaccttgcagactggatgactgtcttaggtcattgacgagatttgccgcagcacactggacagtggcatcagtttcagtggtgcaaggacatttttgtaaactttttgcatcactggtgcctaatgacagccatgaggaacttccatgcatattagatattgacatgtttcatttattggtgggcttggtgcttgcatttcctgcgttgcagtgtcaggatttttcagggatcagccttggcactggagaccttcacattttccatctggttactatggcacacatcatacagatcttacttacctcatgtacagaagagaatggcatggatcaagaaaatcccccttgtgaagaagaatcagcagttcttgctttgtataaaacacttcaccagtatacgggaagtgccttgaaagaaataccatccggctggcatctgtggaggagtgtcagagctggaatcatgcctttcctgaagtgttctgctttattttttcattacttaaatggagttccttccccacccgacattcaagttcctggaacaagccattttgaacatttatgtagctatctttccctaccaaacaacctcatttgcctttttcaagaaaatagtgagataatgaattcactgattgaaagttggtgccgtaacagtgaagttaaaagatatctagaaggtgaaagagatgctataagatatccaagagaatctaacaaattaataaaccttccagaggattacagcagcctcattaatcaagcatccaatttctcgtgcccgaaatcaggtggtgataagagcagagccccaactctgtgccttgtgtgcggatctctgctgtgctcccagagttactgctgccagactgaactggaaggggaggatgtaggagcctgcacagctcacacctactcctgtggctctggagtgggcatcttcctgagagtacgggaatgtcaggtgctatttttagctggcaaaaccaaaggctgtttttattctcctccttaccttgatgactatggggagaccgaccagggactcagacggggaaatcctttacatttatgcaaagagcgattcaagaagattcagaagctctggcaccaacacagtgtcacagaggaaattggacatgcacaggaagccaatcagacactggttggcattgactggcaacatttataa

SEQ ID NO: 2119 - protein, 1755 aa, Homo sapiens
MASELEPEVQAIDRSLLECSAEEIAGKWLQATDLTREVYQHLAHYVPKIYCRGPNPFPQKEDMLAQHVLLGPMEWYLCGEDPAFGFPKLEQANKPSHLCGRVFKVGEPTYSCRDCAVDPTCVLCMECFLGSIHRDHRYRMTTSGGGGFCDCGDTEAWKEGPYCQKHELNTSEIEEEEDPLVHLSEDVIARTYNIFAITFRYAVEILTWEKESELPADLEMVEKSDTYYCMLFNDEVHTYEQVIYTLQKAVNCTQKEAIGFATTVDRDGRRSVRYGDFQYCEQAKSVIVRNTSRQTKPLKVQVMHSSIVAHQNFGLKLLSWLGSIIGYSDGLRRILCQVGLQEGPDGENSSLVDRLMLSDSKLWKGARSVYHQLFMSSLLMDLKYKKLFAVRFAKNYQQLQRDFMEDDHERAVSVTALSVQFFTAPTLARMLITEENLMSIIIKTFMDHLRHRDAQGRFQFERYTALQAFKFRRVQSLILDLKYVLISKPTEWSDELRQKFLEGFDAFLELLKCMQGMDPITRQVGQHIEMEPEWEAAFTLQMKLTHVISMMQDWCASDEKVLIEAYKKCLAVLMQCHGGYTDGEQPITLSICGHSVETIRYCVSQEKVSIHLPVSRLLAGLHVLLSKSEVAYKFPELLPLSELSPPMLIEHPLRCLVLCAQVHAGMWRRNGFSLVNQIYYYHNVKCRREMFDKDVVMLQTGVSMMDPNHFLMIMLSRFELYQIFSTPDYGKRFSSEITHKDVVQQNNTLIEEMLYLIIMLVGERFSPGVGQVNATDEIKREIIHQLSIKPMAHSELVKSLPEDENKETGMESVIEAVAHFKKPGLTGRGMYELKPECAKEFNLYFYHFSRAEQSKAEEAQRKLKRQNREDTALPPPVLPPFCPLFASLVNILQSDVMLCIMGTILQWAVEHNGYAWSESMLQRVLHLIGMALQEEKQHLENVTEEHVVTFTFTQKISKPGEAPKNSPSILAMLETLQNAPYLEVHKDMIRWILKTFNAVKKMRESSPTSPVAETEGTIMEESSRDKDKAERKRKAEIARLRREKIMAQMSEMQRHFIDENKELFQQTLELDASTSAVLDHSPVASDMTLTALGPAQTQVPEQRQFVTCILCQEEQEVKVESRAMVLAAFVQRSTVLSKNRSKFIQDPEKYDPLFMHPDLSCGTHTSSCGHIMHAHCWQRYFDSVQAKEQRRQQRLRLHTSYDVENGEFLCPLCECLSNTVIPLLLPPRNIFNNRLNFSDQPNLTQWIRTISQQIKALQFLRKEESTPNNASTKNSENVDELQLPEGFRPDFRPKIPYSESIKEMLTTFGTATYKVGLKVHPNEEDPRVPIMCWGSCAYTIQSIERILSDEDKPLFGPLPCRLDDCLRSLTRFAAAHWTVASVSVVQGHFCKLFASLVPNDSHEELPCILDIDMFHLLVGLVLAFPALQCQDFSGISLGTGDLHIFHLVTMAHIIQILLTSCTEENGMDQENPPCEEESAVLALYKTLHQYTGSALKEIPSGWHLWRSVRAGIMPFLKCSALFFHYLNGVPSPPDIQVPGTSHFEHLCSYLSLPNNLICLFQENSEIMNSLIESWCRNSEVKRYLEGERDAIRYPRESNKLINLPEDYSSLINQASNFSCPKSGGDKSRAPTLCLVCGSLLCSQSYCCQTELEGEDVGACTAHTYSCGSGVGIFLRVRECQVLFLAGKTKGCFYSPPYLDDYGETDQGLRRGNPLHLCKERFKKIQKLWHQHSVTEEIGHAQEANQTLVGIDWQHL

SEQ ID NO: 2120 - DNA, 398 bp, Homo sapiens
ctctccgccagaccgccgccgcgccgccatcatggacaccagccgtgtgcagcctatcaagctggccagggtcaccaaggtcctgggcaggaccggttctcagggacagtgcacgcaggtgcgcgtggaattcatggacgacacgagccgatccatcatccgcaatgtaaaaggccccgtgcgcgagggcgacgtgctcacccttttggagtcagagcgagaagcccggaggttgcgctgagcttggctgctcgctgggtcttggatgtcgggttcgaccacttggccgatgggaatggtctgtcacaatctgctccttttttttgtccgccacacgtaactgagatgctcctttaaataaagcgtttgtgtttcaagttaaaaaaaaaaaaaaaaaa

SEQ ID NO: 2121 - protein, 69 aa, Homo sapiens [sequence omitted]

SEQ ID NO: 2122 - DNA, 644 bp, Homo sapiens
gcgcgggcggctggggaatggctgctgccatggtgccggggcgcagcgagagctgggagcgcggggagcctggccgcccggccctgtacttctgcgggagcattcgcggcggacgcgaggacaggacgctgtacgagcggatcgtgtctcggctgcggcgattcgggacagtgctcaccgagcacgtggcggccgccgagctgggcgcgcgcggggaagaggctgctgggggtgacaggctcatccatgagcaggacctggagtggctgcagcaggcggacgtggtcgtggcagaagtgacacagccatccttgggtgtaggctatgagctgggccgggccgtggcctttaacaagcggatcctgtgcctgttccgcccgcagtctggccgcgtgctttcggccatgatccggggagcagcagatggctctcggttccaggtgtgggactatgaggagggagaggtggaggccctgctggatcgatacttcgaggctgatcctccagggcaggtggctgcctcccctgacccaaccacttgacttaatctcactttcttaaattcttctattctcagacactgctctagtaccattccttcctcttagccccaggagcaaattaaaaggtacagttaaaatcct

SEQ ID NO: 2123 - protein, 174 aa, Homo sapiens
MAAAMVPGRSESWERGEPGRPALYFCGSIRGGREDRTLYERIVSRLRRFGTVLTEHVAAAELGARGEEAAGGDRLIHEQDLEWLQQADVVVAEVTQPSLGVGYELGRAVAFNKRILCLFRPQSGRVLSAMIRGAADGSRFQVWDYEEGEVEALLDRYFEADPPGQVAASPDPTT

SEQ ID NO: 2124 - DNA, 513 bp, Homo sapiens
tccttctttcctttttgctgtaggcccgggtggttgctgccgaaatgggcaagttcatgaaacctgggaaggtggtgcttgtcctggctggacgctactccggacgcaaagctgtcatcgtgaagaacattgatgatggcacctcagatcgcccctacagccatgctctggtggctggaattgaccgctacccccgcaaagtgacagctgccatgggcaagaagaagatcgccaagagatcaaagataaaatcttttgtgaaagtgtataactacaatcacctaatgcccacaaggtactctgtggatatccccttggacaaaactgtcgtcaataaggatgtcttcagagatcctgctcttaaacgcaaggcccgacgggaggccaaggtcaagtttgaagagagatacaagacaggcaagaacaagtggttcttccagaaactgcggttttagatgctttgttttgatcattaaaaattataaagaaaaaaaaaaaaaaaaaaaaaaaaaa

SEQ ID NO: 2125 - protein, 136 aa, Homo sapiens [sequence omitted]

SEQ ID NO: 2126 - DNA, 5238 bp, Homo sapiens
gaattcggcacgaggtcttcctgtcccggagctaccagcggctcgccgatgcctgtaggggcctcctggcactgctgtttcctctcagatacagcttcacctatgtgcccatcctgccggctcagctgctggaggtcctcagcacacccacgcccttcatcattggggtcaacgcggccttccaggcagagacccaggagctgctcgatgtgattgttgctgatctggatggagggacggtcaccattcctgagtgtgtgcacattccacccttgccagagccactgcagagtcagacgcacagtgtgctgagcatggtcctggacccggagctggagttggctgacctcgccttccctccgcccacgacatccacctcctccctgaagatgcaggacaaggagctgcgcgcggtcttcctgcggctgttcgctcagctgctgcagggctatcgctggtgcctgcacgtcgtgcgcatccacccggagcctgtcatccgcttccataaggcagccttcctggggcagcgtgggctggtagaggacgatttcctgatgaaggtgctggagggcatggcctttgctggctttgtgtcagagcgtggggtcccataccgccctacggacctgttcgatgagctggtggcccacgaggtggcaaggatgcgggcggatgagaaccacccccagcgtgtcctgcgtcacgtccaggaactggcagagcagctctacaagaacgagaacccgtacccagccgtggcgatgcacaaggtacagaggcccggtgagagcagccacctgcgacgggtgccccgacccttcccccggctggatgagggcaccgtgcagtggatcgtggaccaggctgcagccaagatgcagggtgcacccccagctgtgaaggccgagaggaggaccaccgtgccctcagggccccccatgactgccatactggagcggtgcagtgggctgcatgtcaacagcgcccggcggctggaggttgtgcgcaactgcatctcctacgtgtttgaggggaaaatgcttgaggccaagaagctgctcccagccgtgttgagggccctgaaggggcgagttgcccgccgctgcctcgcccaggagctgcacctgcatgtgcagcagaaccgtgcggtcctggaccaccagcagtttgactttgtcgtccgtatgatgaactgctgcctgcaggactgcacttctctggacgagcatggcattgcggcggctctgctgcctctggtcacagccttctgccggaagctgagcccgggggtgacgcagtttgcatacagctgtgtgcaggagcacgtggtgtggagcacgccacagttctgggaggccatgttctatggggatgtgcagactcacatccgggccctctacctggagcccacggaggacctggcccccgcccaggaggttggggaggcaccttcccaggaggacgagcgctctgccctagacgtggcttctgagcagcggcgcttgtggccaactctgagtcgtgagaagcagcaggagctggtgcagaaggaggagagcacggtgttcagccaggccatccactatgccaaccgcatgagctacctcctcctgcccctggacagcagcaagagccgcctacttcgggagcgtgccgggctgggcgacctggagagcgccagcaacagcctggtcaccaacagcatggctggcagtgtggccgagagctatgacacggagagcggcttcgaggatgcagagacctgcgacgtagctggggctgtggtccgcttcatcaaccgctttgtggacaaggtctgcacggagagtggggtcaccagcgaccacctcaaggggctgcatgtcatggtgccagacattgtccagatgcacatcgagaccctggaggccgtgcagcgggagagccggaggctgccgcccatccagaagcccaagctgctgcggccgcgcctgctgccgggtgaggagtgtgtgctggacggcctgcgcgtctacctgctgccggatgggcgtgaggagggcgcggggggcagtgctgggggaccagcattgctcccagctgagggcgccgtcttcctcaccacgtaccgggtcatcttcacggggatgcccacggaccccctggttggggagcaggtggtggtccgctccttcccggtggctgcgctgaccaaggagaagcgcatcagcgtccagacccctgtggaccagctcctgcaggacgggctccagctgcgctcctgcacattccagctgctgaaaatggcctttgacgaggaggtggggtctgacagcgccgagctcttccgtaagcagctgcataagctgcggtacccgccggacatcagggccacctttgcgttcaccttgggctctgcccacacacctggccggccaccgcgagtcaccaaggacaagggtccttccctcagaaccctgtcccggaacctggtcaagaacgccaagaagaccatcgggcggcagcatgtcactcgcaagaagtacaacccccccagctgggagcaccggggccagccgccccctgaggaccaggaggacgagatctcagtgtcggaggagctggagcccagcacgctgaccccgtcctcagccctgaagccctccgaccgcatgaccatgagcagcctggtggaaagggcttgctgtcgcgactaccagcgcctcggtctgggcaccctgagcagcagcctgagccgggccaagtctgagcccttccgcatttctccggtcaaccgcatgtatgccatctgccgcagctacccagggctgctgatcgtgcgccagagtgtccaggacaacgccctgcagcgcgtgtcccgctgctaccgccagaaccgcttccccgtggtctgctggcgcagcgggcggtccaaggcggtgctgctgcgctctggaggcctgcatggcaaaggtgtcgtcggcctcttcaaggcccagaacgcaccttctccaggccagtcccaggcggactcgagtagcctggagcaggagaagtacctgcaggctgtggtcagctccatgccccgctacgccgacgcgtcgggacgcaacacgcttagcggcttctcctcagcccacatgggcagtcacggtaagtggggcagtgtccggaccagtggacgcagcagtggccttggcaccgatgtgggctcccggctagctggcagagacgcgctggccccaccccaggccaacgggggccctcccgacccgggcttcctgcgtccgcagcgagcagccctctatatccttggggacaaagcccagctcaagggtgtgcggtcagaccccctgcagcagtgggagctggtgcccattgaggtattcgaggcacggcaggtgaaggctagcttcaagaagctgctgaaagcatgtgtcccaggctgccccgctgctgagcccagcccagcctccttcctgcgctcactggaggactcagagtggctgatccagatccacaagctgctgcaggtgtctgtgctggtggtggagctcctggattcaggctcctccgtgctggtgggcctggaggatggctgggacatcaccacccaggtggtatccttggtgcagctgctctcagaccccttctaccgcacgctggagggctttcgcctgctggtggagaaggagtggctgtccttcggccatcgcttcagccaccgtggagctcacaccctggccgggcagagcagcggcttcacacccgtcttcctgcagttcctggactgcgtacaccaggtccacctgcagttccccatggagtttgagttcagccagttctacctcaagttcctcggctaccaccatgtgtcccgccgtttccggaccttcctgctcgactctgactatgagcgcattgagctggggctgctgtatgaggagaagggggaacgcaggggccaggtgccgtgcaggtctgtgtgggagtatgtggaccggctgagcaagaggacgcctgtgttccacaattacatgtatgcgcccgaggacgcagaggtcctgcggccctacagcaacgtgtccaacctgaaggtgtgggacttctacactgaggagacgctggccgaggccctccctatgactgggaactggcccaggggccccctgaacccccagaggaagaacggtctgatggaggcgtccccagagcagcgccgcgtggtgtggccctgttacgacagctgcccgcgggcccagcctgacgccatctcacgcctgctggaggagctgcagaggctggagacagagttgggccaacccgctgagcgctggaaggacacctgggaccgggtgaaggctgcacagcgcctcgagggccggccagacggccgtggcacccctagctccctccttgtgtccaccgcaccccaccaccgtcgctcgctgggtgtgtacctgcaggaggggcccgtgggctccaccctgagcctcagcctggacagcgaccagagtagtggctcaaccacatccggctcccgtcaggctgcccgccgcagcaccagcaccctgtacagccagttccagacagcagagagtgagaacaggtcctacgagggcactctgtacaagaagggggccttcatgaagccttggaaggcccgctggttcgtgctggacaagaccaagcaccagctgcgctactacgaccaccgtgtggacacagagtgcaagggtgtcatcgacttggcggaggtggaggctgtggcacctggcacgcccactatgggtgcccctaagactgtggacgagaaggccttctttgacgtgaagacaacgcgtcgcgtttacaacttctgtgcccaggacgtgccctcggcccagcagtgggtggaccggatccagagctgctgtcggacgcctgagcctcccagccctgcccggctgctctgctctcgttaccgaccactaggggtggcagggccgccccggccatgtttacagccccggccctcgacagtactgagccccgagcccccagcacttgtgtgtacagcccccgtccccgccccgccccgcccggccggccctaacttattttggcgtcacagctgagcaccgtgccgggaggtggccaaggtacagcccgcaatgggcctgtaaatagtccggccccgtcagcgtgtgctggtccacgggctcaggcgagtttctagaaagagtctatataaagagagaactaacgccaaaaaaaaaa

SEQ ID NO: 2127 - protein, 1697 aa, Homo sapiens
IRHEVFLSRSYQRLADACRGLLALLFPLRYSFTYVPILPAQLLEVLSTPTPFIIGVNAAFQAETQELLDVIVADLDGGTVTIPECVHIPPLPEPLQSQTHSVLSMVLDPELELADLAFPPPTTSTSSLKMQDKELRAVFLRLFAQLLQGYRWCLHVVRIHPEPVIRFHKAAFLGQRGLVEDDFLMKVLEGMAFAGFVSERGVPYRPTDLFDELVAHEVARMRADENHPQRVLRHVQELAEQLYKNENPYPAVAMHKVQRPGESSHLRRVPRPFPRLDEGTVQWIVDQAAAKMQGAPPAVKAERRTTVPSGPPMTAILERCSGLHVNSARRLEVVRNCISYVFEGKMLEAKKLLPAVLRALKGRVARRCLAQELHLHVQQNRAVLDHQQFDFVVRMMNCCLQDCTSLDEHGIAAALLPLVTAFCRKLSPGVTQFAYSCVQEHVVWSTPQFWEAMFYGDVQTHIRALYLEPTEDLAPAQEVGEAPSQEDERSALDVASEQRRLWPTLSREKQQELVQKEESTVFSQAIHYANRMSYLLLPLDSSKSRLLRERAGLGDLESASNSLVTNSMAGSVAESYDTESGFEDAETCDVAGAVVRFINRFVDKVCTESGVTSDHLKGLHVMVPDIVQMHIETLEAVQRESRRLPPIQKPKLLRPRLLPGEECVLDGLRVYLLPDGREEGAGGSAGGPALLPAEGAVFLTTYRVIFTGMPTDPLVGEQVVVRSFPVAALTKEKRISVQTPVDQLLQDGLQLRSCTFQLLKMAFDEEVGSDSAELFRKQLHKLRYPPDIRATFAFTLGSAHTPGRPPRVTKDKGPSLRTLSRNLVKNAKKTIGRQHVTRKKYNPPSWEHRGQPPPEDQEDEISVSEELEPSTLTPSSALKPSDRMTMSSLVERACCRDYQRLGLGTLSSSLSRAKSEPFRISPVNRMYAICRSYPGLLIVRQSVQDNALQRVSRCYRQNRFPVVCWRSGRSKAVLLRSGGLHGKGVVGLFKAQNAPSPGQSQADSSSLEQEKYLQAVVSSMPRYADASGRNTLSGFSSAHMGSHGKWGSVRTSGRSSGLGTDVGSRLAGRDALAPPQANGGPPDPGFLRPQRAALYILGDKAQLKGVRSDPLQQWELVPIEVFEARQVKASFKKLLKACVPGCPAAEPSPASFLRSLEDSEWLIQIHKLLQVSVLVVELLDSGSSVLVGLEDGWDITTQVVSLVQLLSDPFYRTLEGFRLLVEKEWLSFGHRFSHRGAHTLAGQSSGFTPVFLQFLDCVHQVHLQFPMEFEFSQFYLKFLGYHHVSRRFRTFLLDSDYERIELGLLYEEKGERRGQVPCRSVWEYVDRLSKRTPVFHNYMYAPEDAEVLRPYSNVSNLKVWDFYTEETLAEALPMTGNWPRGPLNPQRKNGLMEASPEQRRVVWPCYDSCPRAQPDAISRLLEELQRLETELGQPAERWKDTWDRVKAAQRLEGRPDGRGTPSSLLVSTAPHHRRSLGVYLQEGPVGSTLSLSLDSDQSSGSTTSGSRQAARRSTSTLYSQFQTAESENRSYEGTLYKKGAFMKPWKARWFVLDKTKHQLRYYDHRVDTECKGVIDLAEVEAVAPGTPTMGAPKTVDEKAFFDVKTTRRVYNFCAQDVPSAQQWVDRIQSCCRTPEPPSPARLLCSRYRPLGVAGPPRPCLQPRPSTVLSPEPPALVCTAPVPAPPRPAGPNLFWRHS

SEQ ID NO: 2128 - DNA, 128361 bp, Homo sapiens
gatctgaaagcaaggtgccagctgggcctggtgactcaagcctgtaatcctagcactttgggaggctgaggcaggagcattgcttgaggacagaagttcgagaccaacctgggcaacatagcaagcccccatctctacaaaaaaaaattaaaaataaaagcaaggtgcagaagtaaccaaaaccccttgtcaccccatccacctcgtggcagtcctgagacaaggatctaagaaaggaaagtaagtttacatgaaaggataatttggagaatgtccactatttacatgggccctgggtcagtcaacaaagtagaggagagactgctggtccctctgccctcttagccttgttctgtggtttctatcccttcattcctggcagggagcacagaggaatcagagcctcttggggtgctcaaggcggggcaaagacctagggccgggtcttgctgcttgccaaggcccagtggcaattcagggtgacttcctgtcttggcacaggcaggaaaggtgacaccacaaggagttcgactgccacaaggagtcgaacagccctggctgctgttctcccagaggatgcaggggctgcactgctcctaggactgcatagccacccaagtgctccaaatatcgagcatcgtgagcagcaagggaagggccgggctgggtggggacagctgctggagccatggttggtccgccaggcaggggaacagccttccagcagggtcttggtgacactcttattgatcagatccagagccagaccttctgttaggggctagctcaaggccagaaacctgtagctcaggagagcttggctttagatttctagaaataatgggaacagttgccaagtcactaacacagccccaggaaagagcatctccttaaatgttgtgccctggcaccttgctttcctcactctagtctcagctttggctgaaggggtcagaggcaaggttaagggctctctgttgaggggctggtggatctagtcaaagagaggccacttcggtggagtagtgctgagatctgtcagcctgggaagtttggcaggaggccataggcactctgggggctcatactgggctgaaatcctcatgattgggctggagtatgagccccaggagtccaggatcatggagaagatggctttgcttgggatggaggaattgagcagcttcttggacacctcctcaatggatgtctaaaagggttcttcctcctgctgggagaagccaagcttggaggtgggctccaaaaccttgtctggaggtgctgaggccctgagaattgcaggttgggctctttcaggccaggagaaaacaagatctgtttctaccagacctgaatttcctccgtctctccctctgctaaccatcagtatttcaaagactcctgggttggggatgtaaacccagtataggaggtctttgtccttgaaatgagaggctgggacaagtccctctaggactggactgactcctcttggagatctgggatgggaagatgcatctttgcaaggtgggcactccaatttgatggcctctaggagaggcactgcctcccctggctggattcctctaagagaggtttctgcttttgtccagtcccgaagcaggaaaaggggtttctccttcctcagctaggatcacctgggggcttgtgaactctctggcagggatgactgaatctgagctcattagtttatgggtgtagcccccagggaaagttggatcttcactgagggctgcaacaccaaggcctgttcacagggaattaagtgggccaaggtgtgagtgggcatcagggagtccaggttggatgcacagattcctgacaagttctgcagtgggtcatccctgctatttaaatacctggggcaccccccaagtagccactggcattgaagcagatggcccagaagaagaccttgccattggtggatatttcgctaaaaacatattagggaggaggcttggcagatggaatacttccagcctgatgtagaatgagcttcaattaggggaaatgtttctccatccttgtatagatgtcttccagtcacgtgttcccatccatgttgaaggcaaattgaatcatatccagttaggctggggcacctcattattagcgggctctgatcccagggtggttctctgtctccattgcttgctgctgctgctggagcccaacccatcagaactcatctttccaagtcaagagtgaagcacagctgccttgtgtctgcctggaatgggctccagtggtttggaggatgagttctggagagcgagtttggagaataaacttctaggaccgcctgttgctactgtcttttcctttagtggtcaagaacgagacattgttcagactattgccatctttggggacagccattatctgggtgttgggtgggggtgggggtgattaataaccttgattccagttggaaactttcaagggtcagcactgctgcctctcaggagccctgcacccgaccaggatcaggtcaaagccctgagaacagtctgaggtcaaagccctgagaacagtaaggggaggggagcaaccaacattagtgtaaaccccagaatctgagcctgagaacagaagctctgatgtccgagagcaaacgatgacgtcccaactctagaacagagagcaaattcacttttcctctgcctttttgttctagcagggccctcaatggatcggatggcacccactcactttggtgagggcagattttctttcagttgactgattgaaatgccagtctctctcagtaacaccctcacacacacccagaagtggtcttttaccaactatctggacatcccttggcccagtgaagttgacacataaaattacccatcacagaagctcaactcaactagccaagacaaaaggagaaataggccgggcatggtagctcgcacctgtaatcccagcactttgggaggccgaggcaggtggatcacttcaggtcaggagttcaagaccagcctggccaacatggtgaaattccatctctactgaaaatacaaaaaatagccgggtgtggtggtgctgtagtggtggtgcacctgtagtcccagctacttgggaggctgaggcacgagaatcatttgaacccaggaggcagaggttgcagtgagccaagatcatgtaactgcgctccagcctgggtaacagagaaagaccttgtctcaaaaaaaaaaaaaaaaaaaaaaaaagaaagaaaagaaatatactggctcaatgaagtcatgggaatgattgcttcaagaagcaggcagaattacagggataagagatttattgggaagtatagctcccatcagaggtgaaaaagggagaaagcagtctcaggcatgatgagcatccgacccctctgcaaagagagctgggggcggggggaacaggattgtgcagctggagcctcagaccctgatgcacaaagtctcagacaccctgacagagagctctggcccagagagcttattcaccggcttattagacgacttccactttgggtagaaatagcccggcatggtcactggctggggacttcctgggaggagcatggccttggctcacaagctggggtggaccctgggtacactgacagcagccagctgtcagctcaccatcctcttcacagaggagcagcattgggtttggaagggaaatccaagggtgcatctccatggttgccacagaaacaagggatacggtttggcctaaggaatgccaagaatctgaggctcatctgatacaaagaccttcttcgcacctcattcctactttactctgcggtcagctccattctccctcactgaaaaccaatctcattcacatgataagaaatatggcctatggaagcttccatgtgttacttcctacagcttttgttacccaggagggtctgactcacacggtcactggtccaaagttcaaaatcctggggaaggccaactggcccagcttgggctgggttccctctcctggaccaatcacctggtgccagggccaggaccatgcagaaatacagcagctccatctcaccaagcagctccatctcactgttttttagaaaaacagcagcactgactacatacaattagatatctgttccaaatggtctacacatcttgtctccatttcctcactccaattcacccttcagacatttgcagtcgaacttttgccaccatcattctactgaagcagctttctaagtgaccgcccatgagtttatagttaataaatctgatggtcctcttgaactgtcaatataacagttgctgacataggactggctctagctattgtgcccactgcagtagatacttgggcctgactgtccagcctgggggccagcatttccctgggaactcccatttcttccataaacgggtaggacatgacatccataggacaacgatcatagctgaacaaccctgggatcaacttgaccttagcttagctagattctttcttccaggagtctggaattgagaaagttagtcaattgtttgaatgactacaccagtaactggtcaatgtggaagctatggagaggccacctttgctgtgctctatgagtgaagaagcaggaaagctggtccacagagaaggaaggaaggaatgcacagagaagcaggggagaaaatagcgcatctggtgagtaaccctggaagaaagcagttgtgtggggtacacagcagagcagaagctgaagcgtggtcatttagagggtgcattgccctcattagggagtccctaatgaggagccccatacagggagcaagtgacctagaagaactcagcaaaggacctcatgagagacaaagtcactattccagcagcatcctgccacacagaggacacctgggttgggtgacaacaacactggtcagatgggaggcattctccttcccctccttcctgtcatccccctgggggagccaactggggcccagggtgtgaggaagagcagtgaaagaacaagatggagatcactgagacctgggccccttttcccatcacagcagtccccagtgagattggagagatgcttcagagtggatgagatatagaagttgtgggttagatggtgctagactttttagtaactgaaaatgagactattctaacttccaagatatattaggatccaccaaacatatggtccaggagtgggtgtgaccagaacttctcctgcccctgtacactcactaccgtgccatgggtcttggctgctgttcccaccaaagacggttttcccacctcttaaaccttggggggctttgtaacttgatttgatcaagagaatatggctgaagtgacactgtgtgagtgctgcagccatggcttcaggaagcccttacagattctgcaccagcccccttggaatacagagctggcatgtcggaggcccgggtcagcctcctggaggaggagagagaggcctagccaatagctagcaccaaccactggatatgagaataggaccattttggaccacccagatccagttgggccacaagagccacaaggtaactgtacctgcaaggaggaacccaggtgagaccagccaaaaaccactctgctgaacccagtccaaactgctaacccacagaactgtaagcaaataaaaggttgttttaagtggctcaatttcggagtgatttgttacacacaataaaaaagtgatatagcgaagaaggcagatacaacagaatgggtttgaatgcgacgatgaaagaagaaaataaagttgtttcttgccacttcccaagtccagctcatttaatttacaagcaatatttgcaaaaggcagatccgggcagcgatgtgagatttttcccctgggtattctcaagtgcctaaatacctacttggtttaaaatagataattctcagctgggcacagtggctcaggcctgtaatctgagcactttgggaggccaaggcagacagatcacttgaggtcaagaggttgagaccagcctgaccaacatggtaaaatcctgtctctactaaaaatacagaaaaaaaaaattagccaagcgtggtggcaggtgcctgtaatcccagctacccaggaggctgaggcaggagaatcacttgaatccaagaggcagaggctgcagtgagccaagatcgtgccactgtgctccagcttgggcgacagagtgagactctgtctcaaaaaaaaaaaaaacaaaacaacatagataattcttatctctggactctccccttgtcccactctgcaatgtttcccttcggacatctcctcacagagctgtggaaagctcagaaggcccctctctgaagcctgactgctggtcaccagcattggccctcagaaggctgctgccaatcagggctgaggagaagccgtgaccttcactgggaatagaagtgggggcgaggggtgagcaagctctgctttctttcctgaaacagcaaaatgagacaagtgtgtgcacgctgtgctgctgcagctgcgaaatgaaaagcttctcattagcatcctttgcacaggggtaggggtgggggataactcagggacagctctcagagtgcagagctggggcttctgttcccaacccaggcccccggcaggccccctaggtgtgtcatctgcctccagcccagctaggcaagtgtgcttccatctgggttggggagagggatgggtggaagtctcctgtggggtaattgtgagtcctgatctggtcccagaatgtgagcccaccttagttgtgggaccctgggacctccaccctccccagcccgctgagcagggaggggcatgcagagctgggtggaggggaagcaggttcctctggccacacaggctcttcctgtgccaggggcagcccaggcacaagatgacaaggagaaccggaaactagccagcagggcctgccctgcaaaatcatggatttcctctttccctccctcccacccttcaggccccagcagaacctctctcctccaggcctccgttctgtcatgcaggatgagagcagaggttcttaaaccagctctgcggaccatgtgggcccacagaggggcttaaagagggtgtccacataccctctaaaattacgtgcaaatcattgtttctatgcacattactctgaagggagctttaaacaactaaatgcttggtggtttgctaaaggttaggaaccgacagcctagaaaattctcaggcctctccaacactgacattcctgctttcccctttctgtctgctttcctgagtgtggttctcagctctcttcttagttcaggtagctctcttctcatctaatacatatactttgcagtaacggccaacgaaggtggtatattacagtgaggctttaaatgggacatgcagagtatgtgaaacataccagatatctaactcacataattgcatttgagcagtaagtttagctttaaccatctcagcagccacatgaaaaaatagatcgctgaatttattaactttgggatttgtgtttgctgtcaccctgtcttagttcacagctataactctgcaggggtggattttaggcactcagattatccggtaggggagggattttgagatgggtaggccttgtaaaggctcctcttccacctgtacaattcaacatacgtgttgtgagtgttcaaatgtgccaggtcctggaaataccaagacaaaaaaacacgacttccgccctcgagatgttcccagtgggcctggagagatgaggctcctacaagggtgtaacctttctaaaccccggtttccttacctgagaagtgaggacagcaaccccgtaccaaagggggcttaggggaattaagtaggagcctcagtcacaggaggcactcacacattttaggcacacgcggacacacccaacaactgcaggcgacatctggtaaggtgggaagcagaggaaccatgacagcttaaaggaggagattgttgtgtgctgggatcattggggaaggacacccccaggaggtggcccccatctgtgctcgaaaaataggtaggatttaaaagggaagtcagggcagtaggcactttgtgatggggaagcccagggaggccggggcaggaggcaggaaggaccacacggcccggagacaggaacaagaccgcttggtgtaagggagggtgtgtacccaggaggtttggaaaataagtttcaaaagtttgttggggccaactgtagagagccttgagttagaacagacatgtattgcacactggctaggtgggcactctgctctgtgccagggaagcttgccacccccagagggacacacagaataatgtggcacaatgtgtcaaccgctaaggcctctggatattcagatgagcagaagtttctaagctggggcgtaataagttataaggaagatcagcctgacagttggaggatagatggggaagcaggagttggggagaagtcagagggggacctgataggagaaggttgcccactggcctgggcttggggggacagtactgggagggtcaggggcagcaggggcagcagggcaggcatctgcaaaggatgagcgtgctatgacgcgagctccatcattctggagaaagaggatcctgaggccttaggagttctcctggaagccccacagtgaaatctcaagagagaaaatcccagcgaggacagggacactgggcccacgggaatcctgtcttgctgggccggaggggagccctgggtctggctcctgtagagcctgaaatagaatccgatttgcgatgcccctaatgatgttatgtaatgacattgcataagcccgttacgtaaatcaaagtcctgctattgaccaagaatgtcccctgccccaaggctgacctaatcccacgcctgaaggctcagtcctttgtggcagttggataaatctgtttcctaaagcctctgtgaaaccctcccgaccttaaagtctctgtctttagggttcctggggcctccttctccgttgctgcttctccactgtgggaggcctcagtgtgacactcactcatccttccccaggtgagggttcccagggaaggacaggattccagtccttccaccagcgtggaattgtggccgtgcgccctcttctgggggtcttgcatactccctctgactgtgaaatacaagacttgtctctggttaaaagacatttcaaggatcagtaagtgagtgaagaagttttcttccctgtggggcatgggtggcctccccaggaccctggagttaacaactacgagcaggttcttgagtcccaggagcagaaagaatctttcactactggaaaccagcatgtcccgtgaacgcactcaccaacctgtctgccttcagtcggcccatctgtctccctgaacatactagcagaagccctcccaccctcaacccacctcgccaacccccaccccggctccccttcaagccctctccccagcataggcaacatcttcctcgggaggctgtctccttccttcatctatgtctctctacaagtaaatcctggtgtgcacaccaccacccccgacacataaacacagtttacagaaacaccaaacaaaacagtcatgtttgatggaaaaaggctgagttcccagttgctcttagtgtctcctaaaagtcaactgtttactgtcctatcaaagctattttactgttataggactaggaaaaatttaaatttaaaaatcacacgaagaataaagtaacacaaagcaaaactgtttatgttttatctttttttttttttttttcagacaagttcttgctctgtcacccgggctggagtgcagtgatacaatcttggtttactgtaacctcaaactcctgggctcaaggcatcctcctacctcagcctcttgagtcactaggactacaggcctgctaccatgcctgggtaattaaatttttttttttttttagaaatggagtctccctatgttgcccaggctggtcttgaactcttggcctcaagtgattctcccacctcggcctcccaaagtgctgggattacaggtgtcagccacagtgcccagcctcttttggcttttttgaatgatatgacacatctccaaaacatagcacagggtggatccaagagctcctggggtaagagctgcctggacccacaggtccactctcatgggctctgattagagctgcactgccccattccctcccaataccaggagccctcatttcagcctcagctcccccaactttgacacagtattttactcaaggtctctgttatgaattgaattgcgccccccaagaagtccaaaaagttgtgttgaagtcctagccctggccccaacctatgaatatagcctcttgaaaataggatctttgcggataaaatcaggatgaggtcattagggtgggccgttctccaatatgactgttgtccttataggaagaggagggacacagacatgcccagagtggaggagacccaggaagaaggtgatgggaggatggaggtagagattgaagtgctgtgtctataagtcaagaaatggccaggagaaaggcctggaacagagtcttcccttgagccttcagagggagtgtaacacctgatttcacactcatagcctccagaccgtgaaggaatagatttctgctgttttgaagctatgcagtgtgtagcactttgtaaaggaggcctcaggaagcgaacacagcagcttcggtgaacgcagtgccacatggcacagctccccccttgcctgtgtgcagggggcagcaatgtcagcaggacaattttcaggcaattcacagagactgtggcttggagttgggcccaggctggccagtgtcttgggagtctgtgaggcctcgaccctcttcccaggttgctatctgcctgccccataaacacatcctgagactttgctaccttcctttcccccttccttcctggtgttctctcagagctgtacctgtctgcactgcctggtctccttggtacatcacctgcttggacatcagccaccctttctcagtgcctcgattcaggatgccataatatatgttttctatgaaaatgaagcttcattctgcctgccgattcctacctattttaaatcacagctgacatccacgcctcaacaaagattcccatagctgtagctccatgattcatgatcgcgtctagaaagggaacattttgcaacagatagccaggcccaacttccatggcttcatgcttcttcccaggtctctgccacccagcactgtcctctcccaggagacagatgcatgctaatgccacgtgtgtgtgtaacaggtttcccggctggctggaagcctggtccccagttgcttacagtcttggcaagttaattcacctcctcagagatgccctcctgatctccaggtgtgagtccctgctccttgctccttgttccatgatcctttgcacatacttctcttaccaacccactaggtccaaccgcgagtctgtgagtgccctgaagaccttgaatgtgtgtcctgaagacccctctctgcaaggggacagtggagcttggtgtttaaaagtacaggtcctaggaaaatgcaaaccaaaatcactctgagatgtcgcctcaaagccatgaggatggccagtatcaaaaaccagaaaataacaattgttggcaaggatgtggcgtcattggaagcctcatgcatggctggtgagaatgtgaaatggtgcagatgctgtggaagacagtatgtcagctcctcaagaaattaaaaatagaatgaccatatgatccagcaattccatatctgggtatatacccaaaagagctgaaaacaggcactcaaacagacatatgtacactcctgttcacagcagcatgattcacaataccataaggtggaggcaaccaagtgttcattggtggatgattggataaacaatgtagtgtagacatgcaatggaatattcagccttaagaaggaaggaaattctaagacctgctacagcatggatgaaccttgagaacatcatgctaagtgaaataagccagtcacaaaagacaaacactatgttattccacttataggaggtccctagagtagtcagattcatagagatagaaagtagaatgatggttgccagggatttggagaggggagaatagggtttaataggcacagagtttcagctttgcaaggtgtattagtcaggattctctagagaaagacaaccttggggtgtgtgtatatacatgtagaaagagatttgttttaaggaatgggctcatgtgattacaggggctggcaagtccaaaatctatagggtggctttggctggctggagacctagggaagagccgatgcttctgctggctgaattccctcttccttgggggaggtcagtcttctgttctgttcaactgattgggtaaggcctacccacattatggaggataatctgtttactccaagtccaccaatttaaatgttaatatcatccataaaccctcatataaacatataaagataatgtttggtcacatatctgggcaccatggtctagccaagttgacacagaaaattaaccatgacacaagttgaaaagagttctggagatggatggtggtgatggtcacataacgtgaatgttctttatgccactaaactgcaaacttaaaaatggtaaagatgttacattttatgttctgtgtattttgccacaatttaaaataatgtaattttttaaaaagcacaagctctagagtcagaccaccaggttgctttcttgcgtcacgtatggcctcatgtctgtgcacaggtcatggagactgtctgagtttccttcacctcatcagaataaccagactggggcgggcacagtggctcacgcctgtaatccaagcactttgggaggcaggcggatccgcttgaggccaggagttcaagaccagcctggccaacatggtgaaaccccgtctctactaaaatacagaaaaattagctggacatggtggcacgtgcctatagtcccagctactccggaggctgaggcacaacaattccttgagtgcgggaggcagaggtttcagtgagccgagatcgtgccactgcactccagcctgtgcaacagagcaagacttgtctcaaaaaaaaaaaaaaaaaaaaaaaaaaaaagaataattggaccagggacaacgatgccccataatagggaggtggtcagaataaacaaagcaacacttgtaaacccttaatttgtatagtatctagcagaaagtaggtgttgataaattttggtttattattattatttgaggcagagtctcactctgttgcccaggctggagtgcagtggcgcaatcttggctcactgcaacctttgcttcccaggttcaagcgattttcatacctcagccacctgagtagctgggattacaggcacgtgtcaccacgctcagctaatttttttgtatttttagtagagacagagtttcgccatgttggccaggctggtctcaaactcctgacctcaactgatccgcccgtctcagcctcccaaagtgctgggattacagcgtgagccaccgcgcccggcctagtttattagtatcattattcccggggtccaacaatgccagacacacggcaggtactcagtgcatggtttttgttttgttttgtttgttttgttttgtttttgaggccaagtctcgctcttgtcacccaggctggagtgcaatggcgtgatctcggctctctgcaacctttatctcccaggttcaagcgattctcctgcctcagcctcccgagtagctgggattacaggcgcctgccaccatgcctcgctaatttgtgtatttttagtagagatggggtttcatcatgttggccaggctagtctcgaactcctgacctcaggtgatctgcccgccttggcctcccaaagtgctgggattacgggcgtgagccaccgcgcccagccccagtgcatgtttgttgaatatgtgactgaataaatgaccttgttcaaatgacttaattgctctgtgcctcagtttcctcatctaaaaaaacttggggataataatgattaccatgaagattgactgtggaaatatatatgacatgtgtatatatatatgtgtgtgtgtgtgtgtgtgtgtgtgcgtgaagaactcaggttggagagcctgatacagcaagtattagacaaatattggctaccattattattagtggtaataatggcaaacacttttcctattgcctacccctttctttggagcactgactggcggagatgtcatgcagctgtggctctgtgaagggctatggaagaaggaagagttctattcatccagtgcctcaatggcacaggaactagagtaggggacaccgcagaggtggattttccctgcactgacattaaggaagatgaccccttctcacctctaacttagtattgcaaatagctgacttcctgcagccagcatagttgagcacttacttgcacttttgtcttgcgttgtcttgcattgatcttttgttcctccgcctcctctttgttccagtcctagctccagtcaaaactcaaccaggatcctcctccctcagaaaccccctgactgctccagcccatgccctctcctgaagaataggataccatacctgggttgagttttaggcgtgccgtgaaactccagccttctctcccagctaagggttaggtttgtgggtcaggaaccacgcatgatatttatatttacttctctggagtctcccaaagcacccagcgcccagggccatgagtgatccttaattaaacttgccttacatctgaactatcaactccatgagggcgagagctgtcattctattcctaccatgtctgcacaaggctgggtagattttaaagctcagccaatgtttatggaggattaaaatgctggactcgccctggatgcctgaggcagtcaagcctggggaacataaccagagcactctactagcagctcttggtgtccgaccctgcagatggagaaggagaagatacaggaggccaggctgcgcaaaagattcttgtgtcttaccagtcctgtgataggcaagattcactaaagcccgaatgaagtatatatgtctttagtctcctcccttcactatgctctgactctaccctgccaaacccagtcttgatgattaatttcatttccccagcatggacaagaggaacagtccaggcacctgagaatcttccaatataaagcaatacactggccatgtggcactctggctgtttactgaccatttcccctgctcctcaaattgaaaaggcagcagcaacttgggaactaagcgcttggatgcactcggtacttgttaattggtgctcatgctctaaggagctgagtcttggggttaggcttgaaatcctaagcagatgagaaaccctgccctctttaaccactgctctgctctcctcttgggtgcctaacctcgcctgtgggagggcagccctgttctttgtctttctccacctccttccagcaagatcgtcatcagaatggctgtggactgggttccatttaagattccccaggttggccaggcgcggtggctcatgcctataatcccagcattttgggaggccaaggcgggtggatcatgaggtcaggagttcaaggccagcctgaccaacatggtgaaaccttgtctctactaaaaatacaaaaattagctgggcatggtggtgcgtgcctgcaatcccagctattcgggaggctgcggcaggagaattgcttgaacccgggaggcagaagtggcagtgagctgagatcgcgccactctagtttgggtgacagagtgagattccgtctccaaaaaaaaaaacaaaaaaccaaaaaaaaaaaacaaattcttcaggtctcaggtatctatcagttggaggttctaagaatgggatagattagcagtggagggaggagataggaacccactgaaaggactgagaggaagatgaagggttaactggacacaagtgtgtaaagattatctgagtcaacggctgccgaaaattctggtatgagatagcaatgagatagtttgagctcaaaagctcaaacttttgagatggggtggaggtagggtacagagaactgagggctctgataaaggctaagccatgggcccaactgaggcatcgctaggttgatgcctggtggggttaaggcctccatggtgtttcttctattaaccatcacaatccagggaacttggatattgtcattcttgtgacaaatgaatatgtcccatctccctcacaaacaagaattcgggtctgtgacatggaacagagctctccaacgtgttgggagttccagggatatggaggtcattctctcagctatcaggaccaccaggtgtggggctggggcggccccagccatcaccacaggcctccagtggactccccagtgaccctaatattatccttacctaaatgtgccaacccattaaaaagattgggaagagtttctgtttgggatgatgaaaaagtcctggatatagacagtggtgatggtgacgcaccattgtgagagtgcttaagccactgaattgtacatgtaaacatggttaaaagggtaaatttcatgttatttatgttttaccacaatcaaaaattttttaaagattgggaagcacaggctccatggagattagagaaggaggaggggctgctgactaggggtagataagagttgggaggacagagaatcgagggagaaatatgctgcaagaaggggaggttggggccttctctctccttctccccgggcgatccacaaatcctgtctatgcagctccatgttcagccccaccccctctccacagctttctctgtcccctcaggtctttagagcccacagaatgccacctagcacttagattctctgcttcatggacatcgatgtctcatctccagtcagactgcaggttccttacagacaggtggcatatgctagacatctctgtgctactcacagggactggcacattctgggcacatactggggacattctgggcacatactgggtactcaatacccgttatacagtaagtctctttttttgaacaggattggggagaagtaaataaattttagctaactaataaaacctttctcttttagatatagaactaggaaatgagtgctttacttctctgagcattttcacacaccaggatgtggttctaaagtcaacaatttggtgccttatcaaggtagttgtacctggggtggctcagacctggggtgacataggggtggtgatggtaggtattgattttagtgaggccaccactttctgagtctagaactcttccttgggaagagccttcagaaacctcagtcttccatcacacggtgcatttgttgagcagacgtcttctgagttggctattgccagactggatgctaaacaaattttgactatttgcaaacaagctaaaaaataaggacaaagatatgcatgccttgtagagaatctttaaaataatgtgaaatcctgaaaacgtctggcacatggtaggcctcaccaaatatgctgtaagatctaaaagctgttcttacacgagaattccagaatgtttcaagaaaggaaaacattggtctaaccaacacaaacattgtttttatgtgtttgattttaaaagtctgtgaaatgactttttttttagctggaatcacaagctctgtgcctaagaggctgggtagggaaccttggagaagcccagttgggctttaagacgagggggagtgctgaggactccgatcccttagtccaaagaggacaacttccactcagctccagccaccagttgccaaaccttttgcttttttcacaacagaagatggaagtccagatttttatgtgacatttcaagatatttaaaataacctggagtcaccaactcattcttggccacgaaacttataaacacgcctgcattcatgcatcctctgacaggcctcccagccaacgcccctccctcacctgtgtccaggtctcattgtctcctaccttctctgggattttgcttttgtagttcaccattgtgatctgaattctgacccagctgctcctgatgctgctgtcaccgagactggatttgcttgcagcgacatccaaagggtttggaagcccttcgcctaggtgacctctctctagcctccagcggcctcctcctccctgaagcgcgtctttcctcggctcctctatcacctctacctggggctttcctgtccagtccttgcacctgcactctccaatcttgtttacaggcctctctcggtgccatcccctaatgttggtgtcccagaggcttctgtcccaggcccccaatttctcactccacactcagttctttgggaagatcatccgctcccccatagcttcagaagcacatgcggatagttctcagctgtatgtctgcagcctggccctctcctgagctctccacccacacagcctccttcctgctgggcacacactgctcacaactcaggagacccaggactactcccccagcacaaagctgcccccaacaccgagtctcccttctgggagtatgccactgtcatccagtcagtgtcaaacagaaatcgggctgagctcattgattccccgacccacactagtcaacaggtcctgtatcctctgcctattaagtgtctcttgaatccatcacttctctgtctcctctgacacaactatggtcccaggtcaccacaacctgtcaccaggacaactgatgcgcaggcctccaatttcgctcccgagttgtctagccaaacatctttccaaacttcaggaatgtgagcgtggccctgttcctgccccgcctaaccttgccatggttccccctcccttggacacggtctaaactgcttcacaggtgtgaaagaccccttcatctctcaggccactgctctggcctctcatccccgctcactgggaaatgaataatgctgcgctccaagtcccacgagaggcagaggggggtcaaacccaagactactcactgcaagctccataggctccccatcgtcctaccctccccgttcacggccaggcagccctagctctcatacctgcgtgggctggagaagggcaatacagagacttctggacccagcagccttaagaaaggacttgttgcaagtgcgatgtgaaagcaaccttcatctgcagtggatgtgccacctccttcctcacgccaccgagctccgaatcccccaggagagttgcggagaccacacagagctcccaagcccacgccaaaggacggcctgccccccttcagctctagtcggtgacacgtggcgtgagagaaatgcaccccaatcttccttccttatacttccgagctagaagcaggagccaggatggtggcttagtgaataaatatattacatttttatttgggagaaccaattaacagcagctggctaaatgtaactcacccaggacagaaggggaagtggaggggggtggtctgtgtgtggatggaggtgggacagtggctaaggagagtcaggtgttccctcccccaattcatttagcagccccagaactttccgattttaactttaatgaaactttaagtacataaataaccactctttcctgccctggttgaggccgcgctgggtccgggaaatatctgctttccaacggggcacctgggtgggagccttccaagaacttcagctcagcggttcccagcaagggttcgctgagtctctgtcctaggaggtccgagctgggtatgctgtgcggacgcagacactgcgggaaggaaacaggtgtcccgcggcggccaaaccttcgggcagcagcccaggtcgccttgctcaccccaggcggtctcatggcacgggcctctcgaaactgtgggcaagaaagggtcctcgtgagaactaggctcagaagaagagcgggggcggcgccacctcggggggagcggaccaggctggggccgcaagggcggcgtccggggccgcgtgggcggcttcgccgtgaatgagctggtgccgcaccaggtgggtcttgcggctgaagctctttccgcactgcgggcaggagaaggggcgggagcctgtgtggatcgcctggtggcggactaggttggttttggagctgaagctgcgggcgcagacggcgcaggcgtgggggcggctgccagtgtgcaccgcctggtggcggcccaggtgcgacttgcggctgaagcggcggccgcactgagcgcaggcgaaaggcctggcgccgctgtgggccctggagtgggcgaccagattaggccgcgagccgaagcggcggtcacactgcgtgcaggcgaagggccgttcgcccgtgtgcacgcgcgggtgccgcgccaggtgctgcccatgggagaagccgcgcccgcagtccgggcagaagaaggaccgctcgcccgagggggcgcgctggggcaccacgggatcggatcctgggccgcagcccggtccgccaggcgcgctggccaggggcttggcggcgggggcatccacggtggcgcccagtgcgcactcatcgcacccaaaggggcgaccctcgctgcggtgcagacactggtgcgtggcgaggttctttttccagccgaagctcaagccgcagtcggagcacgcgaaaggctttggcccgggaaaggatggggtcggggacggggcagtggaatgaggagaagcggacgagtcgggagagggcctggccgggccggccgtctggtgcaccctttggtgccgcaccaagtgctgcttgtgcgtgaagctgcgtgcgcactgtgcgcactggtagggcctctcgcccgtatggatgcgctggtgccgaatcaagtgcgtcttcttgcgaaagcgcttctcgcattccgtgcaggggaagggccgctcgccggtgtgggtcttttggtgcgagcccaggtggatcttctggctgaagcgcttgccgcactccgcgcacgggtagggccgctcgcccgtgtgcgtgcgcaggtggcgggtcagatgggccttcttgctgaagcgcttgtcgcactcggagcacgggaaaggccgctcgccgcggtggctgcgctgatgcagtagcatgtgggcgcgctgcgtgaagctgcggccgcagtccgggcaggcgcaggggccctcgccccggtgcagccgctggtgcagtcgcaacgtcagctggtcccggaagcgccgctcacactccccgcagccgtagggcttctccggcatcggaccccacccagacagcgcgagcccactcagtgcccccggggcccctggctccagtttgtacgcggcagccagatgccccaggtcaggcgcgggaaaggggctgggaagtaacgatagatgctggggccattcgacctcctcttctgcctcctgatcttcgtcctccaccttcaccttccgaatcatccactcctctcctggaaagtcaaaacaagaattgtctattgagctccacgtgcggcaacgtctatttaaccacaggatctccacttcctggagccccgcggtctggctctgctctccactctacctaacgcttcccgggagtgaccaaatccgcagctcttctcaggccccctcctgcattctcctgaacctgtgatgcgtgtgaacaccacacggctcccgggggcttcttccccggcctggatgtgcccaggagccctccagcacccctgaagaggaaggttgcccaagtttcagtcctcctgcttcgctccaggttcacatccctttggtggctggcccagatcttcctgctccagcagtgcctttctgggacctcagtctccatctctggtccagcagctctccttggtactgcaaactggccgcagctcagcagctttctcaccacacacctgagcttcccaaactgagccctggctgactttaaccttaggactagagcctccttccctggtggccttgaaaacttgatctttgacatctcacctgggctgcttctcttgctctctaacccctacccccagcccaccttacctctagtggccacggaaccagggtacccacgtattcctgctactcccttctttcctgctggacagcctgaggagaagtcccatttaggaagaccacgatggagtttacagggtctggggaactagtgaacactggctctggagaaacagggaaggccctctagggaagcctcagcctaagggcaggttgcaggggattccgctggagtgttgcccctgtcgggtgctgcaatggtccagcctagaggaaggagcccggggtccagacgggagggtccaacttaggttctcctctgtcactaactaggagtgtgactttggttcagtcacttaacctctttgagttacatttcttagtccgctaagaaaatttgccctttgtgtaagagttggactagtttaaagctcccacgcctgtgctgcatcatcagctcctgggaaacgttgagaaaatgcacaaatgggggcaaggcccacgaacgtgttctcatctttaaagctcccaaagtgattctcatttgtgaatcatttaagcagataatttgggttcctgtctggcctgagccttgattccatcacacgtggacttccacaatcagaggtactcccagtttcttctatcagtccattgattccagacccctgtctacttatcacactgtgatactgctttcaccttcattgtggcactctttacttttctactcaagaaccatcaatagctcctatttatttatttttaattgagtcagggtcttgctctgtctcccaggctggagtgcaatgggacgataatgactcattgcagcctcaaacacctgggcccaagtgatcctcttacctcagcctcccaagcagctgtgactatgggtgtgcaccaacatgcccagctaatatttcttactttttcagagatggggtctcgctgtgttgcccaggctggtcttgaaatcctggcctcaagcagttctcccaccccagcttcctgagtcgctgggattacaggcatgagccacagtgcccagcccagcaccctattatttgaagataaaacaggttctagctgcatctgaggctcaccccaccctagtccaactttctttctcccaggcatggaccttccacttcagccaagctgctctcctcccctttcctgcttcaagatcttctcagcctagaacgtcttcccatcctccaccccacccctttcagaactgaagtctacacctttcttaaaatgcagcacaaattaatgttttttgacaaattcccagtgcatgcggatcttttggcataaactcctatagcacttactgttaacacttttgtgcttatttgtgacttgcctttatactgttcttttaattctttgttctagctcatattaaggtcatctcaaccagattttctcttctgaggtatggacattttgtgttccatttcttttgtgtctaataagaaaggtgtctttatgtgtctgataaaaatggggactgctgccacttctcgaggaccaactgtagatgaagtgttgtacacacactgtcacaaaccttcacaaaccgaagctcctggaggcaaggtggcctatccaagggcactcagctagtaaatgcagaacaaagattcaaaccaggtccaggtaactctacagttcatctctttccactgtacttaacacagcctgtatgtagtcggcactcaataaatccttgctgaataaatgatatccctcaggcaaaaggtagtaaggatggtggcagtggaaggaagtcatggtgggattgttgagagagagtgagcagtttgatcaccctgggtatgaggagatgagttgaatacagcagatgtggagcatctgggtaccctcacgatcagtggaagctggggaaggcggcatgtcaggggagaggcagtgaaaatgttgatcaaagccatgtatcttcatggcaactgtaattagacttagactgggagaaataaagagggggaggtaggatttctagaaggcatttgaggggaggctgtgtttctctttggtgaccagcctctctgactcctgccatctacagatgtgaaattccctttcggcattgaagctccacagcagaaaggtgccagggcctgaactcaacttgggttagaagggcctggactgcctgtcttgggggattacctgcctcatgagatagcagctccggagcttgctgggccccgttcccttggcctgagcccgtggtgggatgaagtgatgggaagactcacctgggcaggtacccacaggctgagccttctgtgctgagcacgcctggcctctgcagggagcctcggcttgttctgtgtgggcaccttcctccggtgtaggggcctcgtgccctggcagagaataggatacctcaaggactctggagacatcacagatggccaaagggccccactggtgctgggaagcaggagcatttgaaaccctggctccagcagggcccacagggttcctcccacatcctacctgaattaaggggctgagttcccagcttccctggggctgcctcagactccttcaagcagggcggctgctaagggtatgtaatgagatggactacaaggttacaagagccaccactgtgaagagttcctggaatatgtgtatgtaagacagtggaagcaaggaagtcccctgacctgatgcccctaggagaagggctggggacttcccagcccccagatggaccctggttccaagcaaatcactggggagaatcaggatgtcaaaagccaggcacattcctgccttagtgctctgtcctggctgtactcctgcctgaagcacttttcccaaatctgctgagctgccgccttcacctcttttatttttctttttttagagaaaggtcctctctgtcacccaggctggagtgcagtggcacgatcatacctcactgcagcctgggcttcaagggatcctcctgccccagcctcccaagtagctgggaacacaggcatgagccaccacatccagctaacttttaattttttgtggagacagggtcttgccatgttgcctaggctggtctcgaatggggctcaagcaatccttccaccttggcctcccaaagggctgagaatacaggcataagccaccatgcccggcttccccaagctccttcaaatcctgcacaaatcttaccttcccaaagaaacccagtctcctcaccctatttaatcctataacatgccccacccacccccacctgcagctgtctcggcccccttcaacctgcttcactggacattatcctctcccccagagctcttatcacctttgaacatagtttagaaatttccttatttattgtttgctgactctctgcactcattaggattaagctcttgaaggtagggatctttgactatttggtcactgaggtattccaaatgtttagaatagcatcccacacataataggtgctcaataaatatttgatgaatggaaggaaggaaggaaagaaggaagggagggagggaggggggagggaagaagggagagaggtagggagggcaggaggaaagcagggggactcctccctgagcctttccagggttcctgttacctacctgagcacacccccagtgctctctcttccctagaagaggacatctgctcctgggcattatgggatccttccctgggctcactttggggggccatctctggctgtcccacagagaatcctgttacaggcagaaggatgggtccaagtaaagcatccagtacagaacaagtaatcagaggcgggggctgttccccttcccagcctgcccaagagacttttcccaacctgctcaggaaggacagggtctctcaccacatggacagggacaggtatcaacctcagtccctttgagttgagtcaaaaaggacagaaggaagagatggcatagatgtaaatatgactgtgctctgtgagtgctcaagtgcacatatggtctagagcgcagcctccaccatgttccaggcattcagacaccccgtgctacagaaaaggaggctgacctacaggcccctggggcctcagggttgcagcctcctgagggtggctctgctgtctgagttgtagatgcccctgaatcctcctaagcttttccccaagtcccttcatttctgccagctcacccagggagctgagggcctccaaggtctctctcatggtaacccagagtagctcctcctggggatcaggccacagaacctatggagaaaagacagccttgttcagatttttcccacgccagcttccacctgggccctggctctgcccaacctctccctatgggctcttccaggagctccaaaggtgacatccccaggtacagctgggggaaatttgggaaactgggtttagaaagccaagccaagagatctttgaaggtggcccaagaaggccttgaaacgatttctgtcagctctggaaaccagccgcgccaccccctcacctggcaggtctgtcaccgccaaccccggcccatcagcaccgcaactccacgccccagcgtccttgcctgggaaagtgcaggcaagattcgattctctggggagaggcttgagggtgggagcccagggtggggagtgggaaacttcatctcccaggtcctccagctgtcactgcccgagctggtgaaataggagccagcccaggggcgggagtgagtgtcactttaggggtactgcttggggaggtcctcgagaggatcctcttgtagctagaaaatgatcgcctcttcctaaacccctaccacaaaaccacctctcacccgtgccgggctgcccaaggcccggacaccgcccctgctgccccttccctgctccgccttccgcggctcccccgcccctcccccagcagactcccctcccccatctccccggcagccttccctctgccccgcccctcccgctccctctgccttccgccctctctcccctgcgaatcgggccggcgcctcggctccgcccccggccccgcccctcaggctccgcccgcccgagcccggcagggccaacccctcgaggccccgtccgggtcggccctccgctgccaccgcctcccctgaccctacgctccgggccgcctcggcggcagcgctcccctccccctctcagactccaggctgcctttccctaccctcccggttctcccccgctccatctccctccccggctgcacaccctctcccttcctttccccctcctcttttccttcctcgccaacccccgccctcctcctctcagctcttttccccaacccagttctcctctcccctccctcctctcctcccccaccccggtttcccttccttctcctttcctcgcctcacctcggttcccttcccctccccctttccagccctcccccacgtctccccaccgccctccccctcccccctcccttctgcagctctccttcccctccgaggcccccgcctcccttccccctctgtctccccagcaggctccagcttcgcttccctccccgtccccagtccccagaaccgctcttcccctcccccctcccaggctgcttcccagctcccgggtcctccggcccccaagcctgggggtctagggctgacccgctctctcgggaccttcccgcgggccctgccctccccactccgtctcccctccgaacacccctccgcgcctctcttctccgccgcggcgccccctccctatttctgctcccctcggacttctcacccctcccaagttttcctcccgacgggaccctcagctccacctccctgccccgccgccctcccaagcagctccgatcgccgacttcattccaggtcccggccccctccccagctccggggctcacctgtcagcgccctcctctcccgcccctaccgagtggcccggtccccagcgcccgcttcttcctccccttccccctcggccccctcccacactccctctctcctcccctcggggcccgtcgtcccccttcccacctgcctcccgcccgaccccctcccagcccccgcccttccctccagcccccccggtctcctctacccccacagccctcaccctgcccgcgccggccttgccctcccttccccccagcccccgacctccccggacccgcgcccctcccccacgcccgccgtccgcgcccctacccccggggctgtcacctgcgcggagccggccgtgacccaaccgcggcgctgagggagacgcgggcggggccgcctgcagaggagcctccccggcccttacctggctggccggccgctccgcccgcgccgcggggacccaggcgcccgggcctcctgccccgccggctctgctcacaatggcgctcgccgcctgcagctcgggtgctgacggcctgaaagactgacagactgacagccccgaaacttcgcggggaggagagggatagacgcgcggggagtcgaagccgggaaacggcgcctgcaagggaggagggaccgagggagcgggcggagagccccggcgcaccgggctgggggaggcaggggcagggggtttcaggagtggggtcccaggagggagcaccgtgggcttaggtgggcaggtgatggtcctaaggctccgagcctggagtaggtgtggaagtgggagctcaggacgggggaggggaggggaggggaggggagggtgatgggagagggggtggaggagggcgaggaggctggggaggacaggcactcgggctgcggggaagggtgccaagggagggtgctcgcggccgcggagggaggagccggggaaaggtggagcgcgaacgggtgggggggtggcggggaggagttgggggaacgaggaggggccgtgtcgggggggagccagcgagtcgtgcgctgccgtctctaagtcgccggtgccagccgggtgtgcagcgccgcgctcccgcgggaggacggcccggggggtcggtctgggaaactccggccccgcccccattctccacccggattccaccccgatccacccagacccgcagcccctcgcctggagtcccgaggacccgattcgaaaccagccgcgggagccgtgggggcaggcgggagagagggctgggcccctgtgcttgcgagaacgggtccttcgaagtagaaactggggagaggactttaagccaggtcccctgggagaaggccgggccaggtcgggagctccagggggcaaggctgggacggggctgggcggagattctgagggcggggtccgggggagggtctgggagggggctgcagagaggggagggctctatgggcgggagacgattgctggggggcctgctggcccggacaccacctggagttagatgtggagggcagccctcagccctcagccctcagccccagctcctcaggggactccactcgccctccctgcccaggttacgaggtttctccttggccttgttcccgctgcgcccactcctgaaagctccggagatgctgaagtctggactgttagttcccggtctcctctccatgaactttctccaaacccctgggttccagcttcctcccttctgcccctttacgggaaagggtgactgcaactcgggtctcttcccaatcccagtgctgcctgatcagccccggtttgaatccagagctgagtgaggctgggaaggggagggtgtgaatggcccttgagctcctgctaccacagcccaccacaaggatgagtgcctggaagagcgcccatcactcgggctcagctgtgaaggctcctctgcctccaggatgaagggagcacctggagtagcatgtgtcactgtgcgtgctggggtgtggccgagcacctgtgccggtgttgtgagacttacagtgagagtgtgcatgtgtgtaaaacaggaaaggggggtgtctgggtgtgcgtgtggctctttctgaggactccagagcaggagttgatcccagtcatccgtgaccccctgagagactcactctgggcccttttttggccctgggaccaatggtgaacccaggagaaggagagcccggcccagctctggttaacagcagcccccttcctcccctaggtggaatgactctacaggatactcggagggatatcaggtttaggagaccgaggggtgtggagtcggagccaggctgcattccagcccgggtgtccgggtgtgctcagagctctgctgggaccagggtggaccccggattcccctgtggagcctgtcactgcccctcccagccggattctcggattatttcatccggcttagctctgccccagggctgggggagctggctcccccgcccactccttccagagggtcctctcattcctcagcataggctccccagttctagaccccagagactctaggagaccctcgaagaaggagacagggtgggcccaaccagccacacataatcatccccagcaagaaactggaccctggagaaaagggtacatgttgcccacgcatctccacacactcaggaaccccagctaccctagaagtgctcccactcactgcccccgactcctcagtttgggcaagagaggggcgggaggcaggggagcatcatccaggcagaagttcaaggctggaagaccccatcagtcgtttagcccaggagctcttaaccttttcatggggtcatggccctcttgagaatctaataaaagtatagaactgtcttcagaaaaatgtgcacatacaatttcaaagaattactggagtctgagacctatttgtgcatccctgggaagtccctgaaatttttactgggaaggaaattgaggcccagaaatggagggtggcttgcccagagccccatgttaatttgtggtagtgcctgagagtgtgaaaatacacacacacacacacacacacacacacacacacacacacacacacaaagggaaacagatgcactggaaggggacaggaaggagactgtttccagggagagctggcctctgaggggctggtgtggcaggtccaatccggttgtgggcagctggtgccctggggcatgagactggaataaagccccccacagcccccagaactggccactgggctgcggggaggctgcgtggggcaggagagagcaccgctggcctctctgccctctctgcagcattgcctctcttgagcccaagcctcacgttccccaaaggtgccctgggggtgagggcaccatgctactccctgccctcctctttgggatggcgtgggccctggctgacgggtaagcagcccaccctggacccctctgacaagggtcctccttctgccgcatgcccagggaccctctggggcatcagactccgtgccccccacccccgggatcctccctccacccccgccacttcccatgagtgtctctccctaccttagcatcctccttacttcaataaccacccctgggagtggtgtcataggacagggcttttggtgacagagggaatggtggcagcagctgtggttccccatcatgggcaggcggtggtgtgagtggacagagaccatccgtgtggaggaggaagtggcaccccgtcaggaggacctggtaccctgtgccagcctcgaccattacagccgcctgggctggcggctggacctgccctggagtggccgctcggggcttacccggtccccagcgcctgggctctgtcctatctacaagtgagtaagggtgagagcctgggctgtctgccaggcaggaaaggagtgacaggccggacatcctgagagtggggaggctctggaggaagcaggcatttgggaagtaggtttgcagtgggcctggagaagggtggagcgtgtgagattagggtggggggtgagtgcgcgctacggtgggcaggacagggagaggcccgaagcctgctccttctacccaacccccgctcccaatccccgtggtctgccctcccaacattattctcactttgtatgtggggaaattaaggccggggaaatgatgtgattagagtagctgacaaaactgaatgtccccaggcctccccagggtgggactgggctgaacgctaacatctcctccccgtttccacctgcttggtgggtgcagacctccagaaacccggcctgccaagtggaaccggacagtgaggacttgttgcccaggctgggggggcgcccactgcactgagggtaagcacctgagtgcgtttggggacgcggtaccttctgggagtcctgggcaggggatgctagctcagatctgtggtttcaggcagagaaccagggctgggctgagagctccaggctaccccatattcactgcctgggtctgccccatcctccccacctaccgcagcccttgccaaagccagtcctgaaggccactgctttgccatgtggcagtgccagctacaggcaggctcagctaatgcctcagcaggaagcctggaggagtgctgcgcccggccctggggacaaagctggtgggatggcagctcccaggcctgccgcagctgctccagccgacacctgccaggtgggtccacagactccagcctgccagacaggcacagtcctggccatcaccccttccgcctccccaggcactcccatgtggagttcttgtgctctgggcccttctacagggcccatactggctccctggcccactagagtgaccatgtcctgtctgcctgcctcccgctgtgccgggagccctgtgtcctcacccttcacctctgcctcacactcagaggctcacagttggtgtgtctctcccaggcagtgcctcttctccagccctcctgcagcccctggcaggggctgtgggccagctctggagccagcaccagcgtccctcggccacctgtgcctcctggtcgggcttccactaccgcacctttgatggccgccactatcacttcctgggccgctgcacctacctgctggcgggtgctgcggactccacctgggctgtccacctaacacccggggaccgctgcccccagcctggacactgtcagcgggtgagggagggagatggggcagccacagggaggaggctggacaggggaggaagagagccccagcccccttttccactctgcatctcctcaaggtccaggtgactatgggacccgaggaggtgctgatccaggctggaaatgtgtctgtgaaggggcagctggtacctgaagggcagtcttggctgctccacggtgagagcactgggagagcaagaggctgcccaggcccccacgtgctcctctgacagtctctccaccctccaggcagggtcagaaaaggagcagggggctgtttgggaatgatcccgcagtgggcccccagtcattgctgttgggaggcactgaagcgcagatccagtgaggggccgggaggaaccaggcctagtcccgaccctctgcaactacccccaccaaactctcacagcaccagctcagacaagtccctctacctaactgcccgagcctcagtttccccgccagcctcagaggagtgctgtgaggtagcactttggtgctaagcaatgggaagctctcctaacagaacctttgtcttggctgggctgcagggtgaggtgggggtgagcttcctgcgtgtatgcctgtgtgtgcatgggtgcagtgtgtgcatgtatgtgtgcatgcatgtgtgtgcacgtgcacgtgtgtttcatagttcacttgaagtttactctctccagagagcgtctgcagctttcatgagctcctcaaagggagctgtgatggaaatcaatcactctgctgtaaagcatatacttttggtataaagtgcagagctctctagaatgtgagaattgtgtgagttatttcccttctcctttccatccctgggtagctgagcccagctgtggtagtgggaagggtgagaattgtggctgcagggggcaagtgacctctttctgtgcccagggctgagcctgcaatggctgggggactggctggtgctgtcaggaggcctgggggtcgtggtgcggctggacaggactggctccatctccatctctgtggaccacgagctctggggacagacacaaggcctctgtgggctctacaatggctggccagagggtaagtggggtgtggtttgttgctggtgtagcagggaagggaagaccggagaccctagacccagcacccctgcctcaccccttctcagatgacttcatggagccaggcggagggctggccatgttagcagccacctttggaaattcctggaggctccctggctcggaggtgaggctgccactggggcccctccctcccagctgcctgcccattcccagcttttcaggctggcttctgactcctgcacctccaagcccttgtcccagtttcattgctggcctgttccctaggacagggactggccctctcccagatcctcagggcagagggcaggccttggggtcccacagaaagcccggctgcctgctgtgaactagccatctgaggccagcattggtgaaccagttagtcatttatccccaccactgcagcccagcgtggggctgccacctcgcctctctccccagccccaggatgtgggcggtgggcctgaaggtggggccctggtgctgtgtgagagcaggaggcatttttctggggtcctggttaacgtccctcatcactgccacctgacctgatggcctttgtctgcagtctgggtgtctggatgcagtggaggtggcccagggctgtgacagcccctggggctcatagacgcagatgtagaacctggccacctgcgggctgaagcccaggacgtgtgccatcagctgctggaaggtccattcgggcagtgccatgcccaggtatgggtggggtaggggtggtgtctggcacccaagggaaggtgatagagaagtgtcagcaagctggtctggccctgcctgtgggttactttgggccatctgtcaaacccccacctctccatccttggctttatctctgggaaatggcccgctcatatatgtgatctctgaggttccttttggggctgatccatttggttataagttatggagtgatggaagcaggaggtagggggtgctggctgtttgctgaggggccgtcctttcctgcaggtttcccctgctgagtaccacgaggcctgtctctttgcctactgcgcaggggccatggcaggcagtgggcaagaggggcggcagcaggctgtttgtgccacctttgccagctatgtccaggcctgtgccaggcggcacatccacattcgctggaggaagcctggcttctgcggtactgctcgggcctccccccgctgcaggattgactgaggggctccccaccctgtgggattgactggggtctggcgggggactacagctcactcctgtgcccacagagcgcctgtgccccgggggccagctctactccgactgcgtctccctctgcccacccagctgcgaggcggtgggtcagggagaggaggagtcctgcagggaagagtgtgtgagtggctgtgagtgcccgcgaggcctcttctggaatggcaccctctgtgtgcctgctgcccactgcccctgctactactgccgccagcgctatgtacccggtgacaccgtgcgccagctgtgtaacccctggtgggtccttgagccatgctgggggttggtggccaggtggtgcccttggatccctcccttctcttcaacctgcttcccctaagcctccagcccattctgggtcttcctctcagagactgggactgctgctggcatggctgatggccttgctggctgacctctaccccttcagcaggaggggcttccacgggaggggaggaacaggggtttttggggggtcacctccagctcaggggtcatctccaccccctcagggtggagctgatgccagagctcactgtctcacccatgtgcccacagcgtgtgcagggatggccgctggcactgtgcccaggcactgtgccccgccgagtgtgcagtgggtggggacgggcactacctcaccttcgatgggcggagctactccttctggggtggtcaaggttgccgctacagcctggtgcaggtgggcagaggacggtctgctggggtggcactctgccacagtaggggccctcctagagggcacagtggggctgactgtaaggaaacccctaaataaataagcgaaacccagagtcttcccaggaaaggccaagggagaaccaacactgggggcatggctgttacaggcctcgaggcctcccgctgggttctcacctcctccccagcttccctgtgaaagtccctctgtcatcaccactcagcccagggccactaaccaaaacccatcttcagtcctgtctctcacagatgggatgggctgagtttgttatagactacttcatgcaaaacaacctcaggggaaataagaggccctgctcccgccctaaacctcccccaatgaagtgagctcacttctcaagttcaggtgcaggccacgattttcgcaatcatctggggtcccctgagtgatctctccattgaactattggaccattcccactcctctcataagtagtgatggggtgaggaggtcctgggagcacagtcctcacagaggctgtgcctgtccatggggagggaagaggacagccatctcccccagcaaacacagtcaaagatgcatgtgtgtacacacactcacacacacacaggctgcacaccaaaacacagcaatctgcatgtgagcgcgcacatgtgcatgcaaacacacacacacacacacacacacacaggctacaaaccaacacagagatctgcatgtgtacacacagacacatacaggctatacaccaacacacagagacttgtatgcatccacacacatatacatgcacccatgtacacacttacagacagacacagacatacacatgacacacactcatgtatgtgcatgtagatttagcatgtgtgtatacatgcacacaaacatgggagaacatacatatccataaggaggaaagagaggagtcatctcaccccaacatgcagacacgcacttacctacacacactcgtgaacatacaaacatgcacacacacctccacatgacacctatgtgcacctccatggccctgcacacacatacacacagacatccacgcatgcggcccatggtgaggacgaagccccttacctggcagagagtctgcctggccggaaggtgggcagctgcctccaggtgcgtgctgaaggtgttctgtagggaaggtctccagaagcctctccggagagggttggcccgccgggccccactgaattccccctgcccgccccaggactatgtgaagggacagctactgatcctactggagcatggggcctgcgacgctgggagctgcctgcacgccatctccgtctccctggaggacacccacatccagctcagggactcaggtagcctctgctctgcactcttgaggcagtctcaggcctcctgtcactgctcctcctccacactaccctatggctttggagtccaaacactcttccccagcctcctacacctaagcacactgcctcaacttccccggccctctcatctctgaagcagacatacagagtcctgaggagatgttccgaggcatcttctgccccgtcctggggtcagatacaagtcatgcagctatgagagcttgaaaggccttaaggcatgaccagaccgggcaggccactcagcagggtccctccaaccctccccaaccagctcctggcttgccatctagctcctcccacacactgatcatgagggtgagggactggaaaatctgtgtgccaagggtagtccttgggccgcaggggtagggagctcaggtggacactctagttgtccccagcagcccatcctgacatgggactttctacttcccatccaagctccttcccttatcgcagccctatccttccacgtgccccacccccaccatcagaccccctgttccaggagctgtgctggtcaatgggcaggatgtgggcttgccctggattggcgctgagggcctcagtgtgcgccgagcttcctctgcctttctgctgctgcgctggcctggggcccaggtgctctggggactgtctgaccctgtagcctacatcaccctggacccccgccatgcccaccaggtgtgccagtgaggcggctgtgtgggggagcaagggtgcggtgggactgcattcagctgtcttacatgcgtgcttgtggcccaggtgcagggtctgtgtggcaccttcacccagaaccagcaggacgacttcctgacaccagccggagatgtggaaactagcattgctgcctttgctagcaagttccaggtggccggcaagggaagatgcccctctgaggacagtgccctgctgtctccctgcaccacccactcccagcgccacgccttcgcagaggcggcctgtgccatcctgcacagctctgtcttccaggtagctgggttgggctcctcccacatctgtaagatgggccgacacctgccctgccctccacctgggctcttgggaggatcaagggagaccagacaagcccagaggtggtattggggaccaaggggacgtagactccgtggaggagaagttgacccatttccccatctcctcccaaggaatgccacaggctggtggacaaagagccattctatctgcgctgcctggcagccgtgtgtggctgtgatcccggcagtgactgcctgtgcccggtgctgtctgcctatgcgcgtcgctgtgcccaggaaggtgcctcacctccctggaggaaccagaccctctgccgtaagtttgctcagcccagccaaccccacccaggctcctcccctcctccctagcccatcccccttccaggaatggctaggggcccagggtgcatctctacccttggcagactgccgggcttttcttcctgcaaaggcacagggggtgtgggctgtggggttccgagggggtggagagagccagtggtggctatgcccctgacctgtgtgtgtccctgtgcccagctgttatgtgtcctggtggccaggagtaccgagagtgtgccccagcatgcggtcaacactgcgggaaaccagaggactgtggagagctgggcagctgtgtggctggttgtaactgtcctctggggctgctgtgggaccctgagggccagtgtgtgccccccagcttgtgcccctgccagctcggagcccgtcgctatgcccctggcagtgccaccatgaaggagtgcaaccgctggtgagggcagcgacctttggggcaagaggaagaatgtgggggtgaagaggtagcttgggagataacgggtggggtgcagccttgttggttgcagcgtgcatgctgggggtgacagagtgctgatcacttcccctcggtcgtggggcactttagggtccataaagcactttcgtgtgcatcattttatctagttttactttcctatcataacctcataaagtaagaagtggaaaaattgttcccattttgcagatgaggaaactgaggctcagataggctaaacagcttgcagggtcacacagcttgttcacgagaagtgaagtgaaggcagattatggatctgcaggcttcaatgcaatccctctcctacctgggctgggagtagggtggttcaatatctctgtcctgctccagagcctggaggatggacctattggagccgggacagaaagggtgacaatgtctatcccaggcatgtcagggtgctggaaacagcccaactccctgtgctgatgactgagtgttgggagctgagatgctcaggtctccagcatcagggctgggttttcactcaacgtgatgggatctggacacctgggtacccagtgtctgggttcctgagattctcaccaggtcagaccaggttcctggaagctcggacttgcctcttactccttctcaacctcctgcagcatctgccaggaaaggggcctctggaattgcacggctcgccactgcccttcacaggggcattctgccccagggagcttgtctatgcccctggtgcctgtctcctcacctgtgacagccccagcgccaatcactcctgccctgcaggcagtactgatggctgtgtctgtccaccaggcacggtgctgctggtgagtccaagaaggagctgcgtgggggaacaggatggccttccttaagccagggcactgccctgctcccctcgcacccctacatggtgccctttgtccctgccctctgcccaggacgagcgctgtgtgcctcctgacctctgtccctgccgtcacagtgggcagtggtacctgcccaacgccaccatccaggaagactgcaacgtttggtatgcccagctgccgtgacctctaaccctttgaccttgtggcccatggctccccacacatcatccttccctccaccagaaggggtcggggtggtgggggctggggtatccagactggcctgggccaagggaaccctgcaggaccccaccacgctgagggctgctgagattgcctggaacctggaccagctgccttccctggatccagcccccagggccctatcctcggtgactctgtttcccccaccttgcccatagcgtgtgccggggccggcagtggcactgcacaggccagcggcgcagtgggcggtgccaggcatcaggcgccccccactatgtgacatttgacggactggccttcacctatcctggggcctgcgagtatctgctggtgcgagaggccagtggcctattcacagtctctgcccagaacctgccctgtggggccagcggtctcacctgcaccaaagcgctggccgtgcgtctggagggcactgttgtgcacatgctcagaggtggctgcaacattgaagggtgacattgccagggaggggcacacctgtatggcttcccagctgtgcaaggtgggagggggcggggttccctgtgtctgctcactgctggccagctccttactgggcttggctgccctccatgccatggggttggtgcctctcctcttggttgggactcaataccagaagcctcccagaaattaagtcccagagaagtctaatgatgtgcccaaggtcacacaggtagagaagcaaaagaagggctggacaggggagctagagagcctcatgaggatctggaggaccctttcctccaggctgggcctgaatgcctttcttcctctacaggccgggcagtgacggtgaatggggtgagcgtgacgccccccaaggtctacacaggccctgggctgagcctgcgtcgtgctggcctcttcctgctgctctcgacccacctgggcctcaccctgctctgggatggagatcaggcccctgccctccctcaaccattggacctgtgccccgccttagcaccatagggttgaactcaccccaacttctttctcccaacgcctgaccctccctcctcctggtctccctccactgagcccctgacacctccacagggcagatttccaggctgagagctaagctgacagccaggctaggaccctgagctctcaccttacttccctgcctggctggcacttgccctgccccatgcccaacccagtgccacccctacctcccagtccatgcaagaggtccgagtttccaaattaggtttttggccaggtgcagtggctcacaactgtaatcccagcactttgggaggctgaggcgagcagatcccttgagcccagggctttgagactagcctgggttgaacatggcaagactccctgtctacaaaaaatacaaaaattagctgggcacggtggtgcgcatctgaaatctcagctacctgggagctaagatgggaagattgcttgagcctgggacgtcaaggctgcagtgagctgtgatcaccccactgcactctgcctgggcaatagagcgagaaaaaaattttttttaaattaggttttcataattatctttttcatcattatgaaagcaatccttccacaccaagggaaacattgagaaaataccaagttttagaaaggcgaaatgaaaataaatctcctaacttcccatcacccatataagcagttggcttatatgttatatctaactgcttctgtggaactgagggaaacccagataacccccatatggacttggctctgagccgctgggccaccctcccagcctgccgccaccgaggctggtgctgctgggcctcacagtccatcctggagtctggtttcccagaatctgacctgatggagaatttctctccccctcagcccttggcttggtgttagttaggaaaataggctcctaattcctaccttgagccccctaaatataggtctcttcatttatcatcaccaatcatccccccacaaaagaggtaaccataccccctggtgggggtggcacctggtggtggtaaaacagaccctgggtcttctggcccagataagggctggtgaggtcacttttaaccatgctgccaccagggactcgggtcctggtgcaactgtcccctcagttccgtggtcgcgtggctgggctgtgtggtgactttgatggagatgccagtaatgatctgcggagccgccagggcgtcctggagcccacagctgaactggctgcccactcctggcgcctcagccccctctgccctgagccaggagacctgccacacccctgcacggtgagtgcaggcgggaaagcaggaagggaggttcccagaggcagggctggggagggtgtccgctggtccactgtgctggagacgccaccctgtgcctgcagatgaacacacaccgggctggttgggctcgggcccgctgtggggcgctgctgcagccgctcttcacattatgccacgcggaggtccccccgcagcagcactatgagtggtgcctgtatgacgcctgcgggtaaggagaggccaacctggagtggggtagaggtgggggtgccgggactgaatgcttcctcccacagctgcgactcggggggtgactgtgagtgcctctgctcggccattgccacctatgcagatgagtgtgcccggcatgggcaccacgtgcgctggcgtagccaggagctctgctgtgagtgtgccccgccctcagtccccaatgctaaatcctgccactgccacaggctcagcttcttgaaagagcttctcctgtcccacaagacggccgttcattcattcaagggcaagctgtgcatcgagtgcttactctgtgccagacacttttctagataagccatatatgcaagaacggctgccgagtagagctgacatggtacacgtcggcccggggggtcttgcccaaggtctacaccagacaccctgtgccctccatggtggtcaccttggccagccagcctggtgtggttgcatccttttgcccttgtgcctcagtgatccaaggctctctcctctccacccagccctgcagtgtgaagggggacaggtatatgaggcctgtggccccacgtgtccccccacctgccatgagcagcatcctgagcccgggtggcactgccaggtggtggcctgtgtggagggctgcttctgccccgaggggactctgctgcacggtgtgtagagtgacaaagggcagaggggaggggcactgagactgggaaggggccactgtgcccttttgctctgagccctgcactctgtgacctcaggaggagcctgcttggagccagcttcctgcccctgtgagtggggccgcaactccttcccgccggggtctgtgctgcaaaaggactgcgggaactggtgagtggggaggtcatcttgggggggacctattgaaggagcactgggccaagcccagcctgtggctgatcccaggacgctgtgtgctcagcacgtgccaggaaggtcaatggcattgtgggggtgacggtggccactgtgaggagcttgtgcctgcctgtgcagagggagaggccctgtgccaagagaatgggcactgtgtgccccatgggtggctttgtgacaaccaggacgactgtggcgatggctctgatgaggagggtgagtgtctttgcccatgcgtggaagcgacagggttggtcagtccttgcacatgtaactgaatttcctggggccaaggcagctgtcctggagtggcttctttagctgctgctcccattgccaggggctgcctgtggcctggagggatgaggggaagggagggtgttctggtccctctggggttcagggcttctctgggcccctacagcagcgtcctgagcctgcctgtttgccccatgctaggttgtgccgccccaggctgtggggaggggcagatgacttgcagctccggccactgcctgcccctggccctgctctgtgaccgccaggatgactgtggagatggcacggatgagccgagctatccgtgcccccagggcttgctggcctgtgccgatggacgctgcctgccgccggccctgctctgcgatgggcatcctgactgtctggatgccgccgacgaggagtcctgtctgggtgagttgtccctgccctggacgccagcccacccagcactccctcccgcaaggcccatctcctcaagagccccgacttcacctccccgctcctttgccaggttcctgctatgaagttggtcctgagggtgtgggagttggggcaccccaaacagtaagagtacagggcagtgccccagagccagttcttcttttctgtgcagggcaggtgacctgcgtccccggggaggtgtcctgtgttgatggcacctgcctgggggccatccagctgtgtgacggagtctgggactgcccagatggagccgatgaggggccgggacactgccccctaccttctctgcccacacctcctgccagcaccttgcctggcccctccccaggctccctggacactgcgtcaagtcccctggccagcgccagccctggtgagtctcctggagggaagaggtgggaaagctggtggccagaagcctgggggagaggggcatggaagcctcagagagaggcatttgtggcgctgctctgggatgggaaggagcagggcgcagtgggagacacccgaagacgctggaatgaatgaagtggagggcgtttgaaagagtctacactctttcctggcgttcaaggcctccctcccagctgcagggagtctcatggaaattcttggcccaggggagagctttgggaaaaccaaccgggcagcaaaatgcagagggattgttctcgggaaggggctgcaggtgggttagggccaggcccaggaaatggccaagggacttggaccagggaggggagcagcggcggaggtggaaggactgacccgggcgcggttgcgggtgggagggcgctcgccggcagaggatccagcgcggacgctccctgcagcgccaccctgcggccccttcgagtttcggtgcggcagcggcgagtgcaccccgcggggctggcgctgcgaccaggaggaagactgcgccgacggcagcgacgagcgcggctgcggagggccctgcgcgccgcaccacgcgccctgcgcccgcggccctcactgcgtgtcccccgagcagctgtgcgacggcgtgcggcagtgtcccgacggctcggacgagggccccgacgcctgcgttgaggctcccgcgcccccggccatgcgcggcccccctggccaagccggcgggcccacctcttcccgagcgccatccccaccttcgcctcctgaggcacaggtgggcgcggcagctagagtgatttaggtttgggggcatccgaggctgggccacgtttgcgttcctttgatctttttcgtgaaactttatttgaaaagtttttaccctcccacctaggcccaggagagcgaagaaaggggctttgtctttccccacacttggccaagaagggataagagggtgggcagaggctctgcggggatgaggagtgtgtctgtttggagggatcccgccctcagcatttccccaccagacctgagcagaccctctgtgtcactgcaagccagcccttcaggtcctgtctacctccccctatagcgagctgtccacaggccccccagctcctcccaggctggcctgtctggccgcctcccacccgcctttctgcccctctgcagggagagggcaggaagggacaggagcggagcaggacacatctcacagtgcccgcaggctccacccagctgcctctgtgccctggcctctttccctgtggtgtggctccggggctgtgcctgacccctgagcagctctgtgatgggatcccagactgtccccagggcgaggacgagctggactgcggtgaggatgctttgttccctgagggaggccccgctggctgggcccgggacacagctcacaccccccgctcactgtgttttttctcctcttctttcccaggggggctgccagccctgggaggccccaacaggacagggcttccctgcccagaatacacctgccccaatggcacctgcataggcttccagctggtgagggtgggagtgggtggaggaggcggcagtgccatgttgcctcccagcacaagagccctgaccccactccctccccaggtgtgtgatgggcagcctgactgtggaaggccagggcaggtgggcccctccccagaagagcagggttgtggggcctggggcccctggagcccatgggggccctgcagccggacgtgtgggccctggggccagggccggagccgccgctgctccccactcggcctcctggtgctacagaactgcccagggcctgagcaccagtctcaggcctgcttcacggcagcctgcccaggtgaggggctggggtggtggggcctggatagaggaagggagaagaaggccactaggccttcagccctcccccatggtcctcactgcctgccctgtccccctgcctcacagtggacggtgaatggagcacctggtccccctggtctgtgtgctctgagccgtgcaggggcaccatgacgcggcaacggcagtgccactcaccccagaatgggggccgcacctgtgctgcactgcccggaggcctgcacagcacccgccagaccagtgagttgaagagaggatggtgctgctggtgggaggccatcctctctgcagagctcccttccctgacctctgacctctgcttccggcttctctcagagccttgccctcaggacggctgccccaatgccacttgctctggggagctgatgttccagccctgtgccccctgcccactgacctgtgatgacatctctggccaggtcacgtgcccacctgattggccctgcggcagcccgggtaagggggctctgggcccaggtgctggctccagggtgtgggtctgtggcaacagccctctgcatggaagcctcaccctgggccccctctaggctgctggtgcccagaagggcaggtgctgggcagcgaggggtggtgtgtgtggccccggcagtgcccctgcctggtggacggtgcccgctactggcctgggcaacgcatcaaggccgactgccagctctgcatctgccaagacggacggccccgacgctgccgactcaacccggactgcgctggtgaggcccttccctcggggtccctagtcctctccctggaccgcccagctgcacatccaccacctccttcaggctctgactgttggccctccctcagtggactgtggctggtcctcctggtcaccctgggccaagtgcctgggcccctgtggaagccagagcatccagtggtccttccggagctccaacaacccccgcccctccggccgaggtcgccagtgccgtggcatccaccgcaaggcacgcaggtgctctgttccccacccaccgggggacctgcagggaccttggcccgcaccccacctcccacttaggaagcttcctgtgtgccccttccacatccaccacacatccccaattcggaacccctgccctgtgcccctacccgtctaaatcccgggagtcccggaacctctttggggacccctggcctttcccttctctagttttatgccctctaggtcttgaaggtgggtagacggagcccgcagatgcagcttcacaaactcagcttgaattcctgggctgaggcttgcggggggctcttgccatagctgcctccccagccccctctgggacccacggcgctggctgcagtgctggtacaaattgcttccctggccttcttctgggccagttgcaatgtctcaggtgtaggggcagagtgggctgatagggtgaccaaatgtctcagtttgcccaggacttcctcagttttatcacagaaagtcccaagtcctgggaaagtcctcagtccaggcgaaccaggagagttgtttaccccaagcaagccccgtcaccaggccagggacatccctcccttctcaggtgccagacggagccctgtgaggggtgtgagcatcagggccaggtccaccgtgtcggggaacgctggcatgggggcccctgcagggtgtgccagtgtctgcacaacctcaccgcacactgctcaccctactgcccgctcggcagctgcccccaggtgagggcactggagtgtgtggtgggcagagctggaggggatggggaggctggtggaatgggttggagataggcaggcggcctgacctctgtgcctctgcagggctgggtcttggtggaggggacgggagaatcatgctgccactgtgccctacctggtgagtgtgcctggggcatgacagggaagtcccagggggaggacaatcggcagggtctctgagagggaaccaggggcactgagcgggggtggctggataccccagcctcagggtggcaggaagcctgagttctgcatgccaagggaaggaggggacctcggggtgcgaaggcttctctctgccctccctctccgtccgccctgccttcctgtgctttgggggctttctgcctcccccatggtgccacctttgaggtgctctctttcctctgtttctgctcagatctggttgctctggttgcttttctttccctcttagaatagccaagacaaagttaagttggacttttcaaaagtatctttgcctggaaaggagttataagtgaaacgggaaaatacaaaggcttgaaatggatgcatttatgggtccaggttttccgtcttgtcttgtcttgtcctgtcctgtcctgtcctgtcctgtcctgtcctgtcctgtcctgtctcctcttcttttctttctgacagggtctcactctgacccccaggctggagtgtagtggtgtgatctcggctcactgcaacctctgcttcctggcttcaagcgattcttatgcttcatcctcccgagtagctggggttagacatgcaccaccatgcccagctaatttttgtatttttagcagagacagagttttgccatgttgatcaggctgccccattcttatcctaaaagtgcatccacaggttgctgaggttaaaacagaaccagcatactcagctgcacaggttgttcactgtacaagttagctggtgattgggacccagactccagcccacagagctgctttcatccagaggcagcccctttctaatgcccatgaaggtgcctttttggtgtcagcacccctggattaggaactgcagttgctgggtcctgggctgaaagtagtttcaggctggcagttttactctatgttctctaaatattcagtagatgtgaaagcccccaattcacaccaagggaaggaggagggacctttcccagctaggaggttgttcctgggaagtcagcagggagaaaatgctctaagaagtggggagaggcctgagtgctgggctggggactgtgagcctctcggtctctgtctcctgaccctgaagtctcctcccacaggagagaaccagacggtccagcccatggccactcctgccgcagctccggctcccagtccccagatcagattccctttggccacttacattctgcctccgtcaggaggtaagggccatgtgctatggagtgcagtgctgagaggggccatgctgcccaggggttgtccaacctgggaggggaaacaggccctcggggacatcctccttgccctgcacactgtggatggttgtcctaaggatctgggagtcatcctatcttaagttgcctctcttgactcttccctccctgggctaaagtcacccatgtggacgtttcacatcccctagctccccatgcgacttcctaaccgtgtccctgcaggctcctgccgccctctgtcctcccctactccagcctgtctctctcttctgcacccagacccctgctattctcccctggggctggccggactggctgaggggagtctgcatgcatcgtcccagcagctggaacaccccacccaggctgccctcctgggggctcccacccaggggcccagccctcagggatggcacgctggaggggatgcttatgccaagtggcacactcggccccattacctgcagctggacctgcttcagcctcggaacctcactggtcagtgaggagggcagtgcttgagggggaggcagtgatgatgggcggggggccggtgtagctccttcagctctgacctctgctcttgccctggcccctccctccccaggcatcctagtgccggagactggctcctccaacgcatatgccagcagcttctcactccagttcagcagcaatggtctacactggcatgactatcgtgacctcctgcctggcatcttgcccctgcccaaggtatcacccgcccaaggccgatggggccagcagcccaccatgcccttttgtgggttccatagtctttgtccccaagggccttccagtgtccccgaggggcatggcctgcattcgatgcttgttgaatacctggtgagtagcagggactgtgctctgtggagccgaggcttgggtgccactgtcacatggatgctggaaaccatccaagtggctcagactcagggcaggtatgtgaagcctgcaagggagagaggatggggagacaccaagttcactgagggcctccgggagcccagacccacgcacgtcttcgtggagagcagcctgggcacagccctgccctcagggggtttgcatccttcccggagacaaaccgcacgaagcggtaggaatcagtccgtgctgtgttaagtcttaactgtttcaggagcacctgctctgtgccaggtgccgagccaggccctggggacacagcagtgaacaggacctggcctttgccctaggggcacctccagcttagcgagaggagctcagtccaggaccagccccctccagccttgagaggcccaaatgcctactgccagggtggggggcatggctctgggaggggccgtgaaaactggggaaaaagtggggtcactcaaagtcatgaggtcagcctgaaaaagaggtgaagctcagtcatccgcatcctctgctggcagcttttccccagaaactgggatgacctggaccctgccgtatggactttcggccgcatggtgcaggcgaggtttgtcagggtgtggccccacgatgtccaccacagcgatgtccccctgcaggtggagctgctgggctgcgagccaggtacaggttgcgcaggggtgggcagggcaggagagagaggggccatgggaggagccctcagccatacgtcctccacacagggtccccaccggcacctctgtgcccaggggttggactccgctgtgccagtggtgagtgtgtcctgagagggggcccttgtgacggtgttctggactgcgaggatggctcggatgaggagggctgtgtgttgctgcctgagggcactggcaggtatactgtggccggccgtgcagctcacgcccttggcctggcctttgaggggacagccatgtgggaggggcccggcactgccttcacccccaaggtgcccagaccctgcatgctgaggagctgcagccgggtgccttcaaggccctttcccacctggattctaggattccctgcctttctcatagttgagtcaggggttctccaggtgtgggccctggaccagcagcatcggcagcacctggagcttgttagaagggcaggttctcgggcccgcccagacctgcaggggtggggtgcagcaatgtgtgtcttacaagcccctcaggtgattctaacccatggtcaagttgggagctactgttgggaacatcgcctttgtccagcctcagtgggcagagtccttcctgaatgctcactcccgcaaagaccccaggcccagcaaaagcacactgacgcccctgcctggaaggggggcactggtgctgggagggcccctggagtccttttggctatttttctccccagattccattccacagccaagaccctggccctctcctctgcccagccggggcagctgctgcactggcccagggaggtgagtgtagagccttgggcccagagggtggagtggggggacggggacctcgcctcacagcctcaccagccctgctcctgcaccagctggcggcgtctcccctctccgcagcatttcctcctgtgtgttccctggtactgctctcaggagccttgccggtgcctggctgcagagacgtgcaggcagagcgagggcccagaggggtttggggacaagagaagcctgcacccctgatagggagcttatgcccacggggcaggcaccagggcatctggtgctcagagccgaaaagagccctgtgcccgggtccccaggggcttcccggacaagacttgagggctggagaggggtgtctatagtgtggagaaggcgcggagcaccttcccacctggaatggcctggtcagcaacccagagtgtgtgggtggggtagggggtagggggtggacatgtgcattgggtgggggaaggggagtttgaggggcaagagctgaaatggatcaccctggtgggctgctgagaataaggtccctgagctccttgagggcagtgggctggtgcctggaagcgcagttgcgtgctcagctctgccctgggctgcgggggaggaagatggacaggaagcagtgctgggactgtgagcgcccaggctgtatcctcaggggatgggagctgccctcagggccgggggctgtgcagggtgctgagccctctccctctgcagggcctggcagagactgagcactggccccctgggcaggaatcccccacgtccccgacaggtgtgtgcacagactccaggcctcctccccaaactcttgtcccacctgttcttccagagccaggggccgttacatctcaggggttcaaatcccatgacccctgacttccccacaaccaagagagtcacggggttggctcagggaggagacactggtcactttggacatggccaggtcctgcccctgcccaccccctgggattccaaggtatgtggctgtaggttggcggggcaggtagctccaggccagctcccaggactgagcctgtgccctgtaatgtggctgcctctccagatgcctggtcaggacaggtctcccccatgggggtgggaggccacttggctccagcctgcactctctctgctcaccatccatggagccaggcccccctttctgaagcgtttgctggcatcaaatgtctcttaagtgggcacgggggttggatgtggtcaccaagttggcatgctcctatataaggaaggaagaggctctgcctggttgtgaaccggcctccctggagctacctgattattcacctgtgtgctagccagcagagagctgcctcctggagggcctgctgtcctgcggggatgagggggtggtaagagggcttttggtgtgggtgaattcttgccctcatttctagcccctatgggagggatctgggtgaggcttggggcagcaggggctggagaggaaggagggtgagggcaccaggtctgctctttcattctggctcatcctcccctgggcctcagcttttccccatctgtgacactaggaggccttatagacaactgtggcccctccctgtgagttctgatggaagttattcagaacctggccggactgtttctgtgtcttttgtgaaaagcagacaaagcaattgatgccacccctcagatccataacatgcagacccatgggatacattataatttcattctcagtctggttaaaaaaaaaaaaaaaaggctgtctttgaatgcatctcttgccagaaaatgagacttttaacccttttcactgtagctgccaggaagcccaaaatcagtttgttgttgttgttgttgttgttgttgtttgtttacaacagaaacaatgaactcaccctgggtctctggtagtgtttactccctctgctgctgtgttaaaatgacctcagttctttgtctccctaaatatcgtattttatggtgagtttgaacttgaaagttgccatgtgtttcttcttgggaatagaataaaaatctcagatcaaaacaagtcttctactttcagccaaagcccttcctgtgctccttggatttttttgatgcaaggcctctcagaaggcatcaattgctttgtctgcttttcacaaaagacacagaaacagtccggccaggttctgaataacctccatcagaactcacagggaggggccacagttgtctataaggcctcctagtgtcacagatggggaaaagctgaggcccaggcaggtggcacggtgaggcccaggggaggatgagccagaatgaaagagcagccctggcaccctcaccctcctttctctccagcccctgctgccccaagcctggtccgcagcacctgtgatttactctgcaccacccagaagcctgggataccctctcgagggcccccaccttcctttcctgggaaggggagctgggcaagcctcacctccctctacctacacccacagagacaaggcccgtgagtcctggcccagcctccggggtgcctcaccatggggaatctgtgcagatggtgaccaccacccccataccccagatggaggccaggaccctgccaccaggtatggcagctgtgacggtggtgcccccacaccctgtgactccagcgacccctgctggtaagatgccaagcccttctacctgtgtgcaaggcctctgtaagcccaccttccttgtgagggggacagaggccctttgttcaaggtcacacagctcaaggtcattttggggaggactgagtttcctagcccagtttaccctttttctattatcccaagataggcagagtgaggcatagcagatgccaagaggagggagcttgggggcttcagggaggtgacgaaggagaaaggacagggcaggccaagtgactggtcagccggctgtggtggtgcccacaggccagagcgtcgccccaggacccttcccacctgtgcagtgtggccccggccagacgccctgtgaggtgctgggctgcgtggaacaggcgcaggtgtgtgatggcagggaggattgcctcgacggctccgacgagaggcactgcggtgagctgctggagggcctgctgtcctgtgggtagggggtggcacttatccttcagtgtaggaaagtgtctgccctcatttgtagctcatattggaaaggatctgggggaggcttgggcagcagggaatggagaaaatgggtaaaaacaggagtgtgtgtgtctttgggggtggtcaagaccgggaataggataggccttgggtctcagcctattttataaaacctgtttgacctttgaagagactcatctactcactcacccatccaacattctacctatccctctatctatccatccatcaaccacccatccatccgtctacccatcctcccatccactaatccacccactcacccacccatccatccatccacccacccacccacactcccaccccccaccccccaccccccacccctctatccatgtattcatcagccacctatcaaccatctgtctactcacaaatctatccatcaatccatccacccatccagccagccaccatgcatctatctacccatccatccatctattcacccgtccatccatcaatccatccatccatctcaatccacctacctacccctctatccatgtactcatcagccacccatccatccatccatccacccacccatccatccacccatccatccattcatctatccaccgacccctctatccattcatctatcagccacccatccatccacccatccattcatccatccatccgacacccacccatgcatctatcagccacccatccatccacccatggattcatctacccacccctctattcatccattcatcagctacccatgcatccacctactcactcatctacccatccatccatccacccatccatccattcactcacctacccatacacccatccatgcatgcattcatccacctatctatccacccatctatccatctacccacccatatatccatccattcatttattcatccatccatccatgcaaagtagatcactatgatcaaagcttagtcttccaatcatgaccaaagaaatccaatgttaatcagtcacaagaagagccaccccagggagtatgcattcaggaataaggtacctaagcatctagaatctctgtgtgagagcttgtgtagacccaagactccatgatctcaccaacacatagtggaaggaagcctgctctgggcatgggatgcaggaggcatcaggaggaaggggaggccaggggctccagtcagcaagctcactttggctcttggcttgagaaggggctgagtgtatcattcagccaggaatctacttatgtggctcccttctctccctgccttgtgggcagcgagcactgtgcccttcatgatgcctaccatggccctgcctgggcttccagcctcaagggccctctgttccccgagccagctgagctgtggcagcggggagtgtctgtctgctgagcggcgctgtgacctgcggcctgactgccaggatggctcggacgaggatggctgtggtatgtgccagccagggcaggggtagccctgagggccccctcctgcatgagcccctctgagccccggcccccatgcccctgcagtggactgcgtgctggccccctggtctgtctggagcagctgcagccgcagctgtggcctgggcctcaccttccagcgccaggagctgctgcggcctcctctgccagggggcagctgcccgcgtgaccggttccgaagccagtcctgctttgtgcaggcctgcccaggtaatcctgcactccagccttccctcgggaaagcccctgctcccagagggaggtggggaaccccccacccagtctcctcaggaaccttcaggtgtgaaacctggggtgggtttccatctgagagcctcccggctggccctgccctcctttcctacctgagccaagactcaggttcttgtgtatagcctggaaataatggtcattcctgcctcagaaggcactggaaggattaagggagatggtgtgtgggggtgtttggagccaggcctcatgtgtcagccagctgtgccacttgtccctgggtgccatgcggaaggccttgtcactcttttattccatcgatccaagggagtggccctcacctacttctgtgcatggcagagaggggcttcccacacaggggcctctttcagtcccaccctggctcctccctggctgtggtggccctacagctgccatcagggctgctctccccaggatccctgcagtcccggccccttcccagggagcagagcttttgtcctgggaggcacctagagccctttctccaggcacctgccacctaggggaggtttcctgggacagaagaggagctgtggaacacccagggcagggcccttggctgcctcactggctgctgcccaggccgggggaggaggggagcgctggctctggccactctctcatagcctgtgtctcctggacccctcctggtggacccacatgctaccttccccaacagtggctggggcatgggccatgtgggaggcctggggaccctgcagcgtctcctgcgggggtggccatcagagtcgccagagaagctgtgtggaccccccacccaagaatggcggtgccccctgccccggggcctcccaagagagggcaccctgcggcttgcagccctgctcaggtggcacaggtaagggggtgctgggctggggacacggagggagcactgtgggcacggggcgattgggcctcccagcacctaggctcacctggtgcccatcccccaccagactgcgagctgggccgtgtgtatgtgagtgccgatctgtgccagaaggggctggtgcccccatgcccaccctcctgcctggatcccaaggccaacagaagctgcagtgggcattgtgtggaaggtgaggcagacctggcctgcagggggactgtgggatgcccacacaggcccaccagcccccagtctccagcctcccctccctgctgtgccccttggggctgagtgccctcttccacatactcccaggatgccgctgtcccccggggctccttctgcatgacactcgctgcctgcccctctctgagtgcccctgcctggtgggcgaagagctgaagtggccaggggtgtccttcctcctgggcaactgcagccaatggtgagggcggctgcaccagggagggcactgtaccggggtctccccagccctgaccggttcctcagcctctccctcccctgcagcgtgtgtgagaagggggagttgctgtgccaaccagggggctgccccctgccctgcggctggtcagcctggtcctcctgggctccctgcgaccgctcctgtggctctggagtgagggccaggttcaggtgtgcgacaggggtggacggcagtgtgagaaggagtggtggggcccagggaggcgaggagccaggccagccctgagggggcgatagtggaaagatggtggacaggggatgaaggatgaagaaggcgggagtgagggcagggagagagcagagcgggtgctcagggctgcctctctccccaggtctccctccaaccctccggcagcctgggggggtgccccgtgtgaaggtgaccggcaggaactgcagggctgccacacagtgtgtgggacaggtatagccgggagcctgggtgcaggagtccccccttcctcctcccaattctgtaccctgagaacacatgggatgggacccactgaccactctacgtgggggattggtaacacctccgcagtctgagaggcagcccttgaactggcctcggtggaggggctttgatggggagaggcagagactcccgcccagactgcctgggcgccaggagcaggctggcctgggtggagcaggcaactgcagagccgggcgagagaggtgaggctggtgggttgagggaggccagcagcaacatttagaggccagatgaaggtgccagatggtttccctctttccacctaccgggtgcttctcagacagtgcctgtgccagtggaggtctctgcagagcaggcgcagcctcactgttgtgcagggcaatgggacgaggtgggcaatgggacgaggtgggcaatgggacgaggtgggcaatgggatgaggtgggcaagggagaggtgggcaatggggaagaaagaggagtgggggaggggagggggagagaggcagggtgcatccagggggtctgggccaggctcttgcagtaggagggaaagaggggccagtggagagtggccggtgggacactgacagtttccacagggactcttaatcagtttctggcatagaaggatcaggaagcgttgatctgggggaaacatgaggattggtggtggtcctgctgaggtgctgtccgagtccaggagagagatgtgggaatgtagttgagcccaggttcacaggaggctctgtgcctggctcctgagggtgagaagtggggctggaggccaggtgcagtggcccacgccgataattccagcaccttgggaggccaaggtgggaggattgcttgaggccaggagttcaagaccagcctgggcaacatagagagaccccatctcttaaaaaaaaaaattaaaaatgtagctgggcatggtggcgcatgcctgtggtcccagctcctcgggaggctgcgataggagatcacgtaagcttaggaggtagaggctgcagcaagctataagcatgccactgcactccagctgacagatcctgtcctcagccccccagaaaagcagaaaaaagatggggctggagagtgggggtcccagcaagtgagctgagaaggggcagaggctgcaccctgagcccagagcagcctccctcctccttgtgagccctcttctgcccacctagtttctcagacctaacccaggctcctcgaccctccccagccctgccagtaaaggcctttgcacaaatggcctgtcctgttccccctccacagaggtgttcggctggacgccctggacttcctggtcctcctgctcccaaagctgccttgccccgggagggggccctggctggcgcagtcgttcccgactctgccccagccctggggattcatcctgcccaggagatgccacccaggaggagccctgcagcccccctgtatgcccaggtattctcccttgggcccaggggtggctcggatgctggggtgggatgaggagcaaagaagaatgcccccttgagccggttctagacatctgggaggggccaagggttggagcaaacctggctgttgtccttaagcctctcccaccccagccatcgcgcaggaagccagcctgagtggtagacgtaggtgggggctggaggctgcagttaagaccctgcaagctacacagctccagccacacgatgccctatcctggactgtttctgccatgccggtgtctgtgactctggattgggctcttcctggcagtgccaagcatctggggtctgtgggctccctggtccacttgctcagccccctgtgatggaggcatccagacacgtgggcgcagctgctccagcttggctccaggggacaccacgtgcccaggaccccacagtcagaccagggactgcaacacgcagccctgcacaggtaccagactccctgcctattttccagcaggcctccctggcccagctcctggggattttgaccttttccccaccctcaccttcgcccatcactgccctctgactccaggccaggtaatgcctggagctaagggagcctgggatttcctgtgtctcctctagctccctgcctctcccacctgccactggggaccaggtcccagcagctgtggcccctcagccctttgctcttctttggtggaggcaggcctccttccccagagaacaggctccccgagggaggcagactggccttcctcagggcagaacacactcagggccagaatcgtgggggagcagagctcgcactttgaagcccctggccccttccttactctcccttgtcctctgagggctcctcctatcccagatgactggagtcctcatggtctgttctcaagaatatttgtattaaagtagagcaaagccatggctgtgtcctggtgccatcccagacactggagcaaagctgtgagggtaggggcaggaggggtggcttctctggcacagtcctgcccagtagcctgccgccccatgccctgcttgcaggttcccttctgcccctctgcctcccttcccttcccatcccttcccgtccttcctgcccttgctgagacctgctttgtcttcctatccagcccagtgcccagagaacatgttgttccgctcagcagagcagtgtcaccaggaggggggtccttgccctcggctatgcctgacgcagggccccgggatagatagagtgtacgggcttctgcgcccccggctgcacctgcccccctggtcttttcctgcacaatgctagctgcctgccccgcagccagtgcccctgccagctgcacgggcagctctatgcatcaggagcaatggctcgcctggactcctgcaacaactggtgggtcacagcgtgggggcagtgtgggagaggggccggggatctagaggtgggcaggcgtgggctccctttcacaagcacaccccgtggtggggtgctccgttccccaaacacaacacagcagccacgggtgccgggcagggtcctgagaatattagagcgagtggtcatccccatttgacttatgggaatattgggtctcagatcgatggagcgatttatgatagaactagagatggcagagggtctaacctctcatcacagctttctctggttctctttcctgaatgtaatttcatacctgggatccacttgatttctgttcagaaacattcaagtgcccagtacccaaagctgacatcaggatctgccagcagagggtgctccaagcgatttccctcttttttctttttcttcacttcatttccttcattctttttttgtttgtttgtttggtttttttgagatggagtctcactctgtcgcccaggctggagtgcagtggtgcaatctcagctcactgcaacctccgcctctcagctcactgcaacctccacttcccgggttcaagcaattctcctgcctcagcctccctagtagctgggatgacaggaacctaccaccatgccaggctaatttttgtatttttagtagagacggggtttcaccatttggccaggctggtctccaactcctgacttcaagtgatccacctgcctcagcctcccaaattgctgggattacaggcgtgagccaccgcgcccgggccattcttcatttccctcttactttttactttatataccctgcccctccttcgatttcctccttctttattcttcctcccgcctgtgctttctttctcacttttcgtctctccgatctttttctgggacctccagtatttaataaataggctttaaaacatgtattggagagaacagcaagtgtgcagaagtacccagttctccctcctaggagaactccagctgtctctaaatccctcctacctggccctggccctcgaggtcatttcccaataaatacaaatggatgagaccttgggacaaaggacagcgcagcgcctgggcgctgtggggctcactgagggtgcatcgtgaacttcgcaggggacctgggcagcaagcttcacaccccagaccctcgggtttgtcttctgcagtggtctcagctgcttccctgggggtaagggctgactgtggccgtgatggccaggtaaagcctcactaccccctttctctgcagcacctgtgtctctggtaagatggcatgcacctcggagcgctgcccaggtacccccatgcttggggcacgggaattgggcagtggtgggtcctcagggaccataggggacttaggaccctcctgagttaaactcctgggagctcggtggtgcccagggaagttagggtatgagaagactgacctggtttcacacacactgccctccgcccccaacacgccctggcagtggcctgtggctggagtccctggaccctgtggagtctctgtagctgcagctgcaacgtgggcattcggcgccgcttccgggcaggcactgcacccccagctgcctttgggggtgctgagtgccaaggccccaccatggaggctgaattctgcagcctgcggccatgtccaggtgagagctgggactgaggtcctgagacctccttaaccttccagagagaagccaagaagactcccatcaccccccaccctgaacctctagaaaagtgcaagagacttcattaagagatgctgctaagaggttgtccccagagactccttgagggtccattccctaacagggcccctcctcagaatagccccagcttctccctagagaccagcccagttctaggctgaatcctggagccccccacaagcaggtgtgaggcaccttaagtgggatatgacgctgcaggtgaagcggtggaggggtccccaggggtgtctgggtgggaggaggagaaggtggggtgggcatgggaggcagggcctgcagtgacctgggcaccacccccaggtcctggtggggagtggggcccttggtctccgtgctccgtgccctgtggtggtggctacaggaaccgcacccgaggcagcagctgcgcagcctcatggagttttccacctgtggcctgcagccctgcgcaggtgaggcctgccctggggaccctccagttctcattcttaccaacccagggcactgtcaaccccctgtctgccaccccagcacagccctgtccctcggcccttgtgcagtccccatgaccaccccacccatacccagagctggtgcctctcccaggttgggagctcaggggagagctgagtgctctggggctgggctgtcaatttctatgtccccagggccagtgcctggcatgtgtcccagggacaagcagtggctggactgtgcccagggccctgcctcttgtgcagagctcagcgccccaagagggactaaccagacctgccaccctggctgccactgcccctctgggatgcttctgctggtgagtgtccccctgcctggccccagagaggcctctgtacagcctggggaccatggggtggcagggaagggacaggcaggatctggacagcgaagaacatagggtatggggctagagacagggagaccctgcaaggttgaggaaagggtactaaactcatgggttacaactcagctccggcaggaaccagcaggggatcctgggcaggtctcatccctctccccctaatctctgtttcctcactggtaaaaatggtgataggtctagaagatctttgtgaattgtccctgctcaactgctctgtccactatgttatcaccagttatttatcgagcacctacagtatgttagtctctggctgagctattctgtagggaaggagtagtctctgccctcaagaagcatccagtctggggaaaccagacccagagtccctaaaatgaagctagaaccatcagacgggcaggaagtgagctttgcacattgtggagtggagtggagtgggctgggtcagccatggagggctccctgtaggaggtgatcctgacttgaatatcagagattggagggtgtggagagtagggaggcatggagggcttcctgaaggagggggtcctgcacttgaagatccaagattggagagcagagaggtggccactctagtcagagggtggtaggaattggggctaggaaatgccggctgtgtggtgggattgaacaaagccgtggggtgtggttaagggacacgttgtaatcatatctgagtccaaatcaggctcttttactggtagccctgcgagcttggggatagtattcccgtgcctcagttccttcctttgtaaaattggggtaaaattacagccagtcacaggagtcagtgagacggtgcagggaaagggtttcccaggccctggcccgtaaacttcagtgcgttcgactttgaatcatgcgccacaagacagttgtttcttttaaatctgaaggacttctgtccagattccctgtgcacaatgtttttctgtttttattttgttgatgaaaatgtgtcttttcctaccattgctgtacaaattgcatatttcatgttttcatggctgacttcatggggattcgacagttcagtctcatgtcctgcaatttttaagatggtctttttctcctagaaattggagggtccacgtccccacgtccccacggcccccaagccgatggtccgcatttgcctggcaggagggcagaggggagagctgcatgtctgtggaaggagagtggctgggttttaagggggagcttgaggattgcatgctggctctgaccagggtggggagcccaggcccagcccatctggagccagaagatgatagagggtttcgattccagaacaacgtgtgtgtgcccacccaggactgcccctgtgcccacgaggggcacctctaccccccgggcagcactgtggttcgtccatgtgaaaactggtgagacaccgcccccatcccattatggccctgtgacctctgacgacctgctgtccctcctcagaggcagggattttggctccagtcggggacagagacacatgtgccccccacccccagcccctcggcacagccgtccagccctctgaggctgcaccctcctgcgcccctccctccccctgtcccccacctgttttccctctccccacctgtgttagcctcctggggctgctgccaccgagtgccatgcactggggagctagagcagcggcccctgatggtctcacagatcctggaagcccaggatcaaggtgttggtgggtgggctccttctgagggctgcaagggagactgttcaaggccttactcctcttctgggagtttgctggaaatcgttggcactccttggcctgtaggtggccttctccctatctcttcatgtcatcttccctcattttctcttttataaaggacataagatgcattaaaactagggccacctcagtgacctccttttaacctgatcacctctgtacagacctcatctccaaataagctcccattcccagggactgggggccaggacttgaacttgagggtttggggggccacaatgcagcccatagaccaaccaaccctctgctgctccccacagctcctgtgtctccgggctcatcgccaactgcagctcctggccttgtgcggagggtaaggaagcgtccccacttctgacttgcacctcggctcccccatccctcagctgcaggagtgggccagggctgagactgggggaggaaagccatcaggagagatggggggcagaggcaccatgctccatcttcagcctgtccagcctgtgcctgtccccctcctgcctgcccgcctcctggatatcccctaggtgagcccacgtggtcaccctggaccccttggagccagtgttcagcctcctgtggccctgcccggtgccatcggcaccggttctgtgccaggtcccccagtgcagtgccatccaccgtggctccgctgcccctgccagccacccccacacctctctgctcaggccccgaggctgaagaggagccatgtctcctgcaggggtgtgatcttgagtgcctgcctgccctgcccgcctggaccctcctggggagcccagggtggtgcccactgtacgctgtggatgctgctgccttgtaccagctgtgccctggccccagccaagcccctcctcactccttcctctgctgtgtccccaggagctgggggatggggtccatgggggccctggtcccactgtagccggagctgtgggggaggcctgcggagccggacccgggcctgtgaccagcccccaccccagggcctgggggattactgcgaggggccacgggcacagggggaggtctgccaggctctgccctgcccaggtacctgccagggatgggggtgggggtcagggacagaggaaggggagttagaggaagcattccagggagagaggccagggtggatggccccacacagttctcagcccatcctgtttgccctcagtgaccaactgcactgccattgaaggggccgagtatagcccctgtggccctccgtgccctcgctcctgtgatgacctagtggtgagtcccagctcccttggcactgccacctgacccaaggcccactttgcgggagggcagggtgtggatttgggctcacggcctctttggctggggcctggacagcccagcacaggaaggcacgggtgggggccctggtttcagttcacagagcatgccaggccaccccagagagacaccagcctctctccgcacagagccagcctcacctgacagcctttgtctgtagatcagacatttctcacattaaagtgttatgacaaaaatggcataaacacaaaggaagggggaaatcatctcctgaaccccatgagcacgttggtgtctagacctgcatctgtgtgtgggtgggggagtggcggggggtgggagaagcaaacacagggtcaccacggagcccacattctgggctgagcaagacagacacacgtgaaagagtggtcacagtaggggccatgaagaatgaggtggggcttcgaggccttgggtgtggaggtgctgagggaggtggggagagggaggagaaagaggaggatctcgaagagaagagaaggtcgttgcgggcagtgcctgctcccagccgccccaggacctcccagctccttcccaaactgcccccttgcccagccagctccccacgttctagaggtctggggcatgccccagcttccaggccatgagtccaggtcacccgctggaattggggttttacatctgggaacacctagctccaaatccctgccccagggggccaaagggaacctcctcagctgctcctccctcccctccaccctcagggaggggccaacctcagtgcaaactgcagggctagctgggtccccttcctgcctttctcatctgcactaccaggcgtactctgttgaaaacgtgaggcctctgtcacaccttcctccccagccccttgttccgtcgtcttccctgcacagctttcctttttctgctgatggcccccacttactgtcccccagcactgcgtgtggcgctgccagcctggctgctactgcccaccaggccaggtactgagttccaacggggccatctgcgtgcagccgggtcactgcagctgcctggacctgctgaccgggcagcggcaccatccgggtgctcggctggcaaggcctgacggctgcaaccactggtaaggggccctcgccgtggtgggaggcagggatgccagcaggagttgccccacttcatcccattctctcgagctctctggagtctccgcggatggtcacatttgccccccacaatccctgagcagatgtggggcaggcaccaagacccgcgtctgataggcgaggacgctgaagctgaccctgtgtgtctgcgggggctgggcacgtgctcagcggcaggaggggtctgggcaggaggagtgacagatatggcattcacaacccatctgaccacagagttggctccagggtacctgcagtccttccccaagagtaggcatcatctggtgaccccgagagggccagctaagtgggacaggaaacaggatagggaggcactggagagctgggagatggggcactatctggcagaaaactgaggatcaatcataaggatgaggggaggggagaggcagctgggggggtgcagagttagggtttggggtaggactaagctgctgcctcttccttctgtgtctgcaccccctgcccagcacctgcctggaggggaggctgaactgcacagacctgccctgcccaggtatgtgcctagcttggagggaggtgaggaggggggcctgggaccgggcaagggacgggctgcaccccagtgcccaccattctccttgtagtgcccggaggctggtgcccgtggtcggagtggacaatgtgctcccagccctgcaggggccagaccaggagccgctccagggcctgtgcctgccccactcctcagcacggtggtgccccgtgcactggagaggctggggaggcaggggcccagcatcagagggaggcctgccccagctacgccacgtgcccaggtgtaatgccccacgaggcccatgcccctcccccaaaaggccctaaagccctgctccagccccgctaacctggggcctcctaatgcggatgatctgtcttcctgccacagtggacggagcctggggcccatgggggccatggtctccctgcgacatgtgcttggggcagtcccaccggagccgggcgtgcagccggccccccacccctgagggagggaggccctgccctgggaaccacacgcagagtcgcccttgccaggaaaattccacccagtgcacaggtcaggcttcagtgaggtctgagagggcccctctaagtccagggagatgccgactctggcctctgacctccacacacatcatgtcactatctcaagggacagttcccaggccatcagtcatggacctggtcaaggtggcgggtccgaatgggcgccaggcatggcaggagggttgaaaatgcctcaggatgcccttcggtgaccaccctctctgctttcttcctgcgtagactgcgggggtggccagagtctgcatccctgtgggcagccctgcccccgctcctgccaggacctgtcccctgggagtgtgtgccagccaggctctgtgggctgccagcccacttgtgggtgccccctgggccagctctcccaggacgggctgtgcgtgcccccagcccactgccgctgccagtaccagcctggagccatgggtgagtgcctcccctctcccccagcccccagcactgcagtgccacctgtctggcccctgtgccgctgccccggggacccagcctggggctgcagaacaaaaatgagcgattaccagctctccaggccttcgtgtccctcgactcccctcccagggctggtctggttggagtgtccacctcccttgttcaggacacagggtgccatgcggtggaggcaagagggtggggagtagaaggccatggggtgggaggagggatggatggggggagctgagctgtctggagcccccaccctccctcctgtgcccctcagggatccctgagaaccagagccgctcagcagggtctaggtttagctcctgggagagcctggaacccggagaggtggtcactgggccatgtgacaactggtaagccaagagaagtgggggcggggaggcgcatagaacccaggaggggagccctcaggggatggggctggtcctgtctctgaagccccctcctttgtccccagcacctgtgtggcaggcattctgcaatgccaggaggtgcctgactgcccggaccctggggtgtggagctcttggggcccttgggaagactgcagtgtttcgtgtgggggcggggagcagctgcgctcccggcgctgtgctcgtcctccctgcccagggcctgcccgccagagccgcacatgcagcacacaggtctgcagaggtgagcgccagcccggggctaaccccactctgacctttgagtcccatcctggcctttgaccctgactcatgggtgccttttggcctctccctccccacccccacctgtcctccagtgccctcccaccagcgatggacaagtgaaggaggactcagccaggctgtgggagcctgtgggagggggcgctgcccagggcggggggatgggcaggtgaaaggcactccctgaggtggtcagtgagggccggggccggagcaggtgctgatgtggctgctgcctcagaggcaggctgcccggctggccgcctgtaccgtgaatgccagcccggcgagggatgccccttctcctgcgcccacgtcacgcagcaggtgggctgcttctctgagggctgcgaggagggctgccactgccccgagggcaccttccagcaccgcctggcctgtgtgcaggtcagaacctgtccaccccacagccctccctgccctcccttcgcctgtcccctctgtcatgtctgtcacttttgcagaccctgtcatccctgggcaggcccctaagcagcacacaggctggtgaggccagccgaggcctctgctgacagcgtcaggggcaggcagagttagacgcagcctcccggggtccctggttccccgggatggggaacacctgccacctctggacttgcctgtcctctgttcctgactggtacatgtcccagccctgctggagctcacacccacccctgtattccccgcccacccctcaccctggcagggaggggcagtttcctgccaggttcccatgttccccaacctcactggcccagcctcacctccctgtcctccactgtgggtcatgggtcttcactgcccctctcttgcctgtcacatgcttgtggggacagtgcccctcaccttcactccccttggccccacctggtccctgctgggcatcccagcggcagccggggcccagctctgctctggggagcctgacaggcacacagggatccctttcctaatcctaaagccggctgcccagtggccactcctgagccagagttccaggatgccatgttcaggagggaccagagcagccacctggtctcacctcctagacctagagatggtgacagtgagccccagagaggggaggggacacaccgaggtcacacacagcagcagagccagacccaaacctaacgtcccgattcctggctgaagctctttctgccccccgcatcatgtgtgagcctgtgagggtctgtgttggtgcctccttgtgtcctgctgggcgctctgtgtggggaagccagctcaggccaagccccggccatgcccctctcatggtgtgctcatgcccctgatgggggtgaacagccccctgctcctggaaatgctttcctggagcctggagcccttttccgggtcctcacactgtccctccccaagtctctccaggggatgcgcacagccccgggtgggtggctggcctgtgctgtgatgctgcctcctctgccccactctcccaggagtgcccttgtgtgctgacagcctggctgctgcaggagctgggagccaccataggtgaccctggtcagcccctcgggcctggagatgagctggactcaggccagacacttcgtacaagctgtggcaactggtgagggggatggtgagggtggggactgggctggggagggtcagggagattttcagtggagggaggggttagagggtaagaggacagggaccgggaaccccagtctaccctctggccccacctgggctgggctaacctggctcttcccccagctcgtgtgcacacgggaagctgtcttgctccctggacgactgcttcgaggccgatggtggtttcggtccctggagcccgtggggcccgtgctcccgctcctgtggagggctgggcacccgtacccgcagccgccagtgtgtgctcaccatgcccaccctcagtggtcagggctgccgtgggccccgccaggacctcgagtaactgccccagcccagactgccctggtaaggacaggcagaaggtggtgggcagggctggggtcaggatggcactggacagacgtctaggaggccttattggaggaggcagtatctgaggggttttgagggagggagggaactttgaccagcattggaaggaaaggaacagcttgagcaaaggccttgagcctgcaaggaagtgctgtgcttggggcctgggtgtccgcaggagctcaagctgaggaaggctggactagatagccatgagcccgcagtgccagctgccagccttaggcgtggtcccggtgcgctgtgggtaccaaaacatttctgagtggggtttcctttggcacaggggctgaagggtccacggtggagccagtaacaggccttccaggtagctccagactccctgtacctctgcctcatggcctccctgtgggaagagcaagcccagggacccctccccgcttccccctcccctgcttcctggagaggctgaaactcagggccgactcagcacaaggcaccctccccaatccctcccccaggtggctggggcccatggtcctcctggtccccctgctccagaagctgcacggaccccgctcgccctgcatggcgcagccgcacccgcctctgcctggctaactgcaccatgggggacccattacaggagcgcccctgcaacctgccctcatgcacaggtgtgccttccagcctcaacttctgatcccagccaccaccctcagacaactcattgtaacccccaattcccaatatctaatacccctcaggtaatcattggtttctagtgttgacatctcatttcaaatcagtgtctgactccgggctctggatcctctttgccaaccccagcagatgctggggagcccaacttccagcacattccttgttctctggtgtgtgtgctgaactctccacccgccccaaggtcccgcccaaatccctccatagccctgtagtctgggattactgtccctgatgagaaaaggggatagtgaggcccagttgtcaaagccacacagcagtcagtgtcagatccagaatgagagcccagagctctggacgaggccactgctggcctgggtggtggaggtccaccgttgagctgggagcagagaggaaaggctgggcaggtgtcatgcagccgggactggctccagctccgctttgtgtcacagagctgcccgtgtgccctggccctggctgtggggctgggaactgttcctggacctcctgggccccgtgggaaccttgctcccgcagctgcggagtgggccagcagcgccgcctgcgggcataccgtccccctgggcccggcgggcactggtgccccaacatccttactgcctaccaagagcgccgcttctgcaacctgcgagcctgcccaggtgaggcggctgggggagaccagggcatgccccaggctctgcccctggaaggcccctggcatcagtgccccctcccaggcacccagcctacctgagtgtggcactttcatctctcacaccagaccctgacctgggctcgtgggataggtgggggccccctgcctgagccgacccctcaggtggccgttctctttcccacagtgcccgggggctggtcacgctggagtccctggtcctggtgtgaccgcagctgtgggggaggccaatccctgagaagccgcagctgctcaagccccccatccaagaacgggggagccccctgtgctggggagcggcaccaggcccgcctctgcaatcccatgccttgtggtatggcaatggtgacagtcctgtcctacccttattgggctccactctgcatggggcctggctgctacctcatgggccagtttggaaactgagccctctggggtggagggctgggcctggcgttgggcaaggataccctgagcatgtctgttgtctgtgccaaggcccaaggatccaccctggccaccccaacccacaggagagctcctcctttcagctttcccacccccgaggtgggaaagagccaccagccctgtcacaatttttggaggctttgacagtggcacttttaggagcggctgtggcactcgtgggtggtggatggagccagcggctgtagctgagcctgtgcctcctcccgtcacccccaagcttcagctccttctttaattggccctcaacagccccatggcatgggttcccccggggctcccctcctctatccccacccatcctctgggtggacacaaaagaggctccaggtgacattattggcttttgagacccacaaatttagtccagctccacaaacatttactgggtaccgggtaggtgctgagaactcacaggaggtgagaggaactcactgtctacctagaatgtcccaattccagagtcttcccgagtctcccgtgtttcagtgagcaccagtgtgggggatgggatgggtcctgtagctttatggaggtagggagtccccagtagggcagagggagggtttctgagccctgggccctcctgactctgggccctccatctgctcagaggccggctgcccagcaggcatggaggtggtcacctgtgccaaccgctgcccccgccgctgctcagacctccaggagggaattgtgtgtcaggacgaccaggtctgccagaagggctgccgctgcccaaagggtaggtgctgccctatccttcaggagtgtcagggtggctgagtgggaaggtgtgggtggggccaggggtgcaagctccagcccttgccccacagggtccctggagcaggatggtggctgcgtgccaattgggcactgtgactgcaccgatgcccagggccacagctgggccccggggagccagcaccaggatgcctgcaacaactgctcatgccaagctgggcagctctcctgcacggctcagccctgcccgcctcccacccactgtgcctggagccactggtcggcctggagtccctgcagccactcatgcgggcccagagggcagcagagccgcttccggtacggggctggcagggctagatgtcccttctgccacccagggcctcactctgcaaggcgcagtctcccttctgacagagttcctgggtcctgctctcaccagcgacagcaccaccccaggccctgggccagctctgtccctggttaccctggcttttcctcagctacccccatgcccaccctgaggtgtcccgtcagggtgtctcatcaggagacagagaagggatgacgggcctgagctatctctcacctcctctgccctggccccacccaggtcctccacgtcgggctcgtgggccccagagtgtcgggaggagcagtcccagagccagccctgccctcagccctcgtgcccacccctgtgcctgcagggcactcgctcccgcaccctgggggacagctggctgcagggggagtgccagcggtggtgagtgcagggcagggaggggggctggaaccgccctgctggagagcagagtcctgagtcccggctctttcccagctcctgcaccccggagggtgtgatctgcgaagatacggagtgtgcaggtctgggctgcctccggatccccgcctcagccacccttctagcctcatgccttgcctgccatgtgctctgtgtctcattttctcccaccttacttaactgccactcccttggccaccatgcaggtccccacccagtcctttggcctttgctccctccgcctcctctgacctcacctgtgccctcccacagtgcctgaggcttggacgctgtggtcctcctggtccgactgccctgtctcctgtggaggtggaaaccaggtccgaacccgggcctgcagggccgcagcccctcaccacaggagcccaccctgcctgggccctgacacccagaccaggcagcagccttgcccagggctgctggaggcctgctcctggggcccgtgggggccctgttcccgcagctgcggcccgggcctggcctctcgctctgggtcctgcccctgcctgatggccaaggccgaccccacctgcaacagcaccttcctccacctggacacccagggctgctactcagggccctgcccaggtgagtgttcaggggaagtgaaatcacctctctacttttcctaccttgggagattcagaaaataaatgttcctagttcccggatcatcccttaaaataagcctgccctgtctgtgcccccatgttttgctcagttcctttcctcttcccaccatctcttccctcggggccctccttgtagggtgagagggcgtccagccagctgggcctttcaggcccctcttgcctgtttcctgtgcagggtctcggcagggctggggtgagagggagggcaggcaggggagaggtgggctgacacacccctccggtccctagaggagtgtgtgtggagcagctggagcagctggacgcgctgctcttgccgggtgctggtgcagcagcgctaccgacaccagggcccggcgtcccgaggggccagggcaggcgccccctgcacgcggctggatggccacttccggccttgccttatcagcaactgctctggtgaggctccagcagcaagttaaccagggagctgcgcagggcagcagccaccaagggtccctgctggaactccctgctcccctcccctcacagccaatgtagtgccccaagacctcagagcagctgcctgcgcccgtgcctgccctcaaacccagctgctcccctgctccccccagatactccctcatcacagctgcgaccccaatccctcaccacaatttgtccaccctgcagctgccggcccgcctgtggctttggcccatgtagctgccctctaggagggtgtcttacccagctcctgctgcggctgccctccatctctgcccctctgtctcccatctctgcccctctgtctcccatctgccaatttctggagcacctgccaaggcccctcactcctgcagccccctcctcagctgcctcctccaggcatcttcctggctctccaaggcccaacccatcctgatccttccctggaggtgcccacaggtgctgagtggatgccagatgggggatactggtctgttccaacttgcggagggtgggcatcttgtactctcaccaggtgaccccaagggcctcagtagagccacgcggcatgtgctctgggctttgggagtgatgtctctgggctgttcccccacaagcctgcctctcccccatctcccccagaggacagctgcacgcctccctttgagttccatgcctgcggctccccctgtgctgggctctgtgccacacacctgagccatcagctctgccaggacctgccaccctgccagccgggctgctactgccccaaggtgagagctgggagctggagcaacttccaaggagaagggggtcttctgcccacactcctgctcctccttctttctgtgatgtccatggcggccccacctccttcaaaccccttggaactcggtgcctcctcccagcttgccattcactcggcatcatgcatatgcacctgctgcaggcggggcacagtgctgggtgctgggatgacacgatgatcactgccccatctctccttccacccaggggctgctggagcaggctgggggctgcattcccccagaggagtgtaactgctggcatacctcagcagcaggagccgggatgaccctggcccctggggaccgcctgcagctgggctgtaaggagtggtgagtgatggtggaagggagacagagggctggggccagggaatagggcagggaggcctggggggcccagtccagcctcaggacagaggaccctgagatgctagagtttgcagctccctcatcttgccccaaatgtgcctaggggtcaggttacccttgcatgaccacccccaccccccggaggtcctggactgggtcctgcctcccttagtctaccctgactaccccctcccacagtgaatgccggcgtggggagctgcactgcaccagccagggctgtcaaggtaaccctgacctatggagacaacagtccccattgcttgggactgggggagtttctgggatgcagaactttcagtgctaagacggggacagtcccaggcaaactgggatggtgggtcaccttaccctgcccccacaccaccctcagcctttctgtttccagcacttcctggtcatgaccctgagcccctcctgcctgtccaccagggtctctgggcccaggggtggtcactgggaagggcacccacaccctgtccttccaggtcttctgcctctgagtgagtggtccgagtggtcgccctgtgggccctgcctgccgcccagcgccctggcccctgcctccaggactgccctagaggagcactggctccgagacccaactggcctctcccccaccttggccccgctgctggcttcagagcagcaccgccaccggctctgtctggatcctgcgacagggaggccctggactggagcccctcacctctgcaccgcacccctcagccagcagcgcctctgccctgaccctggagcctgccctggtaatggggagaggcagaggccaggggacaggacgggcctggagtgcaggttggggggacctggccgggaggggctaggctatagagcacattgacctgctacccctcctgcttgtctctaaggcctgcaggatttgaagctgggggtggggtccaggcagcagctagaaagagaagcgggagagcctagagggctttaaggcctgccggagcgtttgcgacgacagagctcaaggcttgagggggaggcaagaggtgggcctgggtactgactccatcataccttccccagactcatgccagtggagtctgtgggggccatggagcccctgccaggtgccctgcagtggggggttcaggctacgctggagagaggcagaggccctctgtggaggaggctgccgggagccatgggctcaagacagaaagctgcaacggagggccctgcccaggtaactcccatccccgatccagaggagagcctgggacaggaacatctgagaccaaacctgaggggagagttggctctgccccagagccgtgcagtggaagcgggggcccaagagcgtccccaacacagactcctatcatctggtcgtcaggttagagctgcgaggcccaagacactgtattcaccctggactgtgccaaccagtgcccacacagctgtgccgacctctgggaccgcgttcagtgtctgcagggaccctgccgcccaggtagccagcaggccccaccacctagctgggagttccaggaaagcctgggcctcccccagctgcctcctgctcccagagagtgtgtgatctcgggcaggggtgggggaggttcagactgctgggtcatgagtgacagggcaggaaagtggtcactttcagcagccagctctgagtcctgcaaggagtgagggtcactcagggccactgttccatgtggatgctcaggtggctgtcagggttactcgggtggtgcccacacaggctagagcagcccgttcctgtgcatgggcagtgggagatactgtggaaactaggctttggactcgatctgattgctgggggaggatccattgtgtgagccctgcccgagcacccaatcttgttccgcctctttacccacacccctaggctgccgctgtccccctggccagctggtccaggatgggcgctgtgtgccgatctcctcttgccgctgtggcctccccagtgccaatgcctcttgggagctggccccggcccaggcggtgcagctggactgccaaaactggtatggctgcagccacgccagggctaagggagctttgggtggaggcatggggcaggtcagccttcgtcagcattgttggggagtgagggttctgttcaccctgactggagccctttgtgcttacccctgtccacagcacctgtgtcaacgagtccctggtgtgcccacaccaggagtgtccagtccttgggccttggtcagcctggagcagttgctcggccccctgtggtgggggcactatggagcgacatcggacttgtgaggggggtcctggggtggcaccatgccaggcccaggacacagagcaacggcaggagtgtaacctgcagccctgccctggtaagtgccctgggcggcaggtgactgactccctccattgctgctgagcccaggccctgccccagctgtggggggtaggtgtggggagaggaggtcggacccagggcagctccctccctgggactggagatgctgggtccctcccatctccctacctgtgtgctccccacagagtgcccccctggccaggtgcttagtgcctgtgccacctcatgcccgtgcctctgctggcatctgcagcctggtgccatctgtgtgcaggagccctgccagcctggctgtggctgccctggagggcaggtgggtacggggtgctgtgtcctgactccctgtgggggaagccggcaggtggggagggaagaggcggtggtctgagtgtcactgagcctgccctgctgcagctgctgcacaatggcacgtgtgtgcctcccactgcctgcccctgcacccagcattctctgccctggggcctcaccctgaccctggaagagcaggcccaggagctgcccccagggactgtgctcacccggaactgcacccgctggtgagggcctggccctggggtggggagcagggatgaggaagggtagggaggaggacatgggaggcatctgagtgtgcttctgtcttctcagtgtctgccacggtggagccttcagctgctccctcgttgactgtcagggtgagatgtggctgtccatgccctgctgcacctccaaagtcaaggcccgggactggcactgaggaggagagacgggccctgctcacagactagacagagcttcagaaagccctcccctgtctgtccacactgacctctctctaactggagacccagcaccccctgccgagggctccctgggcactcagtgtggtctgccccacttgtgggggcattccctagcacacagtatacacagagccagggctgtgatgccaggaagtggaaggttctttccctgccagtgaggaaactgaggtctggaggggtgagcggaaatgaggggcctggcctggcagcccccgggctgatagcatttgccctgtggggtgcagtgttacccccatctgatcaagaccaagggcccacccaccgtgttcccagctctgccacgctgggctctgtgaatgcagacatgcagcatggccagcctccgggcagaccacccacccccagaacaggcagagacagggcacagtctctaggtctctgacaggcaggtagaaccccagagggtgagacatcagtgctgagaatagaggccgagtggacaggattggtcagggagccttttctggaggaggtgagacctggcctgggtccagctagtgtttgggtgggtggataagaaagatcaggaggtgtggttggaggctgctgtggctgagaaggcaagatggggacgtgtgggtgctcagcttgggaggggaggaatcgaggctggatccagggctgacctgaaagctgggttggatggtcttccctggcagagtgccccctggggaaacgtggcagcaggtggccccgggggagctggggctctgcgagcagacgtgcctggagatgaacgccacaaagacccagagtaactgcagttcagctcgagcctcgggctgcgtgtgccagcccgggcacttccgcagccaggcaggcccctgcgtccccgaagaccactgcgagtgctggcaccttgggcgtccccacctggtgagacaccgaaccccctctgctaccactcacccattcctgaccccaagcctccccatctgtctgtaactccactggctcctccccctactccaggccctgcagcagccggcagggctccgctctccccctgggacagtctctggccccaacagttcatctccttcctgggtctcttgttgcctgactccatccaagcccattgccccggctaggcactcacaggctgggcttggggatcagggatactattatagaaaagtctgcaagttggagccgggcacggtggctcatgcctgtaatcccagcactttgggaggctgaggtaggcggatcatgaggtcgagagatcaagaccatcctggccaacatggtgaaaccccatctctactaaaaatacaaacattagctgagagtgctggtgcgtgcctgtagtcccagctactcgggaggctgaggcgggagaatcacttgaactggggaggtggaggttgcagtgagccgagattgtgccactgcactccagcctggcgacagagtgagactccgtctcaaaaaacaaaacaaaacaatacaaaacaaaacaaaacaaaacaaaacaaatctgcaagttgggagagaccaagaggaggctctcccctactctccccagcctggatctgaatggcaggaggcctgtgagagctgcctctgcctcagtgggaggcctgtctgcacccagcactgctccccactcacctgtgctcaggtacgccctgcatccctgctactctccggggtggttccccccttacctgggctccggtaccccctgcagccctaccaccctccctggttcctcgggctccttcctgggaccctcctccgaggttggtcttagggtctctgagtggggagggcgggccgggctccaggtgtcaagaccaccttgggactctctccctctgcagggcgaggagatggtgctggagccagggagctgctgtccctcttgccgcagggaggctccgggtatggagggaacctgggtgcattgtggggtgcctctccctggtctagacccttctcccctgccaccccacacctggcctttgcagcctggcagctgcctgactcccccaggccaacccaccatggggatttgaggagtgaagaccccagcacatatcatagcgcctggtcacctcgccccacacgcttccctcagacccaggccctgcccctcttcccacagtcccctcagtcccctcctcctcctgtgctctgtccccccccccacagtctcctcagtcatcccctcctcctgtgtcccctccacagtcccctcagtcatcccctcctcctcctgtgctctgtcccccccacagtcccctctgccatctcctcctcctgtgtcctctacagtccccttagtcccctcctcctcctgtgtccccctccacagtccctcagtcacctcctcctgtgccttcccgcacagtcccctcagtcacctcctcctctgtcccccccacagtcccctcagtcccctcctcctcctgtgctgtcccccacagtcccctccatcatcccctccacctgtgtcccctccacagtcccctcagtcccctccacctcctgtgtcctcccacagtcccctcagtcccctcctcctgtgtcctcccacagtctcctcagtcatcccctcctcctgtgtcccctcagtcatcccctcctcctgtgtcccctccacagtccccgcagtcatcccctcctcctgtgtcctcctccacagtctcctcagtcccctcctcctgtgtcccccccacagtcccctcagtcacctcctcctcctgtgccctcccccacagtcccctccatcatcccctcctcctgtgtcccccccacagtcccctcagtcacctcctcctctgtccccccgcacagtcccctcagtcacctcctcctcctgtgccttcccgcacagtcccctcagtcacctcctcctctgtccccccacagtcccctcagtcccctcctcctcctgtgctgtcccccacagtcccctccatcatcccctccacctgtgtcccctccacagtcccctcagtcccctccacctcctatgtcctcccacagtcccctcagtcccctcctcctgtgtcctcccacagtctcctcagtcatcccctcctcctgtgtcccctccacagtcccctcagtcatcccctcctcctgtgtcccctccacagtcccctcagtcccctcctcctcctgtgtcctcccacagtcccctcagtcccctcctcctgtgtcctcccacagtctcctcagtcatcccctcctcctgtgtcccctccacagtccccttagtcacctcctcctcctgtgccttcccgcacagtcccctcagtcacctcctcctctgtccccccccacagtcccctcagtcacctcctcctcctgtgccctccacaacagtcccctcagtcatcccctcctcctgtgtcctcctccacagtcctctcagtcatctcctcctcctgtgtcctcccacaacagtcccctcagtcatcccctcctcctgtgtcccctccacagtcccctcctcctctgtcccccccacagtccccagtcccctcctcctcctgtgcctcccctccacagtcccctcagtcacctcctcctcctgtgtcctcccacaacagtcccctcagtcatcccctcctcctgtgtcctcccacagtcccctcagtcacctcctcctcctgtgccgtcccccacagtcccctcagtcacctccttctcctgtgcctcccctccacagtcccctcagtcacctcctcctgtgtccttccacagtctcctctgtcacctcctcctcctgtgcctcccctccacagtcccctcagtcatcccctcctcctgtgtcctcccacagtcccctcagtcacctcctcctcctatgcctcccctccacagtcccctctgtcacctccttctcctgtgccctccccacagtctcctctgtcacctcctcctcctgtttccccctgcattccccctgtcacctcgttctcctgtgcctccccacccccacagtcccctcagtcacctctgcctcctgtgccccacccccacctcctgccactcaatgcccctccccacagaggagcagtcgccctcctgccagctcctcacggagcttcgaaacttcaccaaagggacctgttacctggaccaggtagaagtgagctactgcagtgggtactgcccatccagcacccatgtcatgccagaggtgagccagggacctgctgtccaggccaggggaatcacgttggccagtggccaccgagggctgccctgagcctgggacctgggcagaaccagagtccatgaggcacaaggtgcttctgatggagataacagtggagttggggaggcagatggtcagagctttccccaaggcagtggtgtgcacctgcaggttggcccagaggtttcactgggtgcctgaccccctcccacagaggtcttctgtggccccacaccattcccagagtgtgcccgctgtgcccttcaaggcaatgagccaggagcccagcaaagaaaggcatggaggagctaagctagcctctgacatcagaacccatcacacggtgcatgagagcatgagagctctgccggaatgcactttctacagagaggatcaccgcacacatttcctgcaagctgtccgagccaggctggctctgagtcttgggcaggtggctccgctctgcgtttgccctctgtggacccagaagcccctgatccttcttaggatcttccaaggggctctgtgcccaccctgactcccctcagcctgatgagctgtaacctgagctgcctcctgccagggtcctctctccagcttcactcacactactcctgcctgcccctaggcccacctcccagcactctgcggccatcccttctgcttcagcctacctggtttacctcatcctggaagacaaggatactttcctacctggtccccaaagacacagcccctcaaccctcggccgctctacggctcccccaggcgcgccctggacctcctggaaatactttcccaaatcactttcggaattttttttcacacttttagaatttttaaaacatagagtgagaaaagagagaaagtaattaagagatgcttttttttttttcctgaggaaagaaattgatagtgggatacaaattggagggaaattttttcgctgaaaaacctcttgcagtttttgaacctggcattgtatgaatgtactacccatttaaaagtaaaattataaatagaattatacataaaattaaatgatatgcttataggactctgatataggtgctttaaccacagtgcacagggatctgctttggagtgaaaactcactttgcacttgggatcagaactatgcagttagaactgacttatttgtagtttcatagattataactctgtctgtccaactagactctaagccccttgcggtagaagtatgtccttccccctgcagccaggaggcactgatgggaacgttaaaagtattcgtttaacctgtaggttgttggacattcagacagtgggggtgaaggaggtgggcttcttgcaaaaggggcttggcagtggcccagccaccctgctcagtgaagagggtgggatctggccctcccaccatcccaccctgcctaagatgggaaaggccaagggaggggaggaaactccatttggccctagttcacccgctccctctcgcccaggagccatacctgcagagccagtgtgactgctgcagctaccgtctagacccggagagccctgtgcggatcctgaacctgcgctgtctgggtggccacacagagcccgtggtgctgccggtcatccacagctgccagtgcagctcctgccagggtgggtctgggcagggaggggacggggcaggagcctgggcaaggacccagtgttgtgaaccagacccaggaacacacgtgtagctcctcactccatccttcttccttgagtccttccagtccacgtttttccttcttctcggtgttcttgttaatttcatctcctatcatgcatacttgtgggtgtctggggtagttgcacctagttcaaaccccagctcatctgtttcctttgtttccttgctcagcctccctgacatcatctttttttttttttttttttgtgatggggtctcactctgtcacccaggctggagtgcagtggtgtgatctcggctcactgcagcctggaactcctggtctcaggtgatccttccgcctcagcctcctgagtagccgggaccacaggtcacaggtgtgagccaccatgccgggctaatttttcttttccttttttttttttttttttttttctgtagggacggggtttcgccatgttgcccaggctgttcttgaactcctgggctcgagtgatccacctgcctcagcctcccaatgcgctggggttacaggcaggaaccactgcacccagccccctgacctcatcttttaagcaaggctgacattgctatgcaggcttgttgggtggacttggtgagggcacgcgtgtgaagtggctggcaggtgcctagttctgttaagcacctgccatatgataacctgaggtcccactgtgtggcagatgaaggggaaacagaggtggaaggcacccgtgccacctgggtggagcacagtggaaggcctggtgttggctctgggcgtcctcctggcaccagcctgaccactctgcctctcttactaacccatctctccctcacgtgtcccctgggaggtgacttctcaaagcgctaacaggctccgctgggtgagtccacagctgtccctcttgtgatcatgggactcagcagcactgaccacgtccttccacgctctctcacctgcccccaactgggggcccatgacttggcattagcatgttccaaataaagtgatactggcaacaaatccctgtgcagcgtctccatcctggggctcgagggaagagggagggagggcctgagtcctggcctggacccatgtgaggactttgtctcctggagacctctgcgcatctactatggactcaagatggcattccccatgactggtgaacctggacaaatcattcccatatctgagcctcagttccatctgtagctggacagggttgaatggagcctgaagacctcctgttattagacaccgctgtgtcccaggtcatattcctccacccaatatgatttcagctgcagctgtggaggacagtccgctacatgtgggctgatgtctgcttctccctctcctttttataacctcgttttttacaacactactctgcccacctcccaattgctttccttgttttattcaccccaaagtcctatcctaccctgtgaagccagagatagctagctagaagcacactattgagctaagtactggggacaaaaattaaaagaggcccactgtgctgcaaaagactagctcatcctgttccatgtctccatggtctccattcctcctcaggagaccaagcctccccgtttgtccctcaacatcaccacctctcatgccatcctcttgtaaatcccacagtctcacctgatcccccacaccgcctctccctcccagatacccactggggcctctgagactccacatctgtcttccgtagactctgctccatcgtccccatctccaaaggcttcttccaccttcatgtcatgactgacactagctcgcccatgccttgaaggcttcacttcacctggaagctgagacgtcatcccacctccaggccaggaaaagagatacttgtcttctgtgacgttcatgtttattgtttctgttgggccagttctccctgttcctcctgcaaagagccgtcttcccgggttgtctgagccactctgtagtgacaccaccctccctgactcccacctgccaccctggtcactccctatcatccacagaagaatttaactcatggcccagcattgctttccacccattttcagtgtccatgtggatactccactcaaaattctggcctcacattctttgcctgctcacttacaatgaccttcttcactctgtcttgggaatccactcccacgactagaccattttcaaaacctcgcaaatatttacttaccaatcatgacttcccatccctccagctgacttgctctaatactccactgctataatttatggctgcttttgtgatttcaatttcattgacccaccactttctcacttttttattagtttcctatcttccctcgtgacacagcttagattcatggtctatatagtgattctcaacaccaactgcacgtgagaagcacatgacatgaggagctcttaaaaaatatcaatgccagctgggcatggtggctcatgcctataatcccagcactttgggaggcgggttgatcacttgagcctggaagtttgagatcagcctgggcaacatagtgagaacccatctctacaaaaagtaaaaaaacagctagccaggcgtgatggcacactcctgtagtcctagctactcggaagggtgaggtgggaggataccttaagcccaggaggtcaagactgcagtcagccaagatcacgcaactgccctccagtctgggtgacagagtgagaccctgtctcttaaaaaacaaaaacaaacaaaaaaattaaacaaattaaaaaaatcagtgcccatgccccatcctaggcctattaaatcaggatgtttgaaaggtccatgggtgattccaatgtgcagctggaattgagaatcactttcctaccatcataattactcctgcaagtactgttcattcccttgcttttctgtgcctccttcatacctacctggcaatactccaagccaggatgaagccaaatatctacccaactttctgcttctaaacagaatttcgcagccaggctttttttaaactgaaatttgtgatcataaacttcaaattggcctttaattcaaggtttgaggtaagctctatttcccattctccaagatgacttggtataccttctattccccacttcattttcatgagatgatcttgtctcaaagagacatcatcggatggaaattccctcagtaaatctacaaacaaatgtacatctactccatcttcttcttccctcctggcataaccaaaagtgttgctatcccggccagacgcggtggttcaggcttgtaatcccagcactttgggaggccaatgcaggtgaatcacttgaggtcaggagttcgagaccagcctggccaacatggtgaaatcctgtctctactaaaaatacaaaaattagcagggtgtgatggtgcacgcctgtagtcccagctactcaggaggctgacacaggggaattgtttgaacctgggaggtggaggttgcagtgagccaagattgagccactgcactccagcctgggtgacagagagagactccatctcaaaaaaaaaaaaaaaaaaaaaagtgttcctatccctaggaagggccctcgataccctgttcctagaccctcctgatttctcaaggacttggttccttgcactatccccctttgaatcatcagtttccttcccatcaacacagaaacaagatcttgtgactcatatcttagtcctactgctttgattccccatttccccctagatactgctccatttttcttggaaagatggaaaaccttttatggaaaaatgtgtcaaaagaatgatttaccctagctgtcctccagttttttaacccctaaaagagaatctgttataaagacatggataactcatgggcagaaatatagctcttcaaggtagtgatatagtcgaggtggtgagtggcaggccacttggaatccacagagtcctcactctctgccttctcctccacatttcttgtgtctcattctttttttcagtaatgcagactcccctacactcctcgaacggaatttaggtctattcaaccttggccagaagagcagagctggataatggaaaacgcttacttgaagcctgtgtaacatggtgaaaccctgtctctactaaaaatacaaaaaaattagttgaccattgtcttaatctctatgtgcttctgtaacaaaatccctggaactaggtaatttataaattatggatacttatttcttatgattctggaggctgggaaatccaagatcaaagcaccagcagtgtctgtgtctggtgagagcctggtctctgcttccaggagggcacctttttgctctgtcctcacatggcagaaggcagaggggcagaagggcaaagggcctagctagttcccccagcacgcatgtggtcactaacaccttcatgaaggcacatccctgccctggccccctaaaagtcttttttttttttgagacatggtcttgctctgtcacccaggctggagtgcagaagcgccatcccggcttactgcagcctcgaccacccaggctcaagtgatccttccacctcacaaaattattttatttttatagagatgggatctctcactgtgttgcacaggctggtctcaaactactgggctcaagtgatcctcctgtctcagcctcccaaagagttgggattagaggtgtgagccaccgcacttggacaaaacttcttataaggacactaatcccaccataagggcctgaccctcacgacttcatctaaacctcccaaacgccccatctcctgggaggggaacaccggtcagtccattgcacctcctttacctggcagaccctacctcttgctttaattctgctgaggcatcacttccgcaggaaatccttgactaagcacctcatatcccccaccgcttcactctaaggtgacaacgcgggctttaattcatgttttgtgcttacctctttcatagcccttgtctctgttttgtaattatctgtttctggtctgattccctaatagatcgtgagttccttgaaggcaaggcctttgtctcattcaactgtgttctcccaaaccctagaacacggcctgacccatggtaggcaaccaatgatactttttgagtgaatagaacaaaaagtattgccctccttaataaaagaaaacctagaacttcaaggctgacattggccttcgcgtagcccaatcagagcgctttgcccttgctgcagaggactaaaggacgccacgccgccgttgcctagtaactgtcgccggagggaggcggggagggtcgcaagcgcgccgccggcgtccaatcaggacctgcgttccgggagccaatagcagcttcgagagccgctcacctagagcggactacacttcccgtcacgccccgccgcctggggctgggcagtgaccgtaaagctgttcgctcggtgcgacgcaagtctcagctcagcgcgcttatcctgggtccaccggcgctaccgccccccgacgtgagagagcgaagttcttgggccgcgctccctccctacctgggtgccctccccctccgggagcctgggtccccggggcggtcgcggcggctgcatcctcaggccaggccgcggggggagggggcggcacgggcctccgaaagcggggccatggagcccagagagtcggggaaggtaggactggaaggcccgggggccgcccgctccctcccgaggatccccgagccgggctcgggcgaggcggggcggctcgggcggaggccccgcagatgagccaggcttgcagggaaggactcgccggcccgccctctcttcccgcacttcggcgcccgaccccgggagggtggcggagaggagcggacgcttccgttcggtgtccgcgcatcctccccgagctgccgagcgtccgctgggtcgatgctgggttgggtgacccccgagtggagcgatgcgaaggtgcttcctgttttccccaccaccttcggcgttttgaagaggccctgctaaggcttggagtctggatcggacgccagtgggagctgcagggtgggacgcttgagggcttgaccctgcctagatcctccttaccaagaaagggctgaaaagagagggcatctggcatgctttttgccacttctgtttctaggttatgtacttcatggaatatctgggcattgcttagaaacctgtgtcataaattggctttgggcaagaggctttgagttggaagaaaaggtggaaagaaagtgcttgggggcggagttcagggatttgacgggattgccagcgcttccaggccgtgtcatccaagaccagtgtggttgtgggcacattagcttggagacagtggcagcctcttgggactaacatctttctggatgttgtttgctgccagttcttgagtattgtttcttatttggcacagaggagaattctctcaacaaacgttttcgactgtttattgagtcccttaaaaaactgtccatttaataaacatttgtgatctgtgatttgcattgaacgagatgctggaagtatgaggataaataggaaatgatcacctttctcaaggagctctcctgcagttttcacttcaataacttggacacgcctgaaagggttgtcccacacgaaaagagagaaaaggataatgaggttcttttgatgctgtagtttttcctgggaagactaggaaggactctgaatttcaaaagaggtgatttctcgcatgagcatctcttccatcctccctccctccacaagctacagtgatgcatgtagcagacacggcacctacagagtacgtggtccaagccaataaagctcaacaaaacccaagcaaagatggagcttatggcccttaccctttggaaatatccccagattggtttagattgaacctgaatttgaataaagagaagcaaaatgtagggggaagaaggattataaaatattgggattgatattggtatcagtgatttgaagttgatttccaagctattctgttcagtcagaggctttcttagcctttaacgggagaagagaaatacggtcatgcgctgtataacaaggtttccatcaacaccgctctcacgtacaatcccctgagactacagtggggctgagaaattcctatcacctggtgacatcttcatgatcctgaccctgtgtaggcttaggctaatgtgtgtgtttgtgtcttaggttttaagaaagcttaaaaagtaaaaaaaaaaaaaaaaaaaaaaaaaaaaaaaatttaaaaatacaaaacctcatagaattagaatataaagaaaaatactttttgttgatggaatggtttgctggaaaataaaaatacaaaaatatttaaagaaaaatattgtacaggtgtacaatgtgtgttaagctaagtgttattacaaaagagtcaaaagtttaaaaaattaagtttataaagtaaaacagttacaataagctagggttaatttattattgaagaaagaaaaatttttgataaattcggcgtagccttagtgtgcagtgtttataaagtctacagaagtgttcagtcatgtcctaggccttcacattctctcaccactcactcactcactcactcactcacccagagcaacttccagtcctgcaagctccattcatggtaagtgcccaatacagatggaccttttttttttttttgtcttttctaccatattcttactgtaccttttctatgtttagatacgcaaatacttaccatgtgttacagtggcctacagttttcagtacagtaacatactgtgtaggattgtagcctagggggcaaaaggctatataccatatagcctagatatgtagtaggctgtaccatgtagttttgtataagtacactctgtgatgttccacaatgacagaactgcctaaggacacatttcctagaacttatccctgttgttaagcaacacatgactgtacaaacattttgggaggtagaggagaaacctgattccgtgtcctgtccaaccactaagtgaaacctcagagactggaaatttcacccttgattataatcttgattttagggtatctcagaaaggtgctcacccttcccaaagatagttgttttctaatatgggaaatgagaacttcatacaagaatgaaataaagtaattacaaaaccaactgtcagtgtaagatgtgttgcaaatgagtgacaaggaatagcggtgctgttctacaactccactccgaacagcattcttatggctcagaactgggagactacctcgtgagatagtggtttggtctattactagactcttccttgggtgctgttttgtggtctttattaactgacagccatcttgggccattggattgatatcccacattgaatgtaggacatcttgcctgtcattgacagaataatggataagggtcagacttttccccatcatgttctatcccatgatcctgttttattttcttcctaacccttatcactaaataaaattctcatgttcatttatttatttacgtatttgttgacttgactcttacatccccagctagaacagtggagcagttcctggcatttaatagggtctcaggaaggaatgctcataaaatagcatcactacaggagcccttttgctgcaaggtgtgggtgctctgaagaacactgcagcccgccacctcatgtgcctcctaggagactgtgctgttggtgccccgaaagagaagtctatatgtgtacttgttgctgtatgtatttgttgcctcaacgtttctgtttcttggccctctctatctttcctgtacaagtgactgatactcctttctcatttttttctgaacatggttctattattgcacttatatcttagttgtctgccacctcctgatagattttaatctcatatctttgaattaccatgcatcaagcacatagaaacacttaagtaataaatgtgtgttgaatgaaaaaatgaattaaatgcctataaaatactttccatatagcatggttgtggggggaagggtggtgttgatgaaggaagttataaaatcaagcagcatagatttccttaacactggactccaggggggatataaagccttccttgctcaggagaaggataaatgcttgggccaggtggttaggaaatccttcctgaaagagaacgtgaatcgcgactttatgggtgggtagattctaagttggtgggaggaagtgtgcagtcaggatctaaagactgggaatgtagagagaggaaaggtgcgagataggctgggtgattaaaatgatatgaatctggctggaggagacattccaagcgaggcaatgcacagagctaaagttagaaagtgggttagattcagactgaggggactttggtgctagactgagaagtcagacagctttaccttgtagagagtgactgggaaccgctaaaatagaacatcgagagagattctttgcattacacataggtgaggagctcctcttattcacgcagatttgtgttttctttacattgcagtcacctggaatcagaaggctcttgctataatattgcttaagagagataccaggtgttagtgttatcactcttgttaggaagacactattatccaaatggacagtcctagccatgttcctcctcaggtggagctaacgtgatgggctccttggcccttatgctcacctgtgcatgcccgggaaggatgggcatgaagagggatcctggctgtcctgaatcacaagtgttttaacctgccccaatctggacaggctgccctcccgtcctgggatacagcagtcatcctgaatctgccttcagcctaatcttggggttgtcttcaatgcttccccacgttggctgtccctaggttgtatctcatggtgactcctgtttgaccactttctttgagtggagcttgtcttccaatcggtttttggaaatatttcattttgctttggaagccactcgagcaaacagttatttaaatgtacacatttggcagtacaattccatttttgtttttaaaactgttcatacatattcatagactaaagactgggaggttatataccaaatgttaacagattctcaggaaagaagggtaatgaaaagtaattatttttcaataaagggaatgtaggtgatcttaatacatttttttctgcttatttctattgtccaaattttctgcagtcaacatgagaaaaatctattataatagtgaccggtaagaatgattgatatcattttcctcaagaaatgtctactgttgaggttaaaatcgatattccacctattttaaatggcatgctgttatttcccaatgttatttttctttggagtgagaagtttgttttttgttgataatttgatttatttctttttaaaatttctttaactaggtaatgttttcatggcacaaaacttaaaatgataaacatttctacttctttttctgttgatttcttttataacactttgttgcgtggctgtggtaccttaaacctctttgatggtgtagcttgatgatagttttttttaagtttttttctccatgccttccctccattttcttagcaacctgccccccaaaccccaacacctcccatctattttggtctctatagtccctgttagatcctttccccgagtgtctggtagtccagtctgctgacatttagtggtggaagaccgaaaatgtaatagctctgtgcttgtgcgagggaggacgggcttatcagctggagcctcatgtaaaggaacctggggaggcatttgttggggcacagccctcccctagttcttgttccattgggctgcctgcccgccctcccatgctggaggtttccggtgctggaagatgccaagcctttgaggatgcagagtgtaccttgggtggttctccgctttgcccgctgccgggtgagggtttgattttcttggatctgctgaagtgactgcttttgcatctgcttcttggttttcaagagtgtattgctgtcatctccttgttgcgccccctattatagtgggggttttgttttggggagggggtcttttaaattcacggggaataaacaaaattaaatgggcttgtttaatctgccatcttaatctggaactcctccaaacactttctgaactccctacccctcagagcccctttacaagccacacgggatgtagatctcagccccaaagcattgcctgttttcatcatcgacttcattcacagacatagttctaaatgactttcagctatttctagaaattagacacatcttcctaagcgaaggtttaccatgtttaaggttccatgaaagaatgtgccctaagttgttgcccagcccctggctgagaagaaacgggcgtgtgggaggcgggtgaagagcacacagggaggggacggagaagctcctgagccagcctccttcatggctcagtttcatttcagtgcgtggcacttcccagaagaaacgagtctcgttgtcactgtgatctgtacccaggtggggagagatggggtgtgggccatgcatgtaaattgacaacacccctccccgtgtagggtgccctcaggtggtcaggaacacttttggaagataaatctaaggaagagagtggtacttagcagctgtcattttcctttcaggctcctgtgacgtttgatgacatcactgtgtacttactccaggaggaatgggtgctgctgagccagcaacagaaggagctctgtggttccaacaagctggtggcaccactgggtatgggtgcccatccacatccctgccactgtcaatttagatcggcattcccaacctcatctgcgtcaggaacactggagagagttttctggaatccaagcatttgtctaggcatctttactccacctgtctgctcgatcccgtatctaccttaattgcatgcaaattcacacatcaccctttctcttctccccttaaaatggtcaagagaagtggggcaatctggcaggcctgggctagactcctgggtctgtctcctggtgcctcagaatgccccaaggggccgggagggaaactcggaaactaggcctgtggatctgtggagcccgtaggacactggaggtaggaagcagtggtggcaagagcatcacatttgtgatgtggaaatctggtctcaatcccagctctccactggatacttgaatgcccttggcctttttaagcctgaatttccatcgtcttagagatgagtgagataaaacagtttaagagtttgcacaagtgtaggtattttcatctcatctatttttgaatgctctttcctttgattctttgggtagactttctgtgcgaaggacagaggtggttggttgtatttcaacatgtgtgtacacatatgcactgtttgctgattgcaagttgatgactgtctaccatgcctgtcttttcttatttcatcttggcccctgtgtaaggcacggtagaagcaacaatcagcattttatgggtggaaggattgcagctggggtgagtcttcctgtgccggctaaaagagtttgaaaaccactgattcttccaaacaagaagttgcaaaatagcagctcatgggccagatatggctcactgcttggagttttgttttgctttgttttttggctttcatttcttttgtttggcttcttaaaaatattaagtaaattgccaatatttagttattaggagttttcacataagaatatggatttctggcatctcttgacaaacgggatggtgtggcagggctgagcctgcatcctgagtggcagcccttctgcagctgagtagctgctgttcccttacgtcttgcaggttgccacagcccctgcacttggcctggtttcttctgttatattaccaggctggcccctctcagtatttgggtttctgacccatagtttgtatacctgtttagcctccttgtgccctcattcctttctcctagtctcctattctattaggggcctcacagataagagtttctaaaccactgaaccactgtgctgaaccaccaagactcctactttcctccttggccccttatctcaccatgccgagagatgtcgcagacagatacctccttcgtgttgtgacccggagccaggtcttcatagtgcttttctctctctctcgctctcttttttttttttggactcaggaccaactgttgccaatcctgagctgttccgcaagttcggacgagggccagagccatggcttggcagcgtccagggccagaggagccttctggagcatcacccaggtgagtgtggaactgcactcaggggcagatgcttggctggagagggagcatgggcagccccaggactccaggctcatcctctgcccttcctgttctccaccaactgacactgctgttctcctcccaggtgccatctgattaatacctaaatatacacactgcccctaatgtccttctccaacctctcatctcccattgtcttatttctacccaggagaatatgtttatttataattattataagttccatgaaggcatgactttgtcttatttacaaccatatttctagtgcttagaacaatacctggcacccagctgttgcacagtagataatcactgaatgaatgaatgaatgaatgaacagctgtctgctaagttctagggatttatcttttctttcctcttttgataagaccctcctgttcaggggttggcttagccaggccagatgacatcttggcattacgtaaaataactgcgttaacccagcccctactgtgggagaagagggaggtggggaacaagatcctgtatgaatcaaatcacagaagtttgttttcccttgtgatttctctcagaccacaaagagctctagacagctttgtgactctggaaagtatcatagagacaaatttgtttcatttccccttgcttggctcttattttgagccttctgactcttactaacagcttcatgcccttacagtgttgtagaccagtctgttggcctggcacaaaaatgttgcgtcctcagccactgggcattggaacttatgttggtacataagaagtggttccacaggagttagagtcttttgagttgcatttcatctaagtgaataaagaaacttctagttcagcttgaagaagaaagatgtgaggtcatgagagtcctcatctgttcgaaggtttatgttataagagaggaattagacttgagtttctcttgagaactgggtcagcatccagtactttgaggtagaagtattcgaagatagattacagcttaaggaaaactacctggggaccaaaactgcctgcccaggagataggtagctttcttcccctggagttgcggtgtgtggctttagtgatcttttttaaatcctatattctattatgtcagtgttcttatccataaataaattttgactcctgaagattgtacgtttcatagatcagattgcaaagacttccttttggccggttgtatctgtcctttaaattcaaaaaacaaaaaggagggggagggttccgtaaagcccatccctttggctttattctggataggtgagggaagggcctgcagacttggccaggactagaagaaaattcaggtgtgtgtgtgtgtgtgtgtgtgtgtgtgtgtgtgtgtgtgctttccgtctttcatatttggtgtacctcagagcccctgtgagttgcagtggctctaactataggattttaaagccaatcccttctgtctcttctctaaaggaaaaaaacagatgggctacatgggagaaatggaggtgcaaggtcccaccagggagagtggacagtccctcccgcctcagaagaaagcctacctttcccacctcagtacaggcagtggacacatcgagggagactgggccggaagaaacaggaaacttctgaagccccggtccatccagaagtcgtggtttgtgcagtttccgtggctgatcatgaatgaggagcagacggctctgttctgctctgcttgccgagaatacccctccatcagggacaaacggtcaagactaatagaaggttatacaggaccattcaaggtggagactctcaaataccacgcgaagagcaaggcccacatgttctgtgtcaatgccttggcagcgagggaccccatctgggcagcccggttccggagcatcagagacccacctggagatgttctggccagcccggagccgctcttcactgcagattgccccatattctaccccccagggcctctgggaggatttgatagcatggctgagctcctgccaagttcaagagctgaactagaggaccctgggggggatggagcaattcctgcaatgtatctagactgcatttcagatttgaggcaaaaagaaatcactgatggcatccacagctcctcagacattaatattttatataatgatgcagtagaatcctgcattcaggtaatacgtttataatgattgctgtatcttacagagaaggattctatactgagaacgatgtatatccatgctgatgatggaaaaaagaatactagtgataacccactgctaacatcataatgttggcatataccaacatgcttatcatggactaggcattgttttagacgcgttccatgtattatctcatttaatttggacaacaaccctattatcatctcctttttgcaaataacgtaattagtgagatagaacatttctacttctggtataaaggaaacaatcatctttattcagaatccaaaataaacacagatctcaagaaatagcctacaaccacaaaatcacagagctcttaagtagtcaatatttaaatttgttttgtttaagagacagggtatggccctgtcacccaggctggactgtggtgtgatcatagctcactgcagcctttacctccaaggctcaagcaatccttcccactcagcctcccaagtagctgggaccacaggtgtgtgcccccacacctggataattttttatttttcgtagagatgggaatctcactatattgcccaggctggtcttgaactcctggactcaaccagtcctcctacctcatcctcccaaaatgctaggattacaggtatgatctaccactcctggctagtattttttaaattttaagtttggagtcatgttgcacttgtaaacattgcagttttttcacacatgttgtttgatgtaatgtttctgatgttgctgtgaggccggtagagcaggtgctattaaactcatcttgttggaagaacacagactttggaggaagtgacatgtccagggtcctagagctcttgtagtcagtgccagaatctgcccagagtcctgagctgccagcccatgctttccttccactccccgcagcactgctgggcactaaagtactctagcgcccaccttaggtttcctttgtagttaccgaatgctttggaaagttgtcctgtaaggaaactacgttcattggaagcttccccatttctcacctattgcatagaagtagaattttacaacaaatcatttttaactcccctccaggagtctggtgagaatagctcggaggttcctcctagagctgacatcataaggaatccagttcaacttcgtaaactctcatttttccaaaatccagaaaaacagcatagctcatttcttttcctgttcctgatattttttagtattagaagctaatgaaccgatgtaaccttttatcatctgaattcagcagtgaggcgtgtgtaaaccagtcactggtcataagcatctttagcttttttgaccacctctttgttcccatcccattgggaaatcttaggtgctcctagaggcacacagtcaccttttagttgtaggtgaccaggaggcagctctcaggactctgaggacagcatgcagtgagaggctctgcccagctgcctgttctttccacacgctttcatttccgcccaggagatcctaggatctgaccaagtctcacttggcttttacctactaattctggcctcctgaatttgattctttgactttcagtggataaattaattcctctgagtgcatctgggcctcttggtgagcttcccaggagaaatagggcttccaaaggccccagaagtgtcacgtgggagtctggctcggcaggcggtgctgagtggccgctgctctttgttccaggacccttctgcagaggggctgtcggaggaggttcctgtggtgtttgaggagctgccggtggtgttcgaggatgtggcagtgtatttcacccgggaggagtggggcatgctagacaagcggcagaaggagctgtacagagacgtgatgcggatgaactacgagctgttggcatccttgggtaaagacgcaccgagcctcttattcaccaccctcctttgacttgggaagcccacaaggggagctgtggcttgtggttatcttcccattcctgccccctccctgtgtgtaggcagagaccgatcctgtcttttgcacctcataactcccctgcttggggtaactgtgctttatcaccttctcatccacccacctgttcatccattcgtcccccaccaaacattttggagtacctactatgtgccagatgaacacagctgatccatggtctctgctttcaagggcctagcacgtttgtgggagagacagacattttaataagaaactataaaataatacagtctcccataaaagagcttccagaagagtacccggggctactgaagaagagggatttgatttcctgggcattggtgggaggaatcaggaagcctttatagagtaggaaatgttttaattgagttcaaaaccaggtggatcagaaggaggaagggcattgagccatgatggaggggacggcctggcagagccacccctatctgtgcagcccagggctaaggctcctgcatcctggccaggcgccggcaagggttggcagccttcagcacgggagtcatggggtttggaccttggcagattaggaagagggcagtgcttcttgctcctcaggatggtgctctcctctcctgcatctgctgttttatcttctctttgcctctttctggcagattagcaaggttcttatgaagcatcaagatggaaagacaactttttttgttggagacagtctcactctgtcgcccaagctggagtgcagtggcgtgatcttggttcactgcaacctctgcctcccaggctaatttttgttttttgagtagagacggggtttcaccatgttggccaggctggtgtcgaactcctgacctcaggtgatccacctgccttggcctctcaaagtgctaggattacaggtatgagccagcacacctggccaacatgtttttgtcattgttcgtaatttttaaatggcttcccaaacattcagaagtgactaaaattatttattttgtggtgacagaggttttgttgtcatgccctaggttaggtgtatcccctcagagtatcactgcccgtgctgtgctgaagagcagtgagagtgagggcgaaattcacacctgtcttaaaaatgcataccctctgcaaaaagttgggttttcctttaatgtaatcggcactagcgactcagtttcactgtgaggcccccgggcgattgtgaaggtaccaggcgatggtgttgctggcccagggcagcttctgcagcagtgcagggagggctggccaggattgtttagcctgtgcctgtttcctcacgttttgtgtgttgacagagcatgatctaaacattttatcagtttctttttcatttacgtaaattaggcagtagggaaatctcagctaactaaggtctttaaattttatttggatgaacaaaaaatgtaatcagagggaagggaactcattttcctcgagggtcagaggcaggaatcagaaaggctttctagggggtgggcctggcctctccggttgtctgtgaaattgagacaggtatgggagtctagaaacggagttgcatgtgtgtgattcctttcagttactttaattggatctctggttatccttgaactatccccgaatttaaacagttcttcatgtttgagatatagaagcatcttaaggagcctggggactatgggcagggcctggcataagctatttgtatgtttaaaagtggtatataatagtattaaattgggatataaagtagtgttaaaacatagtggagattctttaattgttattattatttttactttggcttgtttttttttttatttcccacactttaccctccataacaaatgctctaagagttgaaaaccaaatattattttgcattatcttttaatacacaaaacaacttcttggggtgaactcagttttgtgtgtgtgtgtgtgtgtgtgtgtgtgtgtgtgtgagagagagagagagagacaggctgtcactctgtcacccaggctggagtgcagtggtgccatcatagctcactgtaaccttgaactcctgggctcaagcaatcctcctgccttagcctcccaagtagctgggactacaggcgcatgccacaacacctggctaatgtttaaatttttttgtagagatggagtctcactttgctgcccaggctggtctcaaactgctggactcaagtgatcctgctgacttagcccccaaagtgttggattacggcgtgagccactgcacctggcttgccatatctgatgaagtctgttgcttcttcccaaaaagcagccagaaatctcaattacatcccactgttaagaaactaatatttgtcattaatggaaatagacaggccaacatagggactatgtgggtagcccttgcttttatttgtaaaggtgtcatcgtatgctgagtggccactcactgcaggcgggcagtttcttgtccacaggagaagtcggtaactacagccaggccttacagagctgggggaaggcgttgtgtcactcatggaaaacaacactgagtgggagggccctaaagaagatgagcaggggagttcgagtcccccagcttctccacggcaggacatgtgatgatggcctccaagtgggggcagccggagctagagaaagaagaaccaaggtgaggggctagagtggcatctatttatttgtttgtttgagatggggtctctctatattgcccagtcaggactgaaactcccgggcccaggcgatcctcctgcctccatctccggagtatctgggattacaggcacacgcactgcacctggctagagtggcttttgcagaatggattcatgggatagggcctgctggcccttggtgaagttagcctggaaggatgaggagtcctttgtaggccaaaccattgttatggactgttatggaatgtgggtgtttgtgggtgtgtgcacgcactcgccacagttatgtgccctccttctttttccattactaagtcatagaaaacgctgaaaattcccctccatttcatttgtttggaagggaacaaaaagaagaggttttgataagatgtaggctgcagcttcagagaggtaccatcagggtacggtattcctggggccagggtagtggcgccagcggcagtcaaaggtggacagtacccaaaaggaatataaatggaggcaaacagatttgggaacatttggtccctgtttgttttcaattattctttaaaaatatttctgccgggtgcggtggctcacgcctgtaatcccagcactttgggagactgaggcaggtggatcacctgaggtcgggagttcgagaccagcctggccaacatggcgagaccccatctctactaaaaatacaaaaattagccgagcgtagtggcacacacccttagttccagctactcgggaggctgaggcaggagaatcgcttgaacctgggaggtggaggttgcagtgagccaagatcgtgccactgtactccagcctgggcgacagagccagactccatctcaaaaaaaaaaaaaaaagaaaaatgacagtcccctgtcccacctttctcttttacaaagtcctgttccccagaatcttgtagctgtttcttccagtaatttgccgcattatttctaaataacgtatgtggacattatcttaggagggacggactccagcaggacgcgcttataaaacaattgcatcctcccgttcaccgctgagcgtgtcagctctgggggccttttctttctcaccctctgggttaaatctaggcagggcctggaactttttcttatcacactcaaataacatgaaatcttcctgttctaatttcagtgagtgcaatgcctggtacaaaactcttcaaaagtgtcccgatcaaaaaaaagacagagaaaggctggcaaactacctcaattaaaggagactgaagaggtgtgacaacttgagtgcatgatgctaggacagatgctgggctatagagacattttggggacaagtgaagaaatttagtatgaacttagattagataatagtatgatatcagggttgagtttcctggttttgatcattataactctggttatattataactttgctttctgctgccccatttcaaaggactgcagactcatgtattatctcacaactctgcaggtggggagtccaggtgggcctgatcaggttctctgcttagagtcttagcccaaaccaaggggccggccaggcaggctcctgtctggaggctctgagctcacttatgctgttgccagaatctagctccttgcggttctcctgctgcctgccagcggggagcactttcagcccaggagctgctctcaggtgcttccctgtggccccctccgtgctcaggccggcagcagtgtttggaatcgtcacgtgccctgaagctctgacttcctgggctgctgccagctgagaacagcaccagcttttaaagagctgtgtaattaggtcggctccactggctaatctccctttgctgtgcaaggtaacgtgatgacagtgtgacctctcatcctgttcagagtcccctaacctcaaggggtaaaggttaggccagggtgagggccctggagcccatgttcgaatcccacctactacctatgaaagggtccttttttgttgggtaatacacatgaagtatttaggaataaagggacatgcaaacaatttactctcaaatggttcagaaaaatattgtagctatacgtatagacccagcaggagagcgtgcctgtgagctcacaagcatgctggaacacatggggcagaatgtcaatgattggagttccttgtgttattcaatcttttctgtaaatttgaaattatatcagagatttaccaaaaggaaaatgtaggaaacaaaagccccgtctctgtgtagtagtagaaaatctggacttcatttaacactcaattcttgcctttccctcctcaacctgctgcggctgtagaatctggacccatgccataggaagaaaggggctcctcttctcccaccccctgctggtttcagaatttctgactcatcctcagtgggaatggcgttggtgggtgggagaggtataagaaaggtttcatttgacatgtaatctgacaccagctacttagagctgtagtcctttaaagctggttctcttctttgggtgtttgtgggttctgcagtacccccaacaggcactgagaccctctcgcttgcagttgcctggacatgggtgaatgtctgccctggcagcctgtctatataggcgccttcacaggggagtatcacactggtagccaaccgtcacgggcaggccccacagacaacgccaggcctcttctcattccccatgtggcccacatctgaaccatagaagcacttccagaccctgtgctctcccagacctgggattgtaggcctttctcgacatggccacctccaaggcaccccatggctaccttagtcttatccaaggctggactcgtggccattcacggctcccagagatacaggtcaggttaagggaaagggcgcacccaccactccccacagtcagagaggctcacaatatccttgacaatgctttccagaaacatccctggtgcccaacttcctggctccttcagtctcagctctgtgactcctctcgatgggcgcaggctggagccacagcccctggccctcagccattctctttccaggtcatgtgtccgtgtctggctttggaatgaggaagagctggctcctgctctgggggctttcagccggagcaggcagccggaatcacactttcatatcctgtggcttatgtttattgtattcctgatttattgattttagatattctctattgattcctactgtggaagatggagatacggccctgttacatcacctgggcccccgcttctcttccctccatcctctcagaacaggtacatcacactttgttggttacattggtataaattatttgcccagttatgattatgtgtgatttactgctgaacaaggtggtgtattgtgatggtgttgccttcattgtcggactcttccccctcgaattggaaaattttttcttctttttcatttttctcactttctttaccctcatcagttcttcccagactgtccagtggaattataaaactcctccgaagagtcttttccacgtgacgggacatcctgtgatctctccatttcattctttctctggagacttcgctccggggccttctcctcccctgctctgtctgacccaggcagctgttaggcctgcggcacacctgtggtctgagatgtgcctttgtctctcccccatttcccgagtctgtctcttcttttgtggttgacgtcttcatcttcttagtgtacatcctccagtggcttcctaaggaagggtgcaggggaggccttctttctgtgacgcatcctgtctaaaaacatcatattcttccctcatgattcagtgataacttgtttgggcatataggattctaggttggaaatacttttcctcagcattttgaaagcattgcccttttaggttttactggtgctattgagaggtctagtgccttcttattccagaatctttgaacatgacatatttgttctactctgaaagcttttgaaattgatttcaattttctcaaatttttaatgatatgccttgatgttttatataaagtgtgtttttaatctttttttttgggtatctggtgtttcccttccatgtggaaactggtctttccctgtttgggaaaattttcttgtatgatttcttcctattttctcttttctttcttccagaaattccttcctattagtttgatattggacttcctggattgagtctctggttttctgtttgtgtctttttctcctattttctgcttttatcttttttatactactttcttggacatttcctccattttattttctaacaatgctattttttttattctattgggttttttagttgctaaacactgttatttcctctttcatgaatggctatcatgagttttctttctaggaatattaattctcattattttgaagttttgttttgcttcctgctgtatttcaagtttttccaaatcttttcctacttgttttggtttctctctttcatgttagaggcttttcttaaataattatctctcggttcattcctgtgtacgagtaagccttagaaacggactggaagccctgtgcatggctgcagacctgtgcatggctgggaagcatcaagagtaggtttcacttttcactgtaggatgaccagttcttcttactgaagaacccacaaaagtcagtgtccatagatcttttgaggggagagggaagggcaattccatttttccaaagaaaacgcttcccgtctcctgtttggagggtatgataagcccagccaacattcttggagtcgagcagtgcaccccttggtccatagacatgactcgatctccctgctttcagtaccgcaccaccccttcacctttctgtgtacgtggtatatggggtctggagcctttctggataagtttttctgtaggccaaacctctgttctcctctggggtgtggtggtggtgtttcctggtttcccggaataggtgagaggacctgggattgatcagatctctgtcagatttgagccagtccactgctcccacccattccccatccaccacgttctcccatacctgttgcctgcagtttctgaatctttctgggattctctggtaccaaccagcttgcttctccttgttaacccctctgcaggcatttggtgttcagctctgtttgtttctctttcttttgtctccttcccttccaaaaatggacttgcattcctaatccaatttatcttgggcttatacctcattttgttatttttattcctttgccctcattttagagatattttaagaaggatatatgttcaatttaacacactttagtaatttacttatttatatttttattagtagtaaatatgtagatattgacacacacatatatgtatcattatatatataagtatattcaagcgatccaaagatgagtagtggaaaccaatctcccttttcctttgtccttcacttcctccccaggagcacccacaggcccagttgcttgtgtggctctccacagaaagtttatgcacacattcacatagacacacacaaaagcatgatgtagatagtgatggattttattttcaatagaggaaatggtttatctgcatacccctgaacaatattcctattttaagtaaaggttagtgcttaatccaaagacacaaatctcctttagtcagatttcaggctccattgcaggtggtaggtatttcagggggccctccaagtgcccctttcaaaaacccatgtagttggtcaccttcacaaaggccagctgtgggggcagaggggcacacgcatgggccagctgtgggggcagaggggcacacgcatgggccagctgtgggggcagaggggcacacgcgtgggccagctgtgggggcagaggggcacacgcgtgggccagctgtgggggcagaggggcacacgcgtgggccagctgtgggggcagaggggcacacgcgtgggccagctgtgggggcagaggggcacacgcgtgggccagctgtgggtggcaccttccacttctcatatggctgctgtttccccctgcctctctctcctgcttagtccctatgtttcttcctgtttccacccttccccctctggtgtgtatggctggcccatggatctgaggaagccctatcctagctgagggctgcccctccccttactgcctctttggcactctgggtttgcgctcagcctgcccctggccgactagactttataaggacagaacccagagacacctctgtgtacttcagggactgggtctagcttgagggggctactcgatttggccacagcagtgacatcagcatgattcttcatccttacaacaggacctgccgctgccaagccagacttgatctccaaactggagcggagggctgcaccctggatcaaggacccaaatgggccaaagtgggggaaaggtcgtcctccaggtgagtgtaaacctacagcattctgaaggacatgtgccagggcccaggcggctatgatgagtcaaacagcatgagctcagctgtgctcatctgatgggggccgattgggcaccaagcctggcaggaggccctgggtagacaagatgaataagcaactaaccctgcccacagagtgtagagtagtctgggaaacagggaaaaaacaggtccttttgtaagcagaagtactgatggaggctgtggcagagctggtgggagcaggtacgtggggacactggtctcgaggagccaggggacccagagatctgtgagcctctcatcccttctccctccttctccagtgctcggtgacagcactattggtttgtgagaattcgttgtcttgcctatctcaatcagtaatttcttggcttgtagttgctacacttacttctgtacctacttccttctgaggcttgtaaaagccttggcaggtgtttaacctattctattgtggagcctcacacgagagtgaaagccacctgcttatccaacagtctctgtggccaagggggttaattgaacttattggtatctggtgtcacatgatcccagggtagctgtgtggatagggtggttggggcgctggtgaaagaacccacaaggattagcaacaactctgggggagccagatgaactttcacagatgagaatgggtgagggtttaagtggacgccactttctctagaaagaaggattgcattcatcttctctgccttgcttaagggatacttattaaatttgggggtgtcttagctgatagaagatggcagagttctgggtagcagaaccaagcatgattcaattttctccaaagggaacaagaagatggtggcagtgagagaggcagacacacaggcctcggctgcagactccgcgttgcttccaggctctcccgtggaggcccgtgcctcctgctgcagttccagcatttgtgaggaaggagatggacctaggagaatcaagaggacatacaggccccgttccattcagaggtcatggtttgggcagttcccatggttagtaattgaccccaaagagaccaaactcttctgctcagcctgcatagaaagacctaatctccatgataaatcatctcggttagtcagaggttacacggggccttttaaagtggagactttaaaataccatgaagtcagcaaagcgcacaggctctgtgtcaacacggttgaaatcaaggaagacacccctcacactgccctcgttccagagatctccagcgacctcatggccaacatggagcactttttcaatgccgcctactccattgcataccactcaaggcccctgaatgactttgagaagatcctgcagctcctccaaagcacggggaccgtgatattaggcaagtaccgcaatcgcacggcgtgcactcagttcatcaagtacatctcagagaccctgaagagggagatcctggaggacgtgcggaactcgccctgtgtgagcgtgctgctggacagctccaccgacgcctccgagcaggcctgcgtggggatttacatccgctacttcaagcagatggaggtgaaagagtcctacatcactctggcccctctctacagtgagacagcagatgggtacttcgagaccatcgtttctgccctggatgagctggacatccccttccggaagcctggctgggtggtggggctggggacggatggctcagccatgttgagctgcagaggaggccttgtggaaaagttccaggaggtcatcccgcagctgctgcctgtccactgcgtggcccaccggctgcacctggctgtggtggacgcctgcgggagcatcgatctggtgaagaagtgtgaccggcacatccgcaccgtcttcaagttttatcagtcctcaaacaagaggctgaacgagctgcaggaaggtgcggcgcctctggagcaggagatcatccgcctgaaggatctgaatgcggtccgctgggtggccagcaggaggcgcacgctgcacgcgctgctcgtgagctggcccgccctggccaggcacctccagagggtggcagaggctgggggccagattgggcaccgggccaaagggatgctgaagctcatgcgcggcttccactttgtcaagttctgccacttcctgttggacttcctgagcatctacaggcctctgtccgaggtgtgccagaaggagatcgtgctgattacagaggtgaacgccacgctgggccgcgcctacgtggcactggagagcctccgtcaccaggcagggcccaaagaggaagaattcaacgccagcttcaaggatgggcggctccacggcatctgcttggacaaactggaggtagcggaacagcggttccaggcggatagggagaggacagtcctgacggggattgagtacctccagcagaggtttgacgcagaccgacccccacagctgaagaacatggaggtgtttgacaccatggcctggccaagtgggattgaacttgccagttttgggaatgatgacattctcaacctggccaggtatttcgagtgctccctcccaacaggatacagtgaggaagctctgctggaggagtggctgggcctgaaaaccattgcccagcacctcccgttctccatgctctgcaaaaacgccctggcccagcactgccgcttccccctgctaagcaagctcatggccgtggtggtctgtgtgcccatctccacctcttgctgtgagcgggggttcaaggccatgaaccgaatcaggaccgatgagaggaccaagctctccaacgaggtgctcaacatgctcatgatgacagctgtgaacggcgtggccgtcacggagtacgacccccagcccgccatccagcactggtacctgacctcctcaggccggcgtttcagccatgtctacacctgtgcccaggtgccagcccgctcccctgcaagtaagtacacgtggcagagctcccccaaggcagcctcatgctgagccagaggccaataagacaggactgcaggtgcctgtggagcttctgtcatgcacccacccatttgctaggccagtgggtactcgatgcgtgacatccaccctccaggagcttgcacccctgccagggagatgacgcacatgtgctctaggcagcagggcttagtgcagagagcgtgcatttctagagcctgtctgccctggtgacagtgctgtgctggctctgcccccaactggctgtgtggccttgggcaagtctgtcctttgatgccttggtttctcatctgccgaatgagttgtgtgtggaaaacactcaggacaatgcctggcaggtggtgcaaatggtactagttaaaggtcaagaccactgctgggagtaaggagagggctgaccagccccaggcagcgccatcacattctaagtggggctgtatagactctggaccgtgcaggaattttcaagagggaagaggtccatgtggctgtggaggaggtgagatgcggaggagatggtggggctttcaggcagaaatctcacggggcaggggagaacagaaacagcctctctggaccggagggctggggtcaagaacttgcttgagggggaagctgtattagaagggagggcaagttactgaaagccacagacaggaaatttttctcttcaagtagtcactgaaaaccaaagaaaatatgcccattgttggggttctccagaccactcgcgaccacttgacaaggatggagcagtgctctctctcctcgcgtctctagctggcctccttccggctgttgctgctcccagtgctctctctcctcgcgtctctagctggcctccttccggctgttgctgctcccagttttcacctctgagtctgtggtcaccagaaatgggactggatctcatggctgacagaggctctgtaggaagcaaggtggccctgaagccacagtagggcaggtggggataagaaaagagacccctcactgataagagaaagggaaagccgagagagggctgggtgagttgctctgtgtccagccctgtgggtgctaaggagaaaaaaatgatgtcaggtgtgccctgatgcgagttactctttccacagggacaacaggaccagcacagattggtccaaacactgccaaactacgcaccgctgcctccttccaggcagggctctcagccttggcattgttgatgctggggctgggtaatctctgttgggggcccttcctgttcactgtgggaacttgagcagcatccatggcctctacctattagataaccactggataccagtagcacacaccccatttgtgaccacaaaaatcatctccagacattggcaaatggcccctgggggacaaaatcgcccccagttgagatcccctatctcaggataaaagaatgaacagagtagcaacagatgagggctgcaaagagcagtcgtggtcctgacttcagtctgttctgccaagctttcctcaccaaacagcccctgggcgaagctggatgtggaaggcggtcactgtcagtcagtctaattgtattctccttcctccctcacaggcgccaggctcaggaaggaggagatgggagccctctatgtggaggagcccaggacccagaagccacccatcctgccctccagggaagcagcggaggttctgaaggactgcatcatggagcctcccgagagactcctgtatccccacaccagccaggaggcccccgggatgtcctgagggacagggagtccttgggactgccttggagacgcctctgtgatcactgggacaggctctgcagattctaggctgccctaggatcttctgctggtggcgatggtctctaagcaccaggaagtgggcagtggcatcccagagcagcaggggtatcaggaggtgcatgacctgtttcctgaggccccactcagcacagccatgcctcacagcacacaaatgtgccagaaggttctatatctcaagttcatttttaaggtgctgcagaaaataaccccatcatgaaaggtttcagcccctgagttttggtggcaagaggagtgtcctggtaggggagactgttggacatccctggggaatgttccagggaggctgcccacagtctaagtgggaatgggaaagaccaccttgttagagggggaggttgcccctgctctagggacagctggcctggctgcaagagcccccagaggcattgttctgggacttcctaccctggctcccacagcagaagcagtgaggccgtggtctcgtgcggaactctacctcttcccagggcttcctttagggcgaaacaatcacaagccctttgcacagagcacccaagaaagttctcttcctgcagctccagatggtggagctgggctcttctggcagggggtctggtgcttcccggagagccgagccgcgtttaacccgtggcatgcccggcccggtttacccaggagaggatgggacgaagttggagttgggaggcttgggatgcagccccagctctgctgcaggcagtggtctgattaatcccttcctctttgtgcctcagtttccctctccatgaagtggcagcagagatccaagtgcctgctgactccccatctgccctaggattagtgaatgagagcctcgagctccctcaaagacctctggctgcagtgtggacttagctgccatctgccccatcctcgtccttagtgggacaggtaggaatttgtctccaaagtccttgttgtaggagttgctctctgaatgcaccatctgcacgacaggctagtccactcttctctgagctgccctggggactctgcaccaggatctccagggcccactgagacatccccgaatgggcgctcagtgacaagggctttgaacaacctcctccagggactttgggcctgctctagcttcagaaccacagaaccaccgccctagaggcacagaggggcttctggcactgctaggttcacaccctcctcgccccgatcttccttccacctaaagtgaagcacttttccttccaagggcagctccgtcttggcaggctcaggaggccgcttatcaggaggaggatgattttgtctaggttctgccttccttaaccatgggcaggaaatgaggcaagtcagcaggcagggtttctctgccctgcctgatacttgttttaaacaggcaggaagtgggcgccatccatcccagcttgcttgctgcctggctcaggcaggtcctgtgctgtgctgcaggcccctgtgggtgggccctttctccatagtctgccgcttcccattcccagggtagatgctggcatctgagcacctgagtacccttcctattcccagggtagaagctgctgtctgagtacccttcccattcccagggtagatgctggcatctgagcacctgagtacccttcctattcccagggtagaagctgctgtctgagtacccttcccattcccagggtagatgctggcgtccgagcccctccctggtaccgcaggtaccctggtaccccacctgccctttcatccccaccccagtacttagccttagcactgttgctttcgtgtcattttcagttctagtcaggaattcctttcttgctttctgcctttgacctgtggaaatgtctcccagccctgtgggtctggcggtcagagggaccccacaggcctgtggtgcgggagctctgggaggtgttactatctgcgtggctaaggcacacacaggcctccttctccccatcaccgtctccatgggcgttcaggaacttgcccaggtcaggcactgtggatgtgaactcgtggaaagggagggagaaaggcttttttaggtggggctatagcctctgccctacccacagggattccacatcaaggtgctgttccagcacacatgcttcctgcggcctcttcatccttgaagaatccctcagagcaggaggccatcctgtgagcagccgtgagtgggtctctgtgggagtagttctggagctgaggtggaagctaggggaagcaactcgccctctccacgtcagcatcagcgtgctccgaggacaccggccagtgccttccttaggtggtgggaaaggggggtccctgtgcagcggggccactgagaatgctgtttgtcataaaatttgcactacccgatttctcaaggggcacaggcctgctccgttcccctttgtcagccaatggccaagaaggaagaagatgactgccatcttattcctgaacttcctcattcaggacccccgtggaaacacagtgagcatccttatcagaggccctggcccaggctggcccctttgctttgtttggagaggctggctgagtttcagcccctagtgctggagacccccttgttggagaggcttcctgtttatgcctcacaagaagaaaaaccacagggctctgggaggggaagaagcatgcactcccgctttggctggagtcccagcgcttgtcgccaccctcctccttgcctgtagtcttgacagcatccgtatgtacgtgtcctggcatttcccctccctctccctgatgactgatacccaccgggtctgacattccaagtaaccagtatgtaactggtagtttgatcccaatagccatagcgactccaggtgggagtgagggagcccagccccctgtcctggaagataccttagagtatgtgaccgcgctccagacccttgcttctctctcctgcagaggatgagtttctagggtgctaagtacctatcagaacagtgtggaggggcgggtccctcatacaggtgtgtgcttagccaaatacagtaactgtgactggcccagggatgttctctcctctattttcaaagatgaaaggaggttttaaaaaccatgtttgattcctaaccttttgctacctgaataaagcagagtctatttcaacacatctctgtcttgtgtgtccctaagcgaggaccaggagctcagagaagctgacagaacgagctctgctctcactcacgaggggacagggccaggaacagaggtgggcaggggaagtgcctgtgtattcacctgatttttgtctttcagtttctttcctctctagtccttcaaagtgagctcaatcatttttgccagttagaaggtaaagatgagagttggctgtttggtgagttataattaagggcttggctgccttttctggagtactgcatagtttacaaagtgctttcacatacatgatctaatttggtttactgaacttagaaaggtagactttcaaggaaaaaacatcgatttccaccaatagtaaaagctactgcatcagacctgtcactcaacagcgctccttgaggcctagctcctgagatccctctggcgagcccttgcggctccacatcctcgggacggcacgctcccacgggactggagcaaaggtttcagagactcgggatacagccagatctcttcggtgaggagactcagtcttactcgagtgtatgtgatttttaaaaaagacattgaaacaactatggaaacagaggcaaaggcagcaaggctttgggtttgcgactgggaatccgtgcggcctccctttggtgaagacctgaccccgtggtgggggtgaacagggtttccttgaccccgtcccagggttcccttcaggacagatggatttcactaggggaagcgtgatgctggtagcctccactctcaggctgggcagggtaggctcccagggaggcagctcccagcgcagcctcttccatcactccggctggagctagaaggagagaagtgagctgaggctctagaaagtgctgcactcctgcctttctttttcccaagggtgctcttgacatctggagtgcagtcagcaggcctttccgagtgggctggctgcctcagatgcctcagtccctgttgctggggatgcttcggtggggcctcctcactgtgggccttctcttgggtcagtgtgatcctcgtgtcccttccctgtgccagcgacactcgtgggcttcacgtggctggcccctgctcccagggctcttgagatgctgcctctgactgcagctcctgccacactggcacctgtgtggccgctgctcccctctgcacctgggaatagctgcccagagacttcctgttttgaaccttttgccttgctcaggcagccagcaagggccctggcactcacaacagaagggccctgcagtgctgcggctctgctggcgggccaggacaagctgtggggcgcagacacactgggcacactccagacaggcacagggcctctgggcagtgagtttgcaagtgttttgtggtcctggatcatgcacaggcttcttggcagccaggagaggctgtctctgcatttagtgtgcacacctgaaagagcggcccctcacccactaggcagtgtcctcccacatccccaggagggtcttcctgtgccatctgaggtccacttagtggaaagcctttgccacaccaggacactttcaggactactcccccacgtggctgtgctcatggtggccagggctatatggctcttgaagctctccacacacttggcacagatggatggcttttccagtggaatcaaaaggactcaggcattctgaggccagtctggccttggggtttttcagcttcccagaagcctgcagaatcgttctggggggttcccagttgcctccagaatcatcttcagtcttgtttctgactgtgttaccaaatactgtggaagaaactcagatgttagcctagtgatggggacacacttcttttgttcagtgtgacctgctcagcctctagcccccagccccagcgagatgacggataaggcagcgtcctgtggatgccagagccggggccaagtgtgggtcagcatcccagctcagaggagcggcccagtttgtctgagaacactgaagtcccagagccctggggaggggcttctgaccagcactcctcctgctctcattccaacacacacaaagggaatgtcctggtccagggagccagggctctcttgctgccatgtgaataattccctgtagcagccactgctagacagcaagcttgggaagccttcttatgcagaaatcaaagtcatttttataaaaagtgtcacagagtcccttatgaagacagctggacagagcaggagccgacccttccctgactgcccagttcagtgagcccggtaaaatatctgccgtcagcagcctgccatgaggtgcagtgaggaccttctacttcatccctccaagctgagtcgtatcataaaatgcatactttatgttccttctgcctgtagagaatcagaaagcacatgatggaggtttcagaaaagggcttgtgagatcgagcatgtcagagctgaagatctgtgtctgtgagacatgtcctcctgaaagagcacacatgagctgacatagccacggcgccggattgccctcaccctgattgtcccatcagtgtagcttgtctcaagaggtttacactgtggctgtgtttctcacaggttacccaaactcctatcataaaggcaggaaacagaagtaaaaaacctgaatccaaaccacaggaagtgctgcggagatactgattcgtgggttgatcagagcccaggaggcactaaaggctcaatgaacatggtgatctttgtgcaagagatgttccatcaaggcttacctggctgggtggtagctttttggcctctgttgggggctgggaatccttcacccaaagctcatgttccctttcaagtctacaagtgatctctggtttggcagcagcatgcactgtagggagaaagacagcccagtgcccctcaacccacactgagcgcacatagacccgtgtcagtcctgaagcctgacttgcaccacccatttaatgccctgggctcaccctatcaatttgggacagcgggggtaggttgtaaacctaagagagctccagaagtaggcagggcctggcatacaggtagggatgtttatttcagggcaacttcaggagtgccaagggctgataaaacagtgcaattgtcataatatgttttcccactgccagggcccttgaaggagaaacaggctcaactagtcacagagacaaccatgctctgggtctagttctccctgaccccacaggccaggagtgcccctattagatggcaagcaagcaaggggccaaggtcctcacccagcaagactcccagctcctaattccttcttatcacatcctggtataattccttctactcatggccaccagaacaatgggtggaaggtaggtggttacatcattaaatgtcacaggccttatttgcaaagacagagacatctggagctgttgttctcacctccgacacgtgccccgtctgcagagagcattaggatgcatctgtggctctgaggtgtgatttcctagggccttcaagtgtcctggggctcctgttcatttgcactgggggacactcagggaagttttaaagagcctctttcagtggctccttctccttctaccctttctaggaattcatcagccccatgaaaagatgaacgatagagatgtcaccaacatcaggaccccactccctgggagatgtcatggaaacttgtcaatcacacccaaagcactcactgaggagccatggcagagcagtcggtggcgccaataccaaccagaagccgccagggcagaggggaaccgtgaagccagtggaatgcacagctccacctcaggggaccggggtaggcggggctgtgtctggtaacatgccctttgcctcacattagtgcctctgaaaatagtgtcctcagcctgggcacaaaccctaggggtgagctgggagtgtggaggagacgctggattagggagaagtctcggccatgtgttctggctcttttactgatgagctgtgtgggcctaggcaagttacttcacttctctgggcctcagttttatcacctgtaaagtgataggattgccttagcctctaagatccctttcagctaaaaacaaagttctagaaaataaatatgtggtactgtggaactctggggagctgtttgatcaggtgaacagtttacccatggaaatggggctccagcacaaagctgctcacatcttccagtcacgctccagggaacagccagggcttgtgggcccagatgaggctttagtggttggagaaggagccagttcctggttttaatcccttcatggacctcagaccatcacaaagctgccaaacaaatgacacaggcaatcacatgcaaattaggacagaaatgaaacatcaaagacattaaaggaaaagagtaagagctgcaggctgctaatatgagtggctgctcagactcagcaatgtttttggttctggccaaagccaagacaaaggagcagaggcaaagaaggaaatacatttcactttacagctgtcattttctacagaggatttttttttttccagaacaaaattcaaaaagtccgtcttttttgagctatagaactttcgtggtgattttttttttttttttttttttgagacggagtctcactctgtcccccaggctggagtgcaggggcacaatctcggctcactgcaagtgcaagctctgcctcccgggttcacgccattctcctttcagcctccaaagtagctaggactacaggtgcccgccaccatgcccagctaatttttttatatttttagtagagacggggtttcaccgtgttagccaggatggtctcgatctcctgacctcgtgatccgcccgcctctgcctcccatagtgctgggattacaggtgtgagccactgcgctcagccctcgtggtgattttttgaaggcctgtatggacatactcttaactctatctcctggatgccaagtgcacccttatcctaggccagtgttctcaacaatgtacacactctggatgagaaaaataaccattgtttacaatccagctaaaatctcacctcctccagggagtcttcctggatttctccaccctctgaattctcataatgggcatttggctactttgatcacagggctcttagaactgcgctgtccagcattatgattttaccagaatatatcactcctcaactactttagaaacccctcgaaggctaggatggtattttatacctaacagtttggtgtcatcccacgcccacctccaacttacatgaatgttggaaggatggatagggaggtttcaactagagaacggagaagggcggatgtaactggttcttgatttcagaaaacagccaggagcacacatggctgacggggtcagtgcaaggacaggcacatttcccttctgcatcacgtggggactgcgcctccctatgtcatgaagccagggaatatgtgtggccggccgcttggggtagcacttgttgctagagataccgcctggaggccactgatctgtaaaagggatctctacagaagatagggatttttgatcgccagagaagaagggatatgtgagatc

SEQ ID NO: 2129 - protein, 504 aa, Homo sapiens [sequence omitted]

SEQ ID NO: 2130 - DNA, 1931 bp, Homo sapiens
gcccaagagcgagcgcgcagcacgaagctcgagccgcctccgccgcgcgaccccacctcggccgccgccgcctgcgccgcgagatccgccccggcctccccgagagcgagccccggccgccgcgaccaccagccgcgctaaccgccgaccaaccgccaccgaggcgcctgagcgagagcagaggaggaggaggcatgagtgaggcgggcgaggccaccaccaccaccaccaccaccctcccgcaggctccgacggaggcggccgccgcggctccccaggaccccgcgcccaagagcccggtgggcagcggtgcgccccaggccgcggccccggcgcccgccgcccacgtcgcaggaaaccccggtggggacgcggcccccgcagccacgggcaccgcggccgccgcctctttagccgccgccgccggcagcgaagacgcggagaaaaaagttctcgccaccaaagtccttggcactgtcaaatggttcaacgtcagaaatggatatggatttataaatcgaaatgacaccaaagaagatgtatttgtacatcagactgccatcaagaagaataacccacggaaatatctgcgcagtgtaggagatggagaaactgtagagtttgatgtggttgaaggagagaagggtgcagaagctgccaatgtgactggcccggatggagttcctgtggaagggagtcgttacgctgcagatcggcgccgttacagacgtggctactatggaaggcgccgtggccctccccggaattacgctggggaggaggaggaggaagggagcggcagcagtgaaggatttgacccccctgccactgataggcagttctctggggcccggaatcagctgcgccgcccccagtatcgccctcagtaccggcagcggcggttcccgccttaccacgtgggacagacctttgaccgtcgctcacgggtcttaccccatcccaacagaatacaggctggtgagattggagagatgaaggatggagtcccagagggagcacaacttcagggaccggttcatcgaaatccaacttaccgcccaaggtaccgtagcaggggacctcctcgcccacgacctgccccagcagttggagaggctgaagataaagaaaatcagcaagccaccagtggtccaaaccagccgtctgttcgccgtggatatcggcgtccctacaattaccggcgtcgcccgcgtcctcctaacgctccttcacaagatggcaaagaggccaaggcaggtgaagcaccaactgagaaccctgctccacccacccagcagagcagtgctgagtaacaccaggctcctcaggcaccttcaccatcggcaggtgacctaaagaattaatgaccattcagaaataaagcaaaaagcaggccacaaccttaaccaacaccaaagaaacatccaagcaataaagtggaagactaaccaagatttggacattggaatgtttactgttattctttaagaaacatctacaaaaagaaaatgtcaacaaatttttccagcaagctgagaacctgggaattcctgcacggaagacaagagagtagcctctccagtttcagcaaccgctaggtttctattttttttcctggtttttactgttttggtaatatatatattgaaacaagaaatattaataccacatggggagaaccccaaccaaagaaatctgaaatatatagtaaatgcttttttttccgtttttgttcattttggatgctggtgctaaacctccaagtgtcatgatttaaaaaaaaaaaaaatttatgtccttcttatttatttctaggatgaggggaggataacatttttgctttcttatgtgactctctttgaaaatgtgcagtaagaaattcctcaaaaataaaatttttacccttcagaggaaaaaaaaaaaaaaaaaaa

SEQ ID NO: 2131 - protein, 372 aa, Homo sapiens
MSEAGEATTTTTTTLPQAPTEAAAAAPQDPAPKSPVGSGAPQAAAPAPAAHVAGNPGGDAAPAATGTAAAASLATAAGSEDAEKKVLATKVLGTVKWFNVRNGYGFINRNDTKEDVFVHQTAIKKNNPRKYLRSVGDGETVEFDVVEGEKGAEAANVTGPDGVPVEGSRYAADRRRYRRGYYGRRRGPPRNYAGEEEEEGSGSSEGFDPPATDRQFSGARNQLRRPQYRPQYRQRRFPPYHVGQTFDRRSRVLPHPNRIQAGEIGEMKDGVPEGAQLQGPVHRNPTYRPRYRSRGPPRPRPAPAVGEAEDKENQQATSGPNQPSVRRGYRRPYNYRRRPRPPNAPSQDGKEAKAGEAPTENPAPPTQQSSAE

SEQ ID NO: 2132 - DNA, 2211 bp, Homo sapiens
ttgggggtttattctcttcccttctaacttgacagggtcttgctctgtcattcaggcaagagtgcagtagtgtgatcacttcttactgccgcctcaagcttccagcctcaactcaagcaatcctcccacctcagccacccaagtggctgggactacagattaagaatgacccaaaataaattaaagctttgttccaaagccaatgtgtatactgaagtgcctgatggaggatggggctgggcggtagctgtttcatttttcttcgttgaagtcttcacctacggcatcatcaagacatttggtgtcttctttaatgacttaatggacagttttaatgaatccaatagcaggatctcatggataatctcaatctgtgtgtttgtcttaacattttcagctcccctcgccacagtcctgagcaatcgtttcggacaccgtctggtagtgatgttgggggggctacttgtcagcaccgggatggtggccgcctccttctcacaagaggtttctcatatgtacgtcgccatcggcatcatctctggtctgggatactgctttagttttctcccaactgtaaccatcctatcacaatattttggcaaaagacgttccatagtcactgcagttgcttccacaggagaatgtttcgctgtgtttgctttcgcaccagcaatcatggctctgaaggagcgcattggctggagatacagcctcctcttcgtgggcctactacagttaaacattgtcatcttcggagcactgctcagacccatcattatcagaggaccagcgtcaccgaaaatagtcatccaggaaaatcggaaagaagcgcagtatatgcttgaaaatgagaaaacacgaacctcaatagactccattgactcaggagtagaactaactacctcacctaaaaatgtgcctactcacactaacctggaactggagccgaaggccgacatgcagcaggtcctggtgaagaccagccccaggccaagcgaaaagaaagccccgctattagacttctccattttgaaagagaaaagttttatttgttatgcattatttggtctctttgcaacactgggattctttgcaccttccttgtacatcattcctctgggcattagtctgggcattgaccaggaccgcgctgcttttttattatctacgatggccattgcagaagttttcggaaggatcggagctggttttgtcctcaacagggagcccattcgtaagatttacattgagctcatctgcgtcatcttattgactgtgtctctgtttgcctttacttttgctactgaattctggggtctaatgtcatgcagcatattttttgggtttatggttggaacaataggaggactcacattccactgcttgctgaagatgatgtcgtgggcattgcagaagatgtcttctgcagctggggtctacatcttcattcagagcatagcaggactggctggaccgccccttgcaggtttgttggtggaccaaagtaagatctacagcagggccttctactcctgcgcagctggcatggccctggctgctgtgtgcctcgccctggtgagaccgtgtaagatgggactgtgccagcgtcatcactcaggtgaaacaaaggtagtgagccatcgtgggaagactttacaggacatacctgaagactttctggaaatggatcttgcaaaaaatgagcacagagttcacgtgcaaatggagccggtatgacacactttcttacaacaacagccactgtgttggctggagagggatggggtgggcccaacggggacacaaggaggcagaggagctaacccctctactccactttcaaaactacattttaaagggaatgtgtatgtgaagagcactaccaacatcgcttttgttttgttttgttttgttttaagctttttttttttgcttgtttttaaagccaaaacaaaaaacaaccaagcactcttccatatataaatctggctgtattcagtagcaatacaagagatatgtagaaagactctttggttcacattccgatattaaaatagtgacatgaactggcaaagtggttttaaaagctttcacgtgggataaatgattttctttttttcttttctttcttcctatggtcttgtctgaataaactactctcctgaataaaacaacatccaacccaggtcattgaaatgaaattggccagtc

SEQ ID NO: 2133 - protein, 523 aa, Homo sapiens
MTQNKLKLCSKANVYTEVPDGGWGWAVAVSFFFVEVFTYGIIKTFGVFFNDLMDSFNESNSRISWIISICVFVLTFSAPLATVLSNRFGHRLVVMLGGLLVSTGMVAASFSQEVSHMYVAIGIISGLGYCFSFLPTVTILSQYFGKRRSIVTAVASTGECFAVFAFAPAIMALKERIGWRYSLLFVGLLQLNIVIFGALLRPIIIRGPASPKIVIQENRKEAQYMLENEKTRTSIDSIDSGVELTTSPKNVPTHTNLELEPKADMQQVLVKTSPRPSEKKAPLLDFSILKEKSFICYALFGLFATLGFFAPSLYIIPLGISLGIDQDRAAFLLSTMAIAEVFGRIGAGFVLNREPIRKIYIELICVILLTVSLFAFTFATEFWGLMSCSIFFGFMVGTIGGLTFHCLLKMMSWALQKMSSAAGVYIFIQSIAGLAGPPLAGLLVDQSKIYSRAFYSCAAGMALAAVCLALVRPCKMGLCQRHHSGETKVVSHRGKTLQDIPEDFLEMDLAKNEHRVHVQMEPV

SEQ ID NO: 2134 - DNA, 5223 bp, Homo sapiens
gcagccgcagctcgggggcggtgcctgccttgcagcctcccctcggcgatcgcgcagccccatctttgtccggcctccgcgctttgttctcggcgcccgggccttggccagcctggccagccgccgagcagcccccacgccgcgctggcgtcgtcctcgcctccctcgccgccgccccccgcgcgcggccgggccttgccccccatggtgtcccggccagagcccgagggcgaggccatggacgccgagctggcggtagcgccgccgggctgctcgcacctgggcagcttcaaggtggacaactggaagcagaacctgcgggccatctaccagtgcttcgtgtggagcggcacggctgaggcccgcaagcgcaaggccaagtcctgtatctgccatgtctgtggcgtccacctcaacaggctgcattcctgcctctactgtgtcttcttcggctgtttcacaaagaagcatattcacgagcatgcgaaggcgaagcggcacaacctggccattgatctgatgtatggaggcatctactgttttctgtgccaggactacatctatgacaaagacatggaaataatcgccaaggaggagcagcgaaaagcttggaaaatgcaaggcgttggagagaagttttcaacttgggaaccaaccaaacgggagcttgaactgctgaagcacaacccgaaaaggagaaagatcacctcgaactgcaccataggtctgcgtgggctgatcaaccttgggaacacatgcttcatgaactgcatcgtgcaggccctgacccacacgccacttctgcgggacttcttcctgtctgacaggcaccgctgtgagatgcagagccccagctcctgtctggtctgtgagatgtcctcactgtttcaggagttttactctggacaccggtcccctcacatcccgtataagttgctgcacctggtgtggacccacgcgaggcacctagcaggctacgagcagcaggacgcccacgagttcctcatcgcggccctggacgtgctccaccgacactgcaaaggtgatgacaatgggaagaaggccaacaaccccaaccactgcaactgcatcatagaccagatcttcacaggcgggttgcagtcagacgtcacctgccaagtctgccatggagtctccaccaccatcgaccccttctgggacatcagcttggatctccccggctcttccaccccattctggcccctgagcccagggagcgagggcaacgtggtaaacggggaaagccacgtgtcgggaaccaccacgctcacggactgcctgcgacgattcaccagaccagagcacttgggcagcagcgccaagatcaagtgcagcggttgccatagctaccaggagtccacaaagcagctcactatgaagaaactgcccatcgtagcctgttttcatctcaaacgatttgaacactcagccaagctgcggcggaagatcaccacgtatgtgtccttccccctggagctggacatgacccctttcatggcctccagcaaagagagcaggatgaatggacagtaccagcagcccacggacagtctcaacaatgacaacaagtattccctgtttgctgttgttaaccatcaagggaccttggagagtggccactacaccagctttatccggcagcacaaagaccagtggttcaagtgtgacgatgccatcatcaccaaggccagcatcaaggacgtcctggacagcgaagggtacttgctgttctatcacaaacagttcctggaatacgagtagccttatctgcagctggtcagaaaaacaaaggcaatgcattggcaagcctcacaaagtgatcctccctggccccccccctcccccaagcctcccaccgcctccccggcctggtgacaccacctcccatgcagatgtggcccctctgcacctgggacccatcgggtcgggatggaccacacggacggggaggctcctggagctgctttgaagatggatgagatgaggggtgtgctctgggtgggaggagcagcgtacacccgtcaccagaacatctcttgtgtcatgacatgggggtgcaacgggggcctcacagcacagagtgaccgctgcctggcgttccccagcactcggtgtggaaaggcccctacctgctgtaagattatgggtccatgaaagcagtaagctggacacagaggtgtagtgtgcgggacagagggccttgcagatgcctttctgttggtgttttagtgttaaaatacggagagtatggaactcttcacctccattttctcagcggctgtgaagcagcctcctagcttcggaagtacggacactacgtcgcgttttcaagcgtgtctgttctgcaggtaacagcatcaagctgcacgtggaagcatctcgcggttttctagaaacaggcattttcttatccctctcccgctcctttttccacaaaggtgaatttcataaatgtaatactagtaaagtgaatgaattactgagtttatacagaaatttaggtaacttctcctttagtctcaagagcgagtcttgctttttaatgggtgccgtttatgttgctgcccgccctgtgtgcctggctcctctgggtgccttggtgtctgctggtggctggcagtgggcgcagcggaggagagttgtgctgcagctcatacggtgtgtctgtcatctcagtctggagtaaatgcagtgtctgccggtgtctgatgggttctgtccctcgtattttctttgccttctatcccattgcctggctaccgctgcctggcagccaagggtgttggtcgcgaagctggagtggcctctggtggagcctgcatcttgtctcgtctgcctctgctttacatttggtgtactttcgggcgtggtggcagtaaaatgacaccgtgattgagcttgtcagcagagctgaaagagaaagtagaaggatgtgcattgtttcttgtaagatatcttgcatgtatctgtgtattcaaattcaaacagagatggtttgtccatttgtccactgagaaattataaactagggacaagggggaggaaaagtactgaaatacagtttatgaagcaagtgtgtctcgggctgtgcttgtcccaggagccccagcagcatctgaactgaggcttcttcagtcctgcaggaacaggatcatctgtctcagcggtgggcagatgttttcatagacagccagggagtaaacactgttggctctgtgggctgtatggtctctgccataaatagtacagagatgtggctgtgtctagtacaacttttagacacagaaatctgaatgacatatattgttctgtgtcaagaaacttagattttttttttaactatttaaaaacgtgaaacctattcttagctcacaggccatggagaagctggtggggaccagacccagctccttagctggctgggctggggagggggcagtgacagtggcagctgctactcactgctcagtgtggaaaacacaggacttggcaatcacagcccgcagaaccatcatgtgtggcagaagcctgagggatgcggtttcttgcccacgtgctctgttcattttctgttgtttttctgcacttaaagaattcacatggaagcatgttttataaaatgaattaccagagaaacagagatgggccgagattctcagaaatggtcccatgtgaccaagttctgctgtttgggtgacagtgctttgaagatctcctttgaggatgtgcagtctttttttttttttttttttttttgagatggagtttgttgcccaggctggagtgagtggcacagtctcggctcactgcaacctccacctcctgggttcaagcagttctcgtgccgcagcctcccaagtagctgggactacaggcatgcgccaccacgccaggctaatttttgtatttttagtagagatggggtttcaccatgtctcaaactcctgacctcaggcgatccacccacctcagcgtcccaaagtgctgggattataggcgtgagccaccgcacctggcctatgagtggtcttttaattaggaacaaatctaatggaaaggagagttgactgaagttggcccacaggattgtgagctgggcagtgccttcatgaaggcttgccaccttgggacgccccagtttactggggtgtcttgcggagtgcagaaggctttctggcagctgcctgggtttggccagaccctgcctcccctcccgccggccaacccctagtccccttcctgtctccacttgcattcaggggtggctgctgttctgagaacattagaactgggaagagagatggagtcacatggatttttggtgggcattattctaaactttcgtatccaagttagtcccccttattccactgtggcattgccgttctaagcagttacctgatgcctgctgctgaagagctgctcacaggaggcggcggcggccctggcactgccccttgcattaggtcttgtgtttgatgtgttcttgtgaatttactttgtcagaacaaaatatttacgcgttgggttcaggaatttcttttagctccccatctggctgtgaaattcaggaaacctcccgttgcctagtaatcaccccatgtaggtgtacattgtgacaaagtgcatctgaccactaaggggcccccttggtgaccccagcacattcacagcagtgttaaaatggcctgcattttggagatgctggctggcctttcagtgcctcccaggaagacacatggcctttccctcttcagatgcctgaagggagtgctttgaggcaggtgatgtgctgggagtgtgggcggcctccctctggccccggggccctctgtggaccttggctccctccgtggacctgggcttcgtggtgagcactgcagcctccctgggcattccctccagcgccagcaccactgcaacatatagacctgagtgctattgtattttggcttggtgtgtatgctcttcattgtgtaaaattgctgttcttttgacaatttaagtgattgttttgtttactgtaagtttgaaaataaaaatgaagaaaaaaattccaatgactgtgctgtggttggagactttatttaccaagatgtttactcttcctttccccttccattttgaggagctgtgtcactcctcctcccccccagtgctttgtagtctctcctatgtcataataaagctacattttctctg

SEQ ID NO: 2135 - protein, 593 aa, Homo sapiens
AAAARGRCLPCSLPSAIAQPHLCPASALCSRRPGLGQPGQPPSSPHAALASSSPPSPPPPARGRALPPMVSRPEPEGEAMDAELAVAPPGCSHLGSFKVDNWKQNLRAIYQCFVWSGTAEARKRKAKSCICHVCGVHLNRLHSCLYCVFFGCFTKKHIHEHAKAKRHNLAIDLMYGGIYCFLCQDYIYDKDMEIIAKEEQRKAWKMQGVGEKFSTWEPTKRELELLKHNPKRRKITSNCTIGLRGLINLGNTCFMNCIVQALTHTPLLRDFFLSDRHRCEMQSPSSCLVCEMSSLFQEFYSGHRSPHIPYKLLHLVWTHARHLAGYEQQDAHEFLIAALDVLHRHCKGDDNGKKANNPNHCNCIIDQIFTGGLQSDVTCQVCHGVSTTIDPFWDISLDLPGSSTPFWPLSPGSEGNVVNGESHVSGTTTLTDCLRRFTRPEHLGSSAKIKCSGCHSYQESTKQLTMKKLPIVACFHLKRFEHSAKLRRKITTYVSFPLELDMTPFMASSKESRMNGQYQQPTDSLNNDNKYSLFAVVNHQGTLESGHYTSFIRQHKDQWFKCDDAIITKASIKDVLDSEGYLLFYHKQFLEYE

SEQ ID NO: 2136 - DNA, 1636 bp, Homo sapiens
ggcacgaggcttctgtgcgctcgggctcctggtcccggctccccggttaccggggcgcgagtatgaccacaatggcggccgccaccctgctgcgcgcgacgccccacttcagcggtctcgccgccggccggaccttcctgctgcagggtctgttgcggctgctgaaagccccggcattgcctctcttgtgccgcggcctggccgtggaggccaagaagacttacgtgcgcgacaagccacatgtgaatgtgggtaccatcggccatgtggaccacgggaagaccacgctgactgcagccatcacgaagattctagctgagggaggtggggctaagttcaagaagtacgaggagattgacaatgccccggaggagcgagctcggggtatcaccatcaatgcggctcatgtggagtatagcactgccgcccgccactacgcccacacagactgcccgggtcatgcagattatgttaagaatatgatcacaggcactgcacccctcgacggctgcatcctggtggtagcagccaatgacggccccatgccccagacccgagagcacttattactggccagacagattggggtggagcatgtggtggtgtatgtgaacaaggctgacgctgtccaggactctgagatggtggaactggtggaactggagatccgggagctgctcaccgagtttggctataaaggggaggagaccccagtcatcgtaggctctgctctctgtgcccttgagggtcgggaccctgagttaggcctgaagtctgtgcagaagctactggatgctgtggacacttacatcccagtgcccgcccgggacctggagaagcctttcctgctgcctgtggaggcggtgtactccgtccctggccgtggcaccgtggtgacaggtacactagagcgtggcattttaaagaagggagacgagtgtgagctcctaggacatagcaagaacatccgcactgtggtgacaggcattgagatgttccacaagagcctggagagggccgaggccggagataacctcggggccctggtccgaggcttgaagcgggaggacttgcggcggggcctggtcatggtcaagccaggttccatcaagccccaccagaaggtggaggcccaggtttacatcctcagcaaggaggaaggtggccgccacaagccctttgtgtcccacttcatgcctgtcatgttctccctgacttgggacatggcctgtcggattatcctgcccccagagaaggagcttgccatgcccggggaggacctgaagttcaacctaatcttgcggcagccaatgatcttagagaaaggccagcgtttcaccctgcgagatggcaaccggactattggcaccggtctagtcaccaacacgctggccatgactgaggaggagaagaatatcaaatggggttgagtgtgcagatctctgctcagcttcccttgcgtttaaggcctgccctagccagggctccctcctgcttccagtaccctctcatggcataggctgcaacccagcagagggcagctagatggacatttcccctgctcggaagggttggcctgcctggctggggaggtcagtaaactttgaatagtaaaaaaaaaaaaaaaaaaaaaaaa

SEQ ID NO: 2137 - protein, 452 aa, Homo sapiens
MAAATLLRATPHFSGLAAGRTFLLQGLLRLLKAPALPLLCRGLAVEAKKTYVRDKPHVNVGTIGHVDHGKTTLTAAITKILAEGGGAKFKKYEEIDNAPEERARGITINAAHVEYSTAARHYAHTDCPGHADYVKNMITGTAPLDGCILVVAANDGPMPQTREHLLLARQIGVEHVVVYVNKADAVQDSEMVELVELEIRELLTEFGYKGEETPVIVGSALCALEGRDPELGLKSVQKLLDAVDTYIPVPARDLEKPFLLPVEAVYSVPGRGTVVTGTLERGILKKGDECELLGHSKNIRTVVTGIEMFHKSLERAEAGDNLGALVRGLKREDLRRGLVMVKPGSIKPHQKVEAQVYILSKEEGGRHKPFVSHFMPVMFSLTWDMACRIILPPEKELAMPGEDLKFNLILRQPMILEKGQRFTLRDGNRTIGTGLVTNTLAMTEEEKNIKWG

SEQ ID NO: 2138 - DNA, 1505 bp, Homo sapiens
ccacgtggtggctttctcacgctagccctctttggtcctccttgacgtcccgggcctgtgggcccgctttctgccgagatgccgaaggtcaagtcgggggccatcggccgccgccgcgggcggcaggagcagcgccgggagctgaagagcgctggaggactcatgttcaacacggggattgggcagcacattttgaaaaatcctctcattattaacagcattatcgataaggctgccttaagaccaactgatgtagtgctggaagttggacctggaactggcaacatgactgtaaagttgttagaaaaggcaaaaaaggttgttgcttgtgaacttgacccaaggctagtagctgaacttcacaaaagagttcagggcacgcctgtggccagcaaacttcaagtactggtgggtgatgtgctgaaaacagatttgccattctttgatacttgtgtggcaaatttgccttatcagatctcttcgccttttgtcttcaagctgttgctacatcgaccttttttcaggtgtgctatacttatgtttcaaagagaatttgccctccgactggttgcaaaacctggagataagttatactgcagactctcaattaatacacagctgttggcacgtgtggaccatctaatgaaagtgggaaagaataacttcagaccaccgcccaaggtggaatccagtgttgtaaggatagaacctaagaatccaccaccacccatcaattttcaggaatgggatggtctagtaaggataacctttgttaggaaaaacaagacactctctgctgcatttaaatcaagtgcagtgcaacaactcttggaaaaaaactacagaattcactgttcagtccataatattataataccagaagatttcagcatagcagataaaatacagcaaatcctaaccagcacaggttttagtgacaaacgggcccgttccatggacatagatgacttcatcagattgctacatggattcaacgcagaaggtattcatttttcctaggtatttggaaaacagaaattttcaaggtcaagaaaagaaatgaattttgtattttttgtatttgagaagataatgcttttgctttactgagacattatttacttgactatttttggttcaatactactactgttgtcaccatttatgattctgaattttaaagttggaaagttctaagtatcaaagtttttaatatataatgctggtccaatctattcataataatcttcaagttcaggagccgcagagacgcacaactttacacttatcatttctaacagtttattgtataaagatgttactcttctatttactgttatatactgtaaggccttctttaggcctttagctctgttcctccagtaataaaaaagttaaaatatgcttcactagtcacacattccccataccatttcgtgttattcacattccccgtaccatttcttgttattcacatgtacagtaaaacaattgtttcttaaatt

SEQ ID NO: 2139 - protein, 313 aa, Homo sapiens
MPKVKSGAIGRRRGRQEQRRELKSAGGLMFNTGIGQHILKNPLIINSIIDKAALRPTDVVLEVGPGTGNMTVKLLEKAKKVVACELDPRLVAELHKRVQGTPVASKLQVLVGDVLKTDLPFFDTCVANLPYQISSPFVFKLLLHRPFFRCAILMFQREFALRLVAKPGDKLYCRLSINTQLLARVDHLMKVGKNNFRPPPKVESSVVRIEPKNPPPPINFQEWDGLVRITFVRKNKTLSAAFKSSAVQQLLEKNYRIHCSVHNIIIPEDFSIADKIQQILTSTGFSDKRARSMDIDDFIRLLHGFNAEGIHFS

SEQ ID NO: 2140 - DNA, 4617 bp, Homo sapiens
atccgataggaccaggtagccactgagcatgcctgtctggtgggcatagcctctgtgcctggtggggtccagccctgtatgtggacttcctgggggaccgcctgcatgctgggaaagtcctgcaactgtgggctctgggccggacccctcctccttggggagcgttgctgtggtctccgcagcctgttggtgtggtccgagaggggactggtgtgtggtggtagggacgcaggtgctcaggagggctcctcaggctgcctctctgcctgttactgctgctccctccctggtcctggggactcgctcaggcctggatgtgtggttttggacaccttggaaagaggttagctgtgagttttgctttgattgggctttgagctgctgagctagatctgtccaagcatgcttttgtggttttctcgagtctttggtcaccctgcgtagaattacctttacttttgccttcattttaggtaatcattaccaaatgaggaggaaaggacgatgtcatcgaggctctgcagcgaggcatccttcttccccatgcagtgttaaacactcccctacgcgagaaacgctgacctacgctcaagctcaaaggatggtagagatagaaattgaagggcgcttgcacaggatcagtatttttgatcccctggagatcatattggaagatgacctcactgctcaagagatgagtgagtgcaacagcaacaaggaaaacagcgagcggcctcctgtctgcttaagaactaagcgtcacaaaaacaacagagtcaaaaagaaaaacgaggccctccccagcgcccacggcacgccggcctcggccagtgccctcccggagcccaaggtgcgcatcgtggagtacagccctccgtccgcccccaggaggcctcctgtgtactacaagttcatcgagaagtcggccgaggaactggacaacgaggtggagtatgacatggacgaggaggactatgcctggctggagatcgtcaatgagaagcgcaagggcgactgcgtccccgccgtgtcgcagagcatgtttgagttcctgatggaccgcttcgagaaggagtcgcactgcgagaaccagaagcagggcgagcagcagtctctgatcgacgaggacgccgtgtgctgcatctgcatggacggggagtgtcagaacagcaacgtgatcctcttctgcgacatgtgcaacctggccgtgcaccaggagtgctacggggtgccctacatccccgagggccagtggctctgccgccactgcctgcagtcgcgggcccggcccgccgactgtgtgctgtgccccaacaagggtggtgccttcaaaaagacagatgacgaccgctggggtcacgtggtgtgtgccctgtggatcccagaggtcggctttgccaacacggtgttcatcgagcccatcgatggggtgaggaacatccctccagcccggtggaaactgacatgctacctctgtaagcagaagggcgtgggtgcctgcatccagtgccacaaagcaaactgctacacagcattccatgtgacgtgtgcccagaaggctggcctgtacatgaaaatggagcccgtgaaggaactgactggcggtggcaccaccttctccgtcagaaagaccgcttactgtgatgtccacacgcctccaggctgcacccggaggcctctgaatatttacggggatgtcgaaatgaaaaatggcgtctgtcgaaaagagagctcggttaaaacggtcaggtccacatccaaggtcaggaagaaggcaaaaaaggctaagaaagctctggctgagccctgcgcggtcctgccgaccgtgtgcgctccttatattcccccgcagaggttaaataggattgcgaatcaggtggccattcagcggaagaagcagtttgtggagcgagcccacagctactggctgctcaagcggctgtccaggaacggggcccccctgctgcggcggctgcagtccagcctgcagtctcagcgaagctcacagcagagagaaaatgatgaggagatgaaggctgccaaagagaagctgaagtactggcagcggctgcggcacgacctggagcgcgctcgcctgctgatcgagctgctgcgcaagcgggagaagctcaagcgtgagcaggtgaaggtggagcaggtcgccatggagctgcggctgaccccgctgacggtgctgctgcgctcagtgctggaccagctgcaagacaaggaccccgccaggatatttgcgcagcccgtgagtctgaaggaggtaccagattatttggatcacattaaacatcccatggactttgccacaatgaggaaacggttagaagctcaagggtataaaaacctccatgagtttgaggaggattttgatctcattatagataactgcatgaagtacaatgccagggacaccgtgttctatagagccgcggtgaggctgcgcgatcagggaggtgttgttctgaggcaggcccggcgcgaggtggacagcatcggcttggaagaggcctcggggatgcacctgcctgagcggcctgctgcggcaccgcggcggcctttctcctgggaagacgtggacaggttgctggaccccgccaacagagcccacctgggcctggaggagcagctgagagagctgctggacatgctcgacctcacctgcgctatgaagtccagcggctcccggagcaagcgggcaaagctgctcaaaaaggaaattgcccttctccgaaacaagctgagccagcagcacagccagcccctgcccacggggccaggcttggaaggcttcgaagaggacggagctgcgctggggccggaggcgggcgaggaagtccttccgaggttggagactcttctgcagccaaggaaaaggtcgcggagcacatgcggagactccgaggtggaggaggagtccccaggaaagcgcctggacgcaggtctcaccaacggctttgggggtgcgaggagcgagcaggagccgggcggcggcctggggaggaaggccacaccccgacgacgctgtgcctccgagtccagcatctcctccagcaacagcccgctctgcgactcgagctttaatgcgcccaaatgtgggcggggcaaaccggctcttgtgcgacggcacacgctggaggaccgcagtgagctgatctcctgcatcgagaatgggaactacgccaaggcggccaggatcgcagccgaagtcggccagagcagcatgtggatctccactgatgccgccgcctcggtgctggagcctctgaaggtggtgtgggccaagtgcagcggctacccctcctacccggcactgatcatcgaccccaagatgccccgtgtgcctggccaccacaacggcgtcaccatcccggccccacccctggacgtgctgaagattggggagcacatgcagaccaagtctgatgagaagctgttcctcgttctcttttttgataataagagaagttggcagtggcttcctaagtccaaaatggttccccttggtattgacgaaactatagacaagttaaagatgatggaagggaggaattccagcatccggaaggccgtgcggatcgcttttgaccgcgccatgaaccacctgagccgcgtccacggggagccgaccagcgacctcagtgacattgactgacggcccggccgccagcgcgggtcttgtccatagtgttgataagctgtacatgtttgtatattgttcaaaacttaacttattctgatttttagttatagctctttaattctttttccccggggaggggggaggttttatttccaagttttctaggaacccatctccgtctgggcgctgtgagtggggtgggcacgtccgggcagcccagtgcgtctgtcgcacgtccccaggccgtgctgctggcgtcactttctttgatatgtagctttttcttaaagacttttgaatgtttaataattttgtaaatcatgctctttacacagagtaccacttatttaataagacgggatgtaaatttacaatgacaaatgtgtattttaagaaagaaaatgacattattttgaatggtactttgtggaaagaggggagaataaagttatgctgtgtacatcacttgcagatcaccaaaaacactccgctgcccgtgaccgccggtgggtgtgtccccgctcccgtcgtcccgcccacctcaaaccccgcaggtgtgcctcccagcggattatttattgtagaaagtgtattcatttgctttataatgaaaaatacatttgcaaaggtatattgatatgcatttttatacaggcacataaaaattcaacttggcttgggagcagaatgcattgcattgtataaatgactctggcctgtgtgtactttgattttataacttgtaatcttttgtttacaatgaggggctttctgtaacttgttttaatttagaacactttggtagcaatagaaactttggatacatttttgtatggtacctgtgatgtatatagaattagtactttatttttatttttaagaggtaaagcattatgttggggaaagtagggtgggtttccaaatttgcattttttatattaaaaataaagtcaagaaaaaaaaaa

SEQ ID NO: 2141 - protein, 1058 aa, Homo sapiens
MRRKGRCHRGSAARHPSSPCSVKHSPTRETLTYAQAQRMVEIEIEGRLHRISIFDPLEIILEDDLTAQEMSECNSNKENSERPPVCLRTKRHKNNRVKKKNEALPSAHGTPASASALPEPKVRIVEYSPPSAPRRPPVYYKFIEKSAEELDNEVEYDMDEEDYAWLEIVNEKRKGDCVPAVSQSMFEFLMDRFEKESHCENQKQGEQQSLIDEDAVCCICMDGECQNSNVILFCDMCNLAVHQECYGVPYIPEGQWLCRHCLQSRARPADCVLCPNKGGAFKKTDDDRWGHVVCALWIPEVGFANTVFIEPIDGVRNIPPARWKLTCYLCKQKGVGACIQCHKANCYTAFHVTCAQKAGLYMKMEPVKELTGGGTTFSVRKTAYCDVHTPPGCTRRPLNIYGDVEMKNGVCRKESSVKTVRSTSKVRKKAKKAKKALAEPCAVLPTVCAPYIPPQRLNRIANQVAIQRKKQFVERAHSYWLLKRLSRNGAPLLRRLQSSLQSQRSSQQRENDEEMKAAKEKLKYWQRLRHDLERARLLIELLRKREKLKREQVKVEQVAMELRLTPLTVLLRSVLDQLQDKDPARIFAQPVSLKEVPDYLDHIKHPMDFATMRKRLEAQGYKNLHEFEEDFDLIIDNCMKYNARDTVFYRAAVRLRDQGGVVLRQARREVDSIGLEEASGMHLPERPAAAPRRPFSWEDVDRLLDPANRAHLGLEEQLRELLDMLDLTCAMKSSGSRSKRAKLLKKEIALLRNKLSQQHSQPLPTGPGLEGFEEDGAALGPEAGEEVLPRLETLLQPRKRSRSTCGDSEVEEESPGKRLDAGLTNGFGGARSEQEPGGGLGRKATPRRRCASESSISSSNSPLCDSSFNAPKCGRGKPALVRRHTLEDRSELISCIENGNYAKAARIAAEVGQSSMWISTDAAASVLEPLKVVWAKCSGYPSYPALIIDPKMPRVPGHHNGVTIPAPPLDVLKIGEHMQTKSDEKLFLVLFFDNKRSWQWLPKSKMVPLGIDETIDKLKMMEGRNSSIRKAVRIAFDRAMNHLSRVHGEPTSDLSDID

SEQ ID NO: 2142 - DNA, 3248 bp, Homo sapiens
attttcgggagcgggattgtttcgcgcaggaagcaggctccattttagcgccgcccgccgtcgccatctgtttcccttccctcccccatacctagcccgagtctgagccctaacgagaaggctgggcctaggccgctggatgctggagtgaaaggaagggagaaagggaaaaagcgggaagagtcgagaaggctgagtgttaagaggccaagtgcgacgcgcgtatccgggcagacggactgacggacgggcccgtgcttctgccgcggctgcggcgcccgcgcgagtcgcgtctaagcggcggcggcggtggcagcggcggaaaccgaaggggagccatggcggctgacagtcgggaggagaaagatggagaacttaatgttctggatgatattttaactgaagtaccagaacaagatgatgaactgtataatccagagagtgaacaagataaaaatgagaaaaagggatcaaaaggaaaaagtgatcgaatggaatctactgataccaaacgacaaaagccttctgtccattcaagacaactggtttctaagccactgagctcatctgttagcaataacaaaagaatagttagtacaaaaggaaagtcagccacagagtataaaaatgaggaatatcaaagatctgaaagaaacaagcgtctagatgctgatcggaaaattcgtctatcaagtagtgcctccagagaaccttataagaatcaacctgaaaaaacctgtgtccggaaaagggatcctgaaaggagggccaaatctcctacgccagatggttctgagagaattgggcttgaagtggatagacgtgcaagcagatccagccagtcttctaaggaagaagtgaactctgaagaatatggctctgaccatgagactggcagcagtggttcttctgatgagcaagggaacaacactgagaatgaggaggaaggagtggaagaagatgtggaggaagatgaagaagtagaagaagatgcagaagaagatgaagaggtggatgaagatggagaggaggaggaggaagaggaggaggaggaagaggaggaggaggaggaggaagaagaagaatatgaacaggatgagagagaccagaaagaggagggaaatgattatgacactcgaagtgaggccagtgactctggttctgaatctgtttccttcacagatgggtctgtcagatctggttcaggcacagatggatcagatgagaaaaagaaggaaaggaagagagctagaggcatatctccaattgtttttgatagaagtggaagctctgcatcagagtcatatgcagatcaaaccagtaaactcaaatatgtgcttcaagatgcaagatttttcctcataaagagtaacaaccatgagaatgtgtctcttgccaaagcgaagggtgtatggtccacgctccctgtaaatgagaagaaattaaatcttgcatttagatctgcaaggagtgttatcttaatattttctgtcagagagagtggaaaatttcaagggtttgcaagactttcttcagaatcacatcacggaggatctcctatacactgggtgcttccagcaggaatgagtgctaaaatgctgggaggtgtctttaaaattgactggatttgcaggcgtgaattacccttcactaagtcggctcatctcaccaatccttggaatgaacataaaccagtaaagatcggacgtgatggacaggaaattgaacttgaatgtggaacccagctttgtcttctgtttccccccgatgaaagtattgacttgtatcaggtcattcataaaatgcgtcacaagagaagaatgcattctcagccccgatcacgaggacgtccatcccgtcgagaaccagtccgggatgtgggaaggcgtcgaccagaagattatgatattcataacagcagaaagaaaccaaggattgactatccccctgagtttcaccagagaccagggtatttaaaggatccacgataccaggaagtggacagacgattttcaggagttcgccgagatgtgtttttaaatgggtcctacaatgattatgtgagggaatttcataacatgggaccaccaccaccttggcaaggaatgcccccttacccaggaatggaacaacctccacaacatccttactatcagcaccatgctccacctcctcaagctcatcccccttactcaggacatcatccagtaccacatgaagcaagatacagagataaacgagtacatgattatgatatgagggtggatgatttccttcgtcgcacacaagctgttgtcagtggccggagaagtagaccccgtgaaagagaccgggaacgagagcgagaccgccctagagataacagacgagacagagagcgagatagaggacgtgatagagaaagagaaagagagcgattatgtgatcgagacagagaccgaggggagagaggtcgatatagaagataatgggcttttggaagcactgattgtttaaagatacaaaaaatcttgtatttttttttttgtgtgtgtttacaagtagtaaatttattttcagctgtctgcctatgaagttcattgtgtagaaggatttattatgaccccctttgttccaagcatgcagtatcataagaactggaaaaactcaaatccgccaaaaatccacagctgacagttgaattgacacttttattggggcagaatggaacagtccaagaatgtagatactgattctttctccataaatgttcttatagtgtgttcatcctagagttatttttttgtttgtttttttcctttttggatcttgattgataactgccatgatattttgctttgatgtgtttctacatgtagttgcacacggttcagtaaaaataatgctgctatcgagtatgcaaatattgaagtatgatggtttgactgtatggcagtgttgtagcagcctcttgtttttttccccattgcctctttttttaaaaaacttataaagtcactttttatttttcctcagtcttcaatgacgagagcaatattaagaagacattgctatctaatttttaatctttttaaatgaaaaattcctatgttcagtagcgtggttgatgctattgtttagccttcccctccaaattgtatacattggcttggaatgttcacaacttgcgtgcgtggcagcggaagacgattcccatattctacattgctactgttttgtataaaataaattggtaaagattgacggtt

SEQ ID NO: 2143 - protein, 658 aa, Homo sapiens
MESTDTKRQKPSVHSRQLVSKPLSSSVSNNKRIVSTKGKSATEYKNEEYQRSERNKRLDADRKIRLSSSASREPYKNQPEKTCVRKRDPERRAKSPTPDGSERIGLEVDRRASRSSQSSKEEVNSEEYGSDHETGSSGSSDEQGNNTENEEEGVEEDVEEDEEVEEDAEEDEEVDEDGEEEEEEEEEEEEEEEEEEEEYEQDERDQKEEGNDYDTRSEASDSGSESVSFTDGSVRSGSGTDGSDEKKKERKRARGISPIVFDRSGSSASESYADQTSKLKYVLQDARFFLIKSNNHENVSLAKAKGVWSTLPVNEKKLNLAFRSARSVILIFSVRESGKFQGFARLSSESHHGGSPIHWVLPAGMSAKMLGGVFKIDWICRRELPFTKSAHLTNPWNEHKPVKIGRDGQEIELECGTQLCLLFPPDESIDLYQVIHKMRHKRRMHSQPRSRGRPSRREPVRDVGRRRPEDYDIHNSRKKPRIDYPPEFHQRPGYLKDPRYQEVDRRFSGVRRDVFLNGSYNDYVREFHNMGPPPPWQGMPPYPGMEQPPQHPYYQHHAPPPQAHPPYSGHHPVPHEARYRDKRVHDYDMRVDDFLRRTQAVVSGRRSRPRERDRERERDRPRDNRRDRERDRGRDRERERERLCDRDRDRGERGRYRR

SEQ ID NO: 2144 - DNA, 3906 bp, Homo sapiens
gtagctgctttgcaggtacatcatgtgacagtggaattatagaagatgtgaagaaaacaacacacactccaacactaaaagcatgatgtagctgctttgcaggtaaaagaagcagctacatcatgcttttagtgttggagtgtgtgttgttttctgtggctcaggggtattttagaatggactcttctgcaacccagtttcacatagagactcatgagaacacatcaggactttggtcaatatggtaccgcaaccattttgaccgtagtgttgtattaaatgatgtgtttctttccaaggagaccaagcacatgttaaagattctgaatttcactggccctttatttctacctccaggctgttggaatatattttctttgaaacttgctgttaaagacattgccataaatctattcaccaatgtatttttgactacaaacataggtgccatttttgcaatacctctacagatttattcagcaccaaccaaggaagggagtctgggttttgaagtgatagcacattgtggcatgcattatttcatgggaaaatcaaaagcaggaaatcctaattggaatgggagcctttctctggatcaatctacctggaatgtggattctgaacttgcaaataaattgtatgaaagatggaagaaatataaaaatggtgacgtctgcaagaggaatgttttgggaacaactcgatttgctcacttgaagaaatccaaggagtcagagtcctttgttttctttttgcctcgtttgatcgcagagcctggcctcatgttaaacttcagcgcaactgcccttaggagcaggatgatcaagtactttgtggtgcagaacccgtcctcttggccggtctccttgcagctcctgcctctctccttgtaccctaaacccgaagccctagtgcacctgctccacagatggtttggcactgatatgcagatgattaatttcacaactggtgaattccagctcaccgaagcttgcccttacctgggtacgcattctgaggaatccaggtttggcatcctccacttacatctgcagcctttggaaatgaaaagggttggcgtagttttcacacctgctgactatggaaaagttacctcactcatactaatccggaataacttgactgttattgacatgattggcgtggaaggatttggagcaagagagttattaaaagtgggtggaagacttcctggtgcaggaggctcactccgatttaaggtgcccgagtccacgctgatggactgccgtagacaactgaaagacagtaagcaaattttatctattacaaagaactttaaagttgagaatattggacctcttcctataactgtttcgtctctgaaaattaatgggtataactgccaaggttatggattcgaggtgctggattgtcatcagttttccctggacccaaacacatcccgcgatatcagcattgtgttcactccagactttacctcctcctgggtaattcgggacctaagtcttgtaaccgcagcggacctagaatttcgcttcactctcaatgtgactctccctcatcacctgttgcccttgtgtgcagacgtggttccaggacccagctgggaggagtcattttggaggctcacggtcttctttgtcagtttgtccctgttgggtgtgattttaatagccttccaacaagcacagtacattctcatggaattcatgaaaacaagacagaggcaaaatgctagctcctcttcacagcaaaacaatggtcctatggatgtaatcagcccccattcttacaaaagcaattgcaagaactttctcgatacatatggcccctctgataaaggcagggggaagaactgccttccagtgaacactccccaaagcaggatccagaatgctgcaaagaggagcccagccacctatggtcattctcagaagaagcacaaatgctcagtgtattacagtaaacacaaaaccagcacagctgcggccagcagcaccagcacgactactgaggaaaaacagacttcacccctgggcagctcactgcctgctgctaaagaggacatttgcactgatgccatgcgtgagaactggatcagcctcagatatgcaagtggcataaatgtcaacctgcagaagaatttaacccttcccaaaaacttactgaataaagaagaaaacacactgaaaaacacaattgttttcagtaatccttcttcagaatgtagtatgaaggagggaatacagacatgtatgtttcctaaggaaactgacattaaaacttcagagaacacagccgagttcaaggaacgggagctctgtccactgaagacctccaagaaactacctgaaaaccatttaccaagaaactcacctcagtaccaccagccagacttgccagaaatttccaggaaaaataatgggaataaccagcaagtacctgtcaagaatgaagtagatcattgtgaaaatttgaagaaggtggacacaaagccttcttcagaaaagaagattcacaaaacatctagagaagacatgttttctgagaaacaggacatacctttcgtagagcaagaagatccttataggaagaaaaagcttcaggagaaaagagaaggaaatttacaaaatttaaattggagtaaaagtcgaacatgtagaaagaacaagaaaaggggtgttgctccagtctcaaggcctcctgaacagagtgatctaaagcttgtgtgcagtgactttgagaggtctgagctgagcagtgacatcaatgtaagaagctggtgtatacaggaaagcactagggaggtttgtaaagcagatgccgaaattgcaagcagtttacctgctgcccagagagaggcagaaggttactaccagaagcctgagaagaaatgtgtggacaagttctgctccgattccagctctgactgtgggagctcctctggcagcgtgcgtgccagccggggcagctgggggagctggagcagcaccagcagctccgacggggataagaagcccatggtggacgcccagcacttcctgccggccggagacagtgtttcacaaaatgattttccttctgaagctcccatctccttgaatctttctcataacatctgcaatcccatgaccgtgaatagtctcccacaatacgcagagccttcctgtcccagccttcctgccgggcccacaggtgttgaagaagataaaggtctttactcacctggagacctgtggcccactccgccagtgtgtgtgacaagcagcttaaactgcaccctggagaacggcgtgccttgtgtgattcaggagtcggccccggttcataatagtttcattgattggagtgcaacatgcgaaggccagttttccagcgcatactgtccattggaattgaacgattacaatgcctttccagaagaaaacatgaactatgccaatggcttcccctgtcctgcagatgttcagacagactttattgatcacaactctcagtctacctggaacaccccacccaacatgcctgctgcctggggacatgccagtttcatcagctctccgccctacctcacaagcacccgaagcttgtctccaatgtctggactttttggttccatctgggccccgcaaagcgatgtgtatgaaaattgctgccccatcaaccccaccacggaacattcgacccacatggaaaaccaagcggtcgtgtgcaaggaatactacccggggttcaacccgtttcgcgcctatatgaacctggacatatggactaccacagcgaataggaatgcaaatttcccactgtctagagactcgagttactgtgggaatgtgtgaaaataattggatttttaaacaatgtgaataaagaggcttgtgttttgaaaaaaaaaaaaaaaaa

SEQ ID NO: 2145 - protein, 1239 aa, Homo sapiens
MLLVLECVLFSVAQGYFRMDSSATQFHIETHENTSGLWSIWYRNHFDRSVVLNDVFLSKETKHMLKILNFTGPLFLPPGCWNIFSLKLAVKDIAINLFTNVFLTTNIGAIFAIPLQIYSAPTKEGSLGFEVIAHCGMHYFMGKSKAGNPNWNGSLSLDQSTWNVDSELANKLYERWKKYKNGDVCKRNVLGTTRFAHLKKSKESESFVFFLPRLIAEPGLMLNFSATALRSRMIKYFVVQNPSSWPVSLQLLPLSLYPKPEALVHLLHRWFGTDMQMINFTTGEFQLTEACPYLGTHSEESRFGILHLHLQPLEMKRVGVVFTPADYGKVTSLILIRNNLTVIDMIGVEGFGARELLKVGGRLPGAGGSLRFKVPESTLMDCRRQLKDSKQILSITKNFKVENIGPLPITVSSLKINGYNCQGYGFEVLDCHQFSLDPNTSRDISIVFTPDFTSSWVIRDLSLVTAADLEFRFTLNVTLPHHLLPLCADVVPGPSWEESFWRLTVFFVSLSLLGVILIAFQQAQYILMEFMKTRQRQNASSSSQQNNGPMDVISPHSYKSNCKNFLDTYGPSDKGRGKNCLPVNTPQSRIQNAAKRSPATYGHSQKKHKCSVYYSKHKTSTAAASSTSTTTEEKQTSPLGSSLPAAKEDICTDAMRENWISLRYASGINVNLQKNLTLPKNLLNKEENTLKNTIVFSNPSSECSMKEGIQTCMFPKETDIKTSENTAEFKERELCPLKTSKKLPENHLPRNSPQYHQPDLPEISRKNNGNNQQVPVKNEVDHCENLKKVDTKPSSEKKIHKTSREDMFSEKQDIPFVEQEDPYRKKKLQEKREGNLQNLNWSKSRTCRKNKKRGVAPVSRPPEQSDLKLVCSDFERSELSSDINVRSWCIQESTREVCKADAEIASSLPAAQREAEGYYQKPEKKCVDKFCSDSSSDCGSSSGSVRASRGSWGSWSSTSSSDGDKKPMVDAQHFLPAGDSVSQNDFPSEAPISLNLSHNICNPMTVNSLPQYAEPSCPSLPAGPTGVEEDKGLYSPGDLWPTPPVCVTSSLNCTLENGVPCVIQESAPVHNSFIDWSATCEGQFSSAYCPLELNDYNAFPEENMNYANGFPCPADVQTDFIDHNSQSTWNTPPNMPAAWGHASFISSPPYLTSTRSLSPMSGLFGSIWAPQSDVYENCCPINPTTEHSTHMENQAVVCKEYYPGFNPFRAYMNLDIWTTTANRNANFPLSRDSSYCGNV

SEQ ID NO: 2146 - DNA, 542 bp, Homo sapiens
taaagaaaaattaatatttatttgcaatataaacaaagtcccgttgttggttcgggatatatatatatatgtatgtgtgtgtatatatatacgtagggtcacaaatcttccttcataagatcataaagcaaaactggccaccttctggcataccctcatttacacaaatctggtacatctttctgggttttctttttaaaaataaaagagagaaaaagagaaccatgtacagcatggaagcttgttgtcaatttctcgactgtggcaagattttaatctgctgcgctaaagaatccctgaaagccacccccgtgaggtaagaagcagtggggcagagtttttctgtggcctcactcacatgctgagtgctgctccgtcagggaccctggcctgactcctctgcctgccccaggcccccatgcagtcctgacacctggtggaactgaggctggagaaggaacaaaactggaggaagataacggaatccgtggcttcgttctgtggaggcagggggaagtgaacagagccttaccccccttctg

SEQ ID NO: 2147 - DNA, 2815 bp, Homo sapiens
cccgtgctccttacctccccggtggtcgggcgcgaattactggaaattggcttttcccgttggggccgaaggtaccttccctgcggcggcgactcagcggggtgtcgttcggccggcgtgacgcagccggatcggcgccagacggaaacctagcggtgactgtatctgaattttgcagctgcagaatgtgtagtaccttaaaaggttggcaacaatgagtaaaccagaattaaaggaagacaagatgctggaggttcactttgtgggagatgatgatgttcttaatcacattctagatagagaaggaggagctaaattgaagaaggagcgagcgcagcttttggtcaaccccaaaaaaataataaagaagccagaatatgatttggaggaagatgaccaggaggtcttaaaagatcagaactatgtggaaattatgggaagagatgttcaagaatcattgaaaaatggctctgctacaggtggtggaaataaagtttattcttttcagaatagaaaacactctgaaaagatggctaaattagcttcagaactagcaaaaacaccacaaaaaagtgtttcattcagtttgaagaatgatcctgagattacgataaacgttcctcaaagtagcaagggccattctgcttcagacaaggttcaaccgaagaacaatgacaaaagtgaatttctgtcaacagcacctcgtagtctaagaaaaagattaatagttccaaggtctcattctgacagtgaaagcgaatattctgcttccaactcagaggatgatgaaggggttgcacaggaacatgaagaggacactaatgcagtcatattcagccaaaagattcaagctcagaatagagtagtttcagctcctgttggcaaagaaacaccttctaagagaatgaaaagagataaaacaagtgacttagtagaagaatattttgaagctcacagcagttcaaaagttttaacctctgatagaacactgcagaagctaaagagagctaaactggatcagcaaactttgcgtaacttattgagcaaggtttccccttccttttctgccgaacttaaacaactaaatcaacagtatgaaaaattatttcataaatggatgctgcaattacaccttgggttcaacattgtgctttatggtttgggttctaagagagatttactagaaaggtttcgaaccactatgctgcaagattccattcacgttgtcatcaatggcttctttcctggaatcagtgtgaaatcagtcctgaattctataacagaagaagtcctcgatcatatgggtactttccgcagtatactggatcagctagactggatagtaaacaaatttaaagaagattcttctttagaactcttccttcttatccacaatttggatagccagatgttgagaggagagaagagccagcaaatcattggtcagttgtcatctttgcataacatttaccttatagcatccattgaccacctcaatgctcctctcatgtgggatcatgcaaagcagagtctttttaactggctctggtatgaaactactacatacagtccttatactgaagaaacctcctatgagaactctcttctggtaaagcagtctggatccctgccacttagctcccttactcatgtcttacgaagccttacccctaatgcaaggggaattttcaggctactaataaaataccagctggacaaccaggataacccttcttacattggcctttcttttcaagatttttaccagcagtgtcgggaggcattcctcgtcaatagtgatctgacactccgggcccagttaactgaatttagggaccacaagcttataagaacaaagaagggaactgatggagtagagtatttattaattcctgttgataatggaacattgactgatttcttggaaaaggaagaagaggaggcttgaagctttcctttattcttgaatctcccatggaagggttgtaccccagctgccactcctctagttgaaagtgttgtgtttacatctgacattaaattatttttccagcatacaagatttaaatttgggaagggggggatgtcctcaattagaactttttgatcagcctggctggtaccgtctagtactatgcagcggtcctcaagttggagaaaatgtgcctttcattcattacctctctggagacttcttgctggaatgaacagtgtgctcagggactatttggaactggatgtttttgaattattttatacttagagatattctgaattttttgagggccttttaacactccccgagctgattgtttgcaagtgtgtttgttccagagtgtggaagtataaagacatgggcatcacgtaaattggttttgtttgctattctgtgtgtcagaaccaacgagtgtaatggagagggcaggtcatctcttattgtttctaaaacaacttaaaaggtgtagattgggaagaggtgagtgatccagctttctccttttggattgaggctatgtacttggtgggggcaggggagggaatatattataatactattcagttgggataatgggaaaaacagagtatatagggtatctacccagcctagaaagcacaggaacaatacgtcatatatttggaacagttattgtctgtgccatgaccttcatgataccagtgagaagccaggctagagaaataaaatcctgaattacattttagtaattgttttcaagacaacaaaaaataaaacatttcattattcttgtaaaaaaaaaaaaaaaaaaaaaaaaaaaaaaaaaaaaaaaaaaaaaaa

SEQ ID NO: 2148 - protein, 577 aa, Homo sapiens
MSKPELKEDKMLEVHFVGDDDVLNHILDREGGAKLKKERAQLLVNPKKIIKKPEYDLEEDDQEVLKDQNYVEIMGRDVQESLKNGSATGGGNKVYSFQNRKHSEKMAKLASELAKTPQKSVSFSLKNDPEITINVPQSSKGHSASDKVQPKNNDKSEFLSTAPRSLRKRLIVPRSHSDSESEYSASNSEDDEGVAQEHEEDTNAVIFSQKIQAQNRVVSAPVGKETPSKRMKRDKTSDLVEEYFEAHSSSKVLTSDRTLQKLKRAKLDQQTLRNLLSKVSPSFSAELKQLNQQYEKLFHKWMLQLHLGFNIVLYGLGSKRDLLERFRTTMLQDSIHVVINGFFPGISVKSVLNSITEEVLDHMGTFRSILDQLDWIVNKFKEDSSLELFLLIHNLDSQMLRGEKSQQIIGQLSSLHNIYLIASIDHLNAPLMWDHAKQSLFNWLWYETTTYSPYTEETSYENSLLVKQSGSLPLSSLTHVLRSLTPNARGIFRLLIKYQLDNQDNPSYIGLSFQDFYQQCREAFLVNSDLTLRAQLTEFRDHKLIRTKKGTDGVEYLLIPVDNGTLTDFLEKEEEEA

SEQ ID NO: 2149 - DNA, 1181 bp, Homo sapiens
gccagaccaaaccggacctcgggggcgatgcggctgctgcccctgctgcggactgtcctctgggccgcgttcctcggctcccctctgcgcgggggctccagcctccgccacgtagtctactggaactccagtaaccccaggttgcttcgaggagacgccgtggtggagctgggcctcaacgattacctagacattgtctgcccccactacgaaggcccagggccccctgagggccccgagacgtttgctttgtacatggtggactggccaggctatgagtcctgccaggcagagggcccccgggcctacaagcgctgggtgtgctccctgccctttggccatgttcaattctcagagaagattcagcgcttcacacctttctccctcggctttgagttcttacctggagagacttactactacatctcggtgcccactccagagagttctggccagtgcttgaggctccaggtgtctgtctgctgcaaggagaggaagtctgagtcagcccatcctgttgggagccctggagagagtggcacatcagggtggcgagggggggacactcccagccccctctgtctcttgctattactgctgcttctgattcttcgtcttctgcgaattctgtgagccaagcagaccttccctctcatcccaaggagccagagtcctcccaagatcccctggaggaggaggatccctgctgcctgcactgggggtgccaattcagaccgacaagatggagcattgatgggggagatcagagggtctgaggtgactcttgcaggagcctgtcccctcatcacaggctaaagaagagcagtagacagccctggacactctgaagcagaggcaagacaaacacaggcgctttgcaggctgctctgagggtctcagcccatcccccaggaggactggatttggtatgatcaaatcctcaaggccacgtgggggccccaggctgaagacctgggacaggtcgattgctggaccagggcaaagaagaagccctgcctactgtgccctgtggccttttccctggggcagcaccttgccctccccaggggatcactcacttgtcttctatgaagacggactcttcatgaggttgaatttcatgccagtttgtatttttataagtatctagaccaaaccttcaataaaccactcatctttta

SEQ ID NO: 2150 - protein, 201 aa, Homo sapiens
MRLLPLLRTVLWAAFLGSPLRGGSSLRHVVYWNSSNPRLLRGDAVVELGLNDYLDIVCPHYEGPGPPEGPETFALYMVDWPGYESCQAEGPRAYKRWVCSLPFGHVQFSEKIQRFTPFSLGFEFLPGETYYYISVPTPESSGQCLRLQVSVCCKERKSESAHPVGSPGESGTSGWRGGDTPSPLCLLLLLLLLILRLLRIL

SEQ ID NO: 2151 - DNA, 1768 bp, Homo sapiens
ggcacgaggctcaggcctgacggtccgagtggagctgcgggacagcccgaacctccaggtcagccccgcggccctccatggcgctggtgcgcgcactcgtctgctgcctgctgactgcctggcactgccgctccggcctcgggctgcccgtggcgcccgcaggcggcaggaatcctcctccggcgataggacagttttggcatgtgactgacttacacttagaccctacttaccacatcacagatgaccacacaaaagtgtgtgcttcatctaaaggtgcaaatgcctccaaccctggcccttttggagatgttctgtgtgattctccatatcaacttattttgtcagcatttgattttattaaaaattctggacaagaagcatctttcatgatatggacaggggatagcccacctcatgttcctgtacctgaactctcaacagacactgttataaatgtgatcactaatatgacaaccaccatccagagtctctttccaaatctccaggttttccctgcgctgggtaatcatgactattggccacaggatcaactgcctgtagtcaccagtaaagtgtacaatgcagtagcaaacctctggaaaccatggctagatgaagaagctattagtactttaaggaaaggtggtttttattcacagaaagttacaactaatccaaaccttaggatcatcagtctaaacacaaacttgtactacggcccaaatataatgacactgaacaagactgacccagccaaccagtttgaatggctagaaagtacattgaacaactctcagcagaataaggagaaggtgtatatcatagcacatgttccagtggggtatctgccatcttcacagaacatcacagcaatgagagaatactataatgagaaattgatagatatttttcaaaaatacagtgatgtcattgcaggacaattttatggacacactcacagagacagcattatggttctttcagataaaaaaggaagtccagtaaattctttgtttgtggctcctgctgttacaccagtgaagagtgttttagaaaaacagaccaacaatcctggtatcagactgtttcagtatgatcctcgtgattataaattattggatatgttgcagtattacttgaatctgacagaggcgaatctaaagggagagtccatctggaagctggagtatatcctgacccagacctacgacattgaagatttgcagccggaaagtttatatggattagctaaacaatttacaatcctagacagtaagcagtttataaaatactacaattacttctttgtgagttatgacagcagtgtaacatgtgataagacatgtaaggcctttcagatttgtgcaattatgaatcttgataatatttcctatgcagattgcctcaaacagctttatataaagcacaattactagtatttcacagtttttgctaatagaaaatgctgattctgattctgagatcaatttgtgggaattttacataaatctttgttaattactgagtgggcaagtagacttcctgtctttgctttcttttttttttctttttgatgccttaatgtagatatctttatcattctgaattgtattatatatttaaagtgctcattaatagaatgatggatgtaaattggatgtaaatattcagtttatataattatatctaatttgtacccttgttgaaattgtcatttatacaataaagcgaattctttatctctaaaaaaaaaaaaaaaaaaaaa

SEQ ID NO: 2152 - protein, 453 aa, Homo sapiens
MALVRALVCCLLTAWHCRSGLGLPVAPAGGRNPPPAIGQFWHVTDLHLDPTYHITDDHTKVCASSKGANASNPGPFGDVLCDSPYQLILSAFDFIKNSGQEASFMIWTGDSPPHVPVPELSTDTVINVITNMTTTIQSLFPNLQVFPALGNHDYWPQDQLPVVTSKVYNAVANLWKPWLDEEAISTLRKGGFYSQKVTTNPNLRIISLNTNLYYGPNIMTLNKTDPANQFEWLESTLNNSQQNKEKVYIIAHVPVGYLPSSQNITAMREYYNEKLIDIFQKYSDVIAGQFYGHTHRDSIMVLSDKKGSPVNSLFVAPAVTPVKSVLEKQTNNPGIRLFQYDPRDYKLLDMLQYYLNLTEANLKGESIWKLEYILTQTYDIEDLQPESLYGLAKQFTILDSKQFIKYYNYFFVSYDSSVTCDKTCKAFQICAIMNLDNISYADCLKQLYIKHNY

SEQ ID NO: 2153 - DNA, 2489 bp, Homo sapiens
ggttgcagtgagctgagatggcaccaccacactccagcctgggcgacagaaaaatggctccaaaggttaaatgaagcaggaaaaatacatagatgcagccttgcagcctctccagatgtttggggataatattccagatagaaatattgatcccttggattaggtaactagtcataatgaagaaaattagtcttaaaaccttacggaaatcttttaacttgaataaaagtaaagaagaaactgatttcatggtagtacaacaaccatcgctagccagtgactttggaaaagatgattccttatttggtagctgctatggtaaagatatggccagctgcgatatcaacggtgaagatgaaaaaggcggaaaaacagatcaaagcgagagcctgatgggtacgctaaagcggctttctgcaaaacagaagtcaaaaggcaaggcgggcacaccctctgggagctctgccgacgaggacaccttctcctcctcctcagcacccatagtctttaaagacttgagagctcagaggccgataaggtccacgtcgctccgcagccatcactacaggcccgcgccgtggcctctgcggcccacaaactccgaggagacctgcattaagatggaggtgagagtcaaggccttggttcactcttccagcccgagtccagccctgaatggcgttcggaaggatttccacgacctccagtctgagaccacgtgccaggagcaagccaattcactgaagagctcggcttctcataatggagacctgcatcttcacctgtatgaacatgtgcctgtcgttattggacttatgcctcaggactacattcagtatactgtgcctttagatgaggggatgtatcctttggaaggatcacggagctattgtctggacagctcttctcccatggaagtctctgcggttcctcctcaagtgggagggcgcgctttccccgaggatgagagtcaggtagaccaggacctagttgtcgccccagagatcttcgtggatcagtccgtgaatggcttgttgatcggcaccacgggagtcatgttgcagagcccgagagcgggtcacgatgatgtccctccactctcaccattgctacctccaatgcagaataatcaaatccaaaggaacttcagtggactcactggcacagaagcccacgtggctgaaagtatgcgctgcatttgaattttgatccgaactctgctcctggggttgcaagagtttatgactcagtgcaaagtaatggtcccatggttgtgacaagccttacagaggagctgaaaaaacttgcaaagcaaggatggtactggggaccaatcacacgttgggaggcagaggaagctagcaaacgtgccagatggtcttttcttgtcggacagtcttgacgaccgtaccctttagctttgacttcgctccatggtaacacttcacactgaattgagcactcaatggagtagctttatgaacagcgaatgtgagcatacgtcatagtgatctaatgagcatcatcaggctcgaatgacttgtattcaaggttcggtgccgatttgcaacttccggtaaattgccaacagtcgtcagcagtgcgctcgtcagtacgtgtcgttggtaacggcagttccgataactatcaaactgcttgcaccatgaagattattcaggaaggctctgaagttgaaacctgatctgacctggatttagccagttgaatccagttcaaccttcaattgcatcaaatctttgcgccaatacattcagtttatgggtaaaaggtcatcagttgtttaggtgggaagtgccagcaagtgtctgggttatttggttctttaaaaaagggaagtcttaggtttagaggtgtggattatgtttcatcaatgtgcagatatcacatgtgaattatcaaattctcctcaatgcccccgccgcccagtcctttgctgctatccactgtgatttttatgcattaaaagcacatttcatgtgtattcaacctaagtaaagttgaatgaaacttacagaatggaaattgctatgtctttttaaatggtccattttcaaaagacagtgttgaataaacatacctgtgtgataaaacacagaatttacatatacactgaagatgagtttttaatctcttactttaaaaagatttatttagaatcgtgaattgacataatcttgggtaatggaacggagatctgcaacatatcttttaacaacacttttttataaattatttctaaggttgtgctaattcttttggttgtgaaaagttgaatttttctgttgccttcgttttcatcttctagtttgtctattttaataaatggccttacattaaaaaattgtaaagaaatgtataccaccaatttagaaattgttgccttttctgtaattaaactcgggtacaaattggcaaacatgaaaacctatggaactagaattattattaaagaaatattagatgatcac

SEQ ID NO: 2154 - DNA, 390 bp, Homo sapiens
atgtctggtcgcggcaaaggcggaaaaggcttggggaagggtggtgctaagcgccatcgtaaggtgctccgggataacatccagggcattacaaaaccggctattcgccgtttggctcggcgcggtggcgtcaagcgcatttccggtcttatctatgaggagactcgaggtgtgcttaaggttttcttagagaacgttattcgagacgccgtcacctatacggagcacgccaagcgcaaaactgtcacagccatggatgtagtatatgccctaaaacgtcaggggcgcactctgtatggcttcggcggctgaatctaagaatacgcggtctcctgagaacttcaaaaaacaaaaacaaaaaaacccaaaggcccttttcagggccgctca

SEQ ID NO: 2155 - protein, 103 aa, Homo sapiens [sequence omitted]

SEQ ID NO: 2156 - DNA, 1953 bp, Homo sapiens
gggaagatggcagcggccgtgggctctgtggcgactctggcgactgagcccggggaggacgcctttcggaaacttttccgcttctaccgtcagagccgggcccgggaccgcagacctggaaggggtcatcgacttctcggcggcccacgcagcccgtgcaagggtcctggtgcccaaaaggtgatcaaatctcagctaaatgtgtcttctgtcagtgagcagaatgcatatagagcaggtcttcagcccgtcagcaagtggcaagcctatggactcaaaggctatcctgggtttatttttatcccaaaccccttcctcccaggttaccagtggacactgggtgaaacagtgccttaagttatattcccagaaacctaatgtatgtaacctggacacacacatgtctaaagaagagacccaagatctgtgggaacagagcaaagagttcctgaggtataaagaagcgactaaacggagaccccgaagtttactggagaaactgcgttgggtgaccgtaggctaccattataactgggacagtaagaaatactcagcagatcattacacacctttcccttctgacctgggtttcctctcagagcaagtagccgctgcctgtggatttgaggatttccgagctgaagcagggatcctgaattactaccgcctggactccacactgggaatccacgtagacagatctgagctagatcactccaaacccttgctgtcattcagctttggacagtccgccatctttctcctgggtggtcttcaaagggatgaggcccccccgcccatgtttatgcacagtggtgacatcatgataatgtcgggtttcagccgcctcttgaaccacgcagtccctcgtgtccttccaaatccagaaggggaaggcctgcctcactgcctagaggcacctctccctgctgtcctcccgagagattcaatggtagagccttgttctatggaggactggcaggtgtgtgccagctacttgaagaccgctcgtgttaacatgactgtccgacaggtcctggccacagaccagaatttccctctagaacccatcgaggatgaaaaaaagagacatcagtacagaaggtttctgccatctggatgaccagaatagcgaagtaaaacgggccaggataaaccctgacagctgagacttggagatcccatcctttttactcaggcacctgcttaccgtaaatgatcatgttattgtgtattgccgtggacttcagcacccagacaagccaaaaacagagacagggaagaactcattgttgatcacactgttgccttggaacccacgcagaagtaaactcatccactttgctcagagaagtgtttgacatggtctgttcctagttacatgttggctgtaatgtatgttgagaagtcagtccaaggaggtatgttcttccacaacagccttctcagcctctgctatttcctttgaggaaggtagaagtgagtttccatgtttgcagagtatttaaatacctcagattttattaatgagaaatacagtacccctccctccactccatctggtaatttatggtaaaattgtggttctgtgaaccagctattagtctcatcttcttaactccctcaggcatcatcaaattctttgatcttctcttccacctctctggctctcatggaagaatcctttacacatgaaaacaatggaactggaaaatcttgtcttttagaaaagaaattaatcacaactatctctcttgcctaaaagataaatataggtaaacccaaggaaaggggaatttagtttctctacatgtcatttcggtctccaaactccctgttggctttttaatgcaattttaattgttggaataaaaaagtcccaagggtgttttgttactgttttctccatgaataaactcacttgattttaaaaaaaaaaaaaaaaaaaaaaaa

SEQ ID NO: 2157 - protein, 299 aa, Homo sapiens
MHIEQVFSPSASGKPMDSKAILGLFLSQTPSSQVTSGHWVKQCLKLYSQKPNVCNLDTHMSKEETQDLWEQSKEFLRYKEATKRRPRSLLEKLRWVTVGYHYNWDSKKYSADHYTPFPSDLGFLSEQVAAACGFEDFRAEAGILNYYRLDSTLGIHVDRSELDHSKPLLSFSFGQSAIFLLGGLQRDEAPPPMFMHSGDIMIMSGFSRLLNHAVPRVLPNPEGEGLPHCLEAPLPAVLPRDSMVEPCSMEDWQVCASYLKTARVNMTVRQVLATDQNFPLEPIEDEKKRHQYRRFLPSG

SEQ ID NO: 2158 - DNA, 5613 bp, Homo sapiens
ggacgcgggacccgtacagcggcctccgccgcaccgggacagcagccgccgccgctgccgccgtcctcccctgtctacccggagctgtctcgagctgagccccctaccgggccggatcccgagataaagcctagccatggctgctgtttattctggcatttcccttaagcttaaaagcaagacaacttcctgggaagataaactaaaactagctcactttgcttggatttctcaccagtgctttcttccaaataaagaacaagtgttacttgattgggcaagacaatcattggttgcattttataagaaaaagcttgaactgaaggaagatattgttgaaaggctttggatctatatagataacattttacatagcagaaaattgcagaatctcctcaagaatggaaagaccattaatcttcagatttccctagtcaagatcatcaatgagagagtagctgagttctctctttcgggatcccaaagaaacatctgtgctgtccttcgatgttgccagggcatcctgtcgacacctgccctggctgtcatctacacggccaaacaggagctgatggtggccttgctgagccagctttgctggtcggcctgcaggcagcccgaaggagctgtggtagcccagttgtttgaggtcattcacctggcccttggccattatctcttgatcctgcagcagcaggtcaacccaagacgtgcctttggggatgtgactgctcacctgctccagccgtgcctggtcctgaggcacttactctctgggggcacatggacgcaggctggccagggccagctgaggcaggtgctgagccgggacatcaggagtcagattgaggccatgttccgaggagggatttttcagcctgagctactgtcatcctacaaggaggggctcttggaccagcagcaaggggatgtgaagacgggagccatgaagaaccttctggctcccatggacaccgtgcttaacaggctggttgatgctggctactgtgcagcatcccttcatacctctgttgtggccaactcagtggccttgctgtataagctctttctagattcttactttaaggagggaaaccagcttctctgcttccaggttctccccaggttgtttggctgcttgaagatttcacacctgcaggaggagcagagcaaagccctgtccacatcagattggaccacagagcttttggttgtggaacagctactaaactcagtggccaacaacaatatctacaacatcgctgccgacagaattcggcacgaagaggctcagttccgcttttaccgccacgtggctgagctgctgataaaccatgcacaagcacccataccggcctggttccgctgtctgaagactttgatatctctgaatcatttgattttggagccagacctggatgacctgctggcttcagcgtggatcgatgccgaggtaacagagtttcgaaccaaaaaagcccaggaggcgcttattcgtactgtcttccagacttatgccaaactccgacaagtgccacggttgtttgaagaggttttgggggtgatctgtcgtccagctgctgaggcactgaggcagcctgtgctggcctcgggcccctccacggtactctctgcatgcctcctggagctgcctccaagtcagatcctggacacgtggtcccttgtgctggagaagttccagtctttagtcttgccctatttgcagagtgatgccgacatggccctgaaattactgtcactgagcttgctgctgcactgcatcatgttcaacatgaggagcctggacagcagcacgcctctgcccattgtcagacggacacagtgcatgatggagaggatgatgagggagctcgtgcagcccctgctggcccttctcccggacaccccaggcccagagccagagctgtggctgcagaaggtcagtgactctgtgctcctgctctcttacacttgggcccaggtggacgctatgttcagtttgaactgtagccagtatcactctatgtctgggccccttataggtgttgctctggagatctcgaacctcccttcgttgctcccaggtgtaaaaacacagcattggaagaagatagagaagtttacagctcagttcagctctcttggtacatattgcttagaacagctgtacctgcagaaaatgaaaaggactttaatgcaaactagtttccggtctgaaggagccatccaaagtttgaggtgcgatgctgcctttattattggttccggcagaaaaagcttgaatcagagaacgacggcttcctgggatggccaagttgggatggtgagtggactcacataccctgtagcacactggcacttgattgtgtcaaatctcacaattttaatatcctatctgtgtccagatgatgtgggatacctggccagtgtcctgctgagaactttacccatgggcaaagcccaggaagtctcaatagatgaagaggcatacatcacactggaaaaaatatccaaagccttccttcatagccctctctttccagagatgcagtcccttcattctgctttcttaacgtgcgtaaccacaagttgctccagcattctgtgttctggtgcccagcgtgactcaggtcttgtcagtcagcagcttccctggctttttgaaaaggaccacatggttgtgggtcattgggaaaacagatttgcaaaagctggacccgaaggtatagaacctagaggagaaattgcccagaacttactgtccctggtcaagagtgacttccctatccagctggagggagagcagttggaaagcatcctggggcttttggaagtgatttctgccttacagctggacagcctcttgccaccctatcatgtgcattattttcttgtgttactgtccatggccgtcaccaaactaggatgctcttgctcctcctcactggctctcaagttcttgacgacttgctaccaacttcttggttacttgcaaaaggggaaaagtgctcgctctgtgttcaagatcatgtatggtagtgatatttttgaggttgtactgacctcattgttcagagctagtagtaggttccttattgagatggatgatcccgcttggctggaattcctccaagtgatagggacgttcttagaggagctaatgcagatgctcatccaaatgaagctgagcttggtgctcaattttagaaaaatcaccgcattcctctctagttccaaaccatacacggaggcagcttcaagcaaacaattagaaaatcagaacccccagggcaggcagctccttctggtgtctttaaccaggttgtgccatgtcctgggacctttcctcaaagagcagaagctgggccaagaggccccagcagcactgtctgagctgctgcagcaggttgtgctgcagacaggagctgtgctgcagctctgctcagtgccgggggcccggggctggcgccttccctcggtcctcatctcatccgtcagcacgctcttggaagccgacctgggtcagcactgcagggatggaggggccgacatttcccaaggaagcgacaggacgctgctctcccatgttgccctctaccagggtgtttactctcagatactgttggagttgccagctctcgcgggacatgatcagtcttttcaggcagccttgcagtttttgactctgttctttttggccccagaactgcatcccaaaaaggactccgtgtttacctccatgtttcattctgtgagaagagttcttgcagatcctgaaattcctgttcaggtcactcaggatattgagcctcatttgggagccttgttcacccaaatgttagaggttgggacgacagaggacttgaggctggtgatgcagtgtattctccagggactggatgtcagtaacatgtggaaagcagatgtgcaggctgttgtgtcagctgttacactgctgaggctgctactgaactgcccactcagtggagagaaagcaagtctgttgtggcgtgcgtgtccccagatagtcacagctttaacactcttaaaccgagaagcttctcaggagcagcctgtgtccctcacagtggtcgggcctgtcttagatgtcctggctgcactgctgcggcagggggaggaggccatcggcaacccccaccacgtcagcctggccttcagcatccttctcactgtccctttggaccatctgaagccgctggagtatggaagcgtcttcccgaggctgcacaacgtgctcttctcaatcctgcagtgtcaccctaaggtaatgctgaaagccatcccttctttcttgaactctttcaatagattggtgttttcagttatgcgggaagggcggcagaaggacaaaggaagcatagatgacctgcctacggtcctaaagtgtgcacgcctggttgaaagaatgtacagccacatcgccgcacgagctgaggagtttgctgtgttttccccatttatggtggcccagtacgtgttggaggtacagaaggtgaccttatatccagctgtgaaaagtctgctgcaggagggcatttacctcatcctggacctctgcatcgagcctgacgtccagttcctgcgggcctcgctgcagccgggaatgagagacatctttaaggagctctataatgactatctcaagtaccacaaggccaaacatgaaggagagaaaagatatacggcctaaggctatgggacagaagtgccgccagtgacactgtccagaggctttggctgcatggtctgaaagagctggagaatgaaagacttaagatgttctaattcgtagtattggtatacatagaaaatcctttggggtttatgtagtatattttgatgtattttacatcgtgtttttcttactattttttaatacatagttttatgcagtaagtattgcaatagaatcctgaaaattgaccctgggatgagattaattcaatagaaaaattgctgactcttgggacctttctgtgtttggttctcgtcttggctcagtggtttggtgttccctcgtctgcactggaaactacataaaacttggctttttactttgggtacatgggcgtataattcagccctgtttaaatatacttgcctttcaaattcttcaagtaacatgggaagtattcttgaaatgtcacattttctgccttccctctaagtatgctttctgaagaagtcagggaaagttagagtctgtggcctgaggtgtctgctctgggtggcgatagtgggcacctcaggcaggtcggtgacgtttagcacaggtgccagggctcctgcctgctcctcctgtgttagctctgtgaagttcatttaggaatttttttttcctatgcagtttaagaaataatcctaattgttttttcttattacctaagcaatatatttttattatagcaacctcagaaaagaaaaataaaaggataatttaaaaaactcattcatagtctcagttacccagataacctcggttgtcaccttggagtatcttgttgtagtccctttactatgtgtatgtatatagatgtgcatataaatatatatagtagctaaattggatcataaatgcatttttttaaagtt

SEQ ID NO: 2159 - protein, 1524 aa, Homo sapiens
MAAVYSGISLKLKSKTTSWEDKLKLAHFAWISHQCFLPNKEQVLLDWARQSLVAFYKKKLELKEDIVERLWIYIDNILHSRKLQNLLKNGKTINLQISLVKIINERVAEFSLSGSQRNICAVLRCCQGILSTPALAVIYTAKQELMVALLSQLCWSACRQPEGAVVAQLFEVIHLALGHYLLILQQQVNPRRAFGDVTAHLLQPCLVLRHLLSGGTWTQAGQGQLRQVLSRDIRSQIEAMFRGGIFQPELLSSYKEGLLDQQQGDVKTGAMKNLLAPMDTVLNRLVDAGYCAASLHTSVVANSVALLYKLFLDSYFKEGNQLLCFQVLPRLFGCLKISHLQEEQSKALSTSDWTTELLVVEQLLNSVANNNIYNIAADRIRHEEAQFRFYRHVAELLINHAQAPIPAWFRCLKTLISLNHLILEPDLDDLLASAWIDAEVTEFRTKKAQEALIRTVFQTYAKLRQVPRLFEEVLGVICRPAAEALRQPVLASGPSTVLSACLLELPPSQILDTWSLVLEKFQSLVLPYLQSDADMALKLLSLSLLLHCIMFNMRSLDSSTPLPIVRRTQCMMERMMRELVQPLLALLPDTPGPEPELWLQKVSDSVLLLSYTWAQVDAMFSLNCSQYHSMSGPLIGVALEISNLPSLLPGVKTQHWKKIEKFTAQFSSLGTYCLEQLYLQKMKRTLMQTSFRSEGAIQSLRCDAAFIIGSGRKSLNQRTTASWDGQVGMVSGLTYPVAHWHLIVSNLTILISYLCPDDVGYLASVLLRTLPMGKAQEVSIDEEAYITLEKISKAFLHSPLFPEMQSLHSAFLTCVTTSCSSILCSGAQRDSGLVSQQLPWLFEKDHMVVGHWENRFAKAGPEGIEPRGEIAQNLLSLVKSDFPIQLEGEQLESILGLLEVISALQLDSLLPPYHVHYFLVLLSMAVTKLGCSCSSSLALKFLTTCYQLLGYLQKGKSARSVFKIMYGSDIFEVVLTSLFRASSRFLIEMDDPAWLEFLQVIGTFLEELMQMLIQMKLSLVLNFRKITAFLSSSKPYTEAASSKQLENQNPQGRQLLLVSLTRLCHVLGPFLKEQKLGQEAPAALSELLQQVVLQTGAVLQLCSVPGARGWRLPSVLISSVSTLLEADLGQHCRDGGADISQGSDRTLLSHVALYQGVYSQILLELPALAGHDQSFQAALQFLTLFFLAPELHPKKDSVFTSMFHSVRRVLADPEIPVQVTQDIEPHLGALFTQMLEVGTTEDLRLVMQCILQGLDVSNMWKADVQAVVSAVTLLRLLLNCPLSGEKASLLWRACPQIVTALTLLNREASQEQPVSLTVVGPVLDVLAALLRQGEEAIGNPHHVSLAFSILLTVPLDHLKPLEYGSVFPRLHNVLFSILQCHPKVMLKAIPSFLNSFNRLVFSVMREGRQKDKGSIDDLPTVLKCARLVERMYSHIAARAEEFAVFSPFMVAQYVLEVQKVTLYPAVKSLLQEGIYLILDLCIEPDVQFLRASLQPGMRDIFKELYNDYLKYHKAKHEGEKRYTA

SEQ ID NO: 2160 - DNA, 2150 bp, Homo sapiens
ctcgagccacgaaggccccgctgtcctgtctagcagatacttgcacggtttacagaaattcggtccctgggtcgtgtcaggaaactggaaaaaaggtcataagcatgaagcgcagttcagtttccagcggtggtgctggccgcctctccatgcaggagttaagatcccaggatgtaaataaacaaggcctctatacccctcaaaccaaagagaaaccaacctttggaaagttgagtataaacaaaccgacatctgaaagaaaagtctcgctatttggcaaaagaactagtggacatggatcccggaatagtcaacttggtatattttccagttctgagaaaatcaaggacccgagaccacttaatgacaaagcattcattcagcagtgtattcgacaactctgtgagtttcttacagaaaatggttatgcacataatgtgtccatgaaatctctacaagctccctctgttaaagacttcctgaagatcttcacatttctttatggcttcctgtgcccctcatacgaacttcctgacacaaagtttgaagaagaggttccaagaatctttaaagaccttgggtatccttttgcactatccaaaagctccatgtacacagtgggggctcctcatacatggcctcacattgtggcagccttagtttggctaatagactgcatcaagatacatactgccatgaaagaaagctcacctttatttgatgatgggcagccttggggagaagaaactgaagatggaattatgcataataagttgtttttggactacaccataaaatgctatgagagttttatgagtggtgccgacagctttgatgagatgaatgcagagctgcagtcaaaactgaaggatttatttaatgtggatgcttttaagctggaatcattagaagcaaaaaacagagcattgaatgaacagattgcaagattggaacaagaaagagaaaaagaaccgaatcgtctagagtcgttgagaaaactgaaggcttccttacaaggagatgttcaaaagtatcaggcatacatgagcaatttggagtctcattcagccattcttgaccagaaattaaatggtctcaatgaggaaattgctagagtagaactagaatgtgaaacaataaaacaggagaacactcgactacagaatatcattgacaaccagaagtactcagttgcagacattgagcgaataaatcatgaaagaaatgaattgcagcagactattaataaattaaccaaggacctggaagctgaacaacagaagttgtggaatgaggagttaaaatatgccagaggcaaagaagcgattgaaacacaattagcagagtatcacaaattggctagaaaattaaaacttattcctaaaggtgctgagaattccaaaggttatgactttgaaattaagtttaatcccgaggctggtgccaactgccttgtcaaatacagggctcaagtttatgtacctcttaaggaactcctgaatgaaactgaagaagaaattaataaagccctaaataaaaaaatgggtttggaggatactttagaacaattgaatgcaatgataacagaaagcaagagaagtgtgagaactctgaaagaagaagttcaaaagctggatgatctttaccaacaaaaaattaaggaagcagaggaagaggatgaaaaatgtgccagtgagcttgagtccttggagaaacacaagcacctgctagaaagtactgttaaccaggggctcagtgaagctatgaatgaattagatgctgttcagcgggaataccaactagttgtgcaaaccacgactgaagaaagacgaaaagtgggaaataacttgcaacgtctgttagagatggttgctacacatgttgggtctgtagagaaacatcttgaggagcagattgctaaagttgatagagaatatgaagaatgcatgtcagaagatctctcggaaaatattaaagagattagagataagtatgagaagaaagctactctaattaagtcttctgaagaatgaagataaaatgttgatcatgtatatatatccatagtgaataaaattgtctcagtaaaaaaaaaaaaaaaaaaaaaaaaaaaaaaaaaaaaaaaaaaaaaaaaaaaaaaaaaaaaaaaa

SEQ ID NO: 2161 - protein, 642 aa, Homo sapiens
MKRSSVSSGGAGRLSMQELRSQDVNKQGLYTPQTKEKPTFGKLSINKPTSERKVSLFGKRTSGHGSRNSQLGIFSSSEKIKDPRPLNDKAFIQQCIRQLCEFLTENGYAHNVSMKSLQAPSVKDFLKIFTFLYGFLCPSYELPDTKFEEEVPRIFKDLGYPFALSKSSMYTVGAPHTWPHIVAALVWLIDCIKIHTAMKESSPLFDDGQPWGEETEDGIMHNKLFLDYTIKCYESFMSGADSFDEMNAELQSKLKDLFNVDAFKLESLEAKNRALNEQIARLEQEREKEPNRLESLRKLKASLQGDVQKYQAYMSNLESHSAILDQKLNGLNEEIARVELECETIKQENTRLQNIIDNQKYSVADIERINHERNELQQTINKLTKDLEAEQQKLWNEELKYARGKEAIETQLAEYHKLARKLKLIPKGAENSKGYDFEIKFNPEAGANCLVKYRAQVYVPLKELLNETEEEINKALNKKMGLEDTLEQLNAMITESKRSVRTLKEEVQKLDDLYQQKIKEAEEEDEKCASELESLEKHKHLLESTVNQGLSEAMNELDAVQREYQLVVQTTTEERRKVGNNLQRLLEMVATHVGSVEKHLEEQIAKVDREYEECMSEDLSENIKEIRDKYEKKATLIKSSEE

SEQ ID NO: 2162 - DNA, 3129 bp, Homo sapiens
  misc_feature (2703)..(2703): n is a, c, g, or t
gggcgagtactcctgattgtgacatcacattcatcccctgggcgatggagcttgtcactgggaaggaatactcagtcggagaatagccaacaagatgggttactgggagaatctcttcagtggcactgagtggaggcatcagggggttggagccttgtgaacagggaacctgccccccaacacttggaaggacctgggtttcagtgatgagacatggggtatgatgtaacccgtttccagggggatgttgacgaagatcttatctgccctatttgcagtggagtcttggaggagccagtacaggcacctcattgtgaacatgctttctgcaacgcctgcatcacccagtggttctctcagcaacagacatgtccagtggaccgtagtgttgtgacggtcgcccatctgcgcccagtacctcggatcatgcggaacatgttgtcaaagctgcagattgcctgtgacaacgctgtgttcggctgtagtgccgttgtccggcttgacaacctcatgtctcacctcagcgactgtgagcacaacccgaagcggcctgtgacctgtgaacagggctgtggcctggagatgcccaaagatgagctgcccaaccataactgcattaagcacctgcgctcagtggtacagcagcagcagacacgcatcgcagagctggagaagacgtcagctgaacacaaacaccagctggcggagcagaagcgagacatccagctgctaaaggcatacatgcgtgcaatccgcagtgtcaaccccaaccttcagaacctggaggagacaattgaatacaacgagatcctagagtgggtgaactcccttcagccagcaagagtgacccgctggggagggatgatctcgactcctgatgctgtgctccaggctgtaatcaagcgctccctggtggagagtggctgtcctgcttctattgtcaacgagctgattgaaaatgcccacgagcgtagctggccccagggtctggccacactagagactagacagatgaaccgacgctactatgagaactacgtggccaagcgcatccctggcaagcaggctgttgtcgtgatggcctgtgagaaccagcacatgggggatgacatggtgcaagagccaggccttgtcatgatatttgcgcatggcgtggaagagatataagagaactcgactggctatcaggaagagatggaaatcagaaaatcccatcactccagcagctgggacctgagtcctacccaccattcttaatactgtggcttatacctgagccacacatctccctgcccttctggcactgaagggccttggggtagtttgctcagcctttcaggtgggaaacccagatttcctccctttgccatattcccctaaaatgtctataaattatcagtctgggtgggaaagcccccacctccatccattttcctgcttagggtccctggttccagttattttcagaaagcacaaagagattcaatttccctggaggatcaggacagaggaaggaatctctaatcgtccctctcctccaaaaccagggaatcagagcagtcaggcctgttgactctaagcagcagacatcctgaagaaatggtaagggtggagccaaatctctagaaataagtagtgaggccgttaattggccatcactgatggcccttagggaaagactggacctctgtgccaagcagtatccctgttcagcccaccttaaaggtgtaggcacccactgggtctaccagtatgcaggttgggatactgaaaatttccagatgagctcttctttcctacaagttttcataattagggaatgccagggtttagggtaggggttaatctgttgggggttgatgtgtttagcaagaagctactcctagcttttgctaaaatatggttggcactgcctcttgtggcacaggccataattgttccatagacccctctctagccctgtgactgtagttagttactttgatgattttctttggccattgtttgtttatatttcacaaactccacctactgcccccccccctcttttttttaagaatggcctgatcatggctatctcagccacattgttggcaatttaatttatttacttccttttttttttttaagaaaggaaaaaagaaaaaaaaatcaaacttgaaacttttcttttgatgttcctattgtgggggttctggatagggtgggacagggatgggggtgtgttttatattttttccttttcagcacaacctttggctttaatataggaagagccaagggagtcctcggctgaacttacgatatctgccccaaacctctgtaaccccaactgaaatgaggagcttcctctcttcctgtgaaggatatgacagtccagcatcgatgcctgtgccctctggaaaaatttcctcctagcccttccagggccttatcataaaactctggatttagagtattcattttgaaggcaactcccccttccccaagtttccttggagctgtatagctgggttctaagcttcaccatgcaaatcagaaattttatctctaagtacaggctgtgccgtgtctcacccacacccccctggggacttcagttccatttcaggttacctggggtataccttgatccctagagtgactggcagagtaagagaaggggagagataataggtgtgattattttaatatgaaggtggnagtgtggttggagatagaaaggctcctccccaccatgtaatggcttcctctcagaattttattccaggctagcttgctgcaggtctgggtagttggatcatggctccactgggattggggtggaaagcttgaggggagtagggttccagctctgggacattgtgctcaggaatttgaaaacgctgctatacttactctggttactacatttcttccactcccctttcccctacctgccttaaccaaggctcatactgtcctgtccttaccctcagatggagccaggaagctcagtgaaaggcttccctaccctttgcactagtgtctctgcaggttgctggttgtgttgtatgtgctgttccatggtgttgactgcactaataataaaccttttactcaactctctaaaaaaaaaaaaaaaaaaaa

SEQ ID NO: 2163 - protein, 317 aa, Homo sapiens
MGYDVTRFQGDVDEDLICPICSGVLEEPVQAPHCEHAFCNACITQWFSQQQTCPVDRSVVTVAHLRPVPRIMRNMLSKLQIACDNAVFGCSAVVRLDNLMSHLSDCEHNPKRPVTCEQGCGLEMPKDELPNHNCIKHLRSVVQQQQTRIAELEKTSAEHKHQLAEQKRDIQLLKAYMRAIRSVNPNLQNLEETIEYNEILEWVNSLQPARVTRWGGMISTPDAVLQAVIKRSLVESGCPASIVNELIENAHERSWPQGLATLETRQMNRRYYENYVAKRIPGKQAVVVMACENQHMGDDMVQEPGLVMIFAHGVEEI

SEQ ID NO: 2164 - DNA, 5390 bp, Homo sapiens
gggggtgaaaggtaagggggagcgagagcgccagagagagaagatcggggggctgaaatccatcttcatcctaccgctccgcccgtgttggtggaatgagcgttgcatgtgtcttgaagagaaaagcagtgctttggcaggactctttcagcccccacctgaaacatcaccctcaagaaccagctaatcccaacatgcctgttgttttgacatctggaacagggtcgcaagcgcagccacaaccagctgcaaatcaggctcttgcagctgggactcactccagccctgtcccaggatctataggagttgcaggccgttcccaggacgacgctatggtggactacttctttcagaggcagcatggtgagcagcttgggggaggaggaagtggaggaggcggctataataatagcaaacatcgatggcctactggggataacattcatgcagaacatcaggtgcgttccatggatgaactgaatcatgattttcaagcacttgctctggagggaagagcgatgggagagcagctcttgccaggtaaaaagttttgggaaacagatgaatccagcaaagatggaccaaaaggaatattcctgggtgatcaatggcgagacagtgcctggggaacatcagatcattcagtttcccagccaatcatggtgcagagaagacctggtcagagtttccatgtgaacagtgaggtcaattctgtactgtccccacgatcggagagtgggggactaggcgttagcatggtggagtatgtgttgagctcatccccgggcgattcctgtctaagaaaaggaggatttggcccaagggatgcagacagtgatgaaaacgacaaaggtgaaaagaagaacaagggtacgtttgatggagataagctaggagatttgaaggaggagggtgatgtgatggacaagaccaatggtttaccagtgcagaatgggattgatgcagacgtcaaagattttagccgtacccctggtaattgccagaactctgctaatgaagtggatcttctgggtccaaaccagaatggttctgagggcttagcccagctgaccagcaccaatggtgccaagcctgtggaggatttctccaacatggagtcccagagtgtccccttggaccccatggaacatgtgggcatggagcctcttcagtttgattattcaggcacgcaggtacctgtggactcagcagcagcaactgtgggactttttgactacaattctcaacaacagctgttccaaagacctaatgcgcttgctgtccagcagttgacagctgctcagcagcagcagtatgcactggcagctgctcatcagccgcacatcggtttagctcccgctgcgtttgtccccaatccatacatcatcagcgctgctcccccagggacggacccctacacagctggattggctgcagcagcgacactaggcccagctgtggtccctcaccagtattatggagttactccctggggagtctaccctgccagtcttttccagcagcaagctgccgctgccgctgcagcaactaattcagctaatcaacagaccaccccacaggctcagcaaggacagcagcaggttctccgtggaggagccagccaacgtcctttgaccccaaaccagaaccagcagggacagcaaacggatccccttgtggcagctgcagcagtgaattctgcccttgcatttggacaaggtctggcagcaggcatgccaggttatccggtgttggctcctgctgcttactatgaccaaactggtgcccttgtagtgaatgcaggcgcgagaaatggtcttggagctcctgttcgacttgtagctcctgccccagtcatcattagttcctcagctgcacaagcagctgttgcagcagccgcagcttcagcaaatggagcagctggtggtcttgctggaacaacaaatggaccatttcgccctttaggaacacagcagcctcagccccagccccagcagcagcccaataacaacctggcatccagttctttctacggcaacaactctctgaacagcaattcacagagcagctccctcttctcccagggctctgcccagcctgccaacacatccttgggattcggaagtagcagttctctcggcgccaccctgggatccgcccttggagggtttggaacagcagttgcaaactccaacactggcagtggctcccgccgtgactccctgactggcagcagtgacctttataagaggacatcgagcagcttgacccccattggacacagtttttataacggccttagcttttcctcctctcctggacccgtgggcatgcctctccctagtcagggaccaggacattcacagacaccacctccttccctctcttcacatggatcctcttcaagcttaaacctgggaggactcacgaatggcagtggaagatacatctctgctgctccaggcgctgaagccaagtaccgcagtgcaagcagcgcctccagcctcttcagcccgagcagcactcttttctcttcctctcgtttgcgatatggaatgtctgatgtcatgccttctggcaggagcaggcttttggaagattttcgaaacaaccggtaccccaatttacaactgcgggagattgctggacatataatggaattttcccaagaccagcatgggtccagattcattcagctgaaactggagcgtgccacaccagctgagcgccagcttgtcttcaatgaaatcctccaggctgcctaccaactcatggtggatgtgtttggtaattacgtcattcagaagttctttgaatttggcagtcttgaacagaagctggctttggcagaacggattcgaggccacgtcctgtcattggcactacagatgtatggctgccgtgttatccagaaagctcttgagtttattccttcagaccagcagaatgagatggttcgggaactagatggccatgtcttgaagtgtgtgaaagatcagaatggcaatcacgtggttcagaaatgcattgaatgtgtacagccccagtctttgcaatttatcatcgatgcgtttaagggacaggtatttgccttatccacacatccttatggctgccgagtgattcagagaatcctggagcactgtctccctgaccagacactccctattttagaggagcttcaccagcacacagagcagcttgtacaggatcaatatggaaattatgtaatccaacatgtactggagcacggtcgtcctgaggataaaagcaaaattgtagcagaaatccgaggcaatgtacttgtattgagtcagcacaaatttgcaagcaatgttgtggagaagtgtgttactcacgcctcacgtacggagcgcgctgtgctcatcgatgaggtgtgcaccatgaacgacggtccccacagtgccttatacaccatgatgaaggaccagtatgccaactacgtggtccagaagatgattgacgtggcggagccaggccagcggaagatcgtcatgcataagatccggccccacatcgcaactcttcgtaagtacacctatggcaagcacattctggccaagctggagaagtactacatgaagaacggtgttgacttagggcccatctgtggcccccctaatggtatcatctgaggcagtgtcacccgctgttccctcattcccgctgacctcactggcccactggcaaatccaaccagcaaccagaaatgttctagtgtagagtctgagacgggcaagtggttgctccaggattactccctcctccaaaaaaggaatcaaatccacgagtggaaaagcctttgtaaatttaattttattacacataacatgtactattttttttaattgactaattgccctgctgttttactggtgtataggatacttgtacataggtaaccaatgtacatgggaggccacatattttgttcactgttgtatctatatttcacatgtggaaactttcagggtggttggtttaacaaaaaaaaaaagctttaaaaaaaaaagaaaaaaaggaaaaggtttttagctcatttgcctggccggcaagttttgcaaatagctcttccccacctcctcattttagtaaaaaacaaacaaaaacaaaaaaacctgagaagtttgaattgtagttaaatgaccccaaactggcatttaacactgtttataaaaaatatatatatatatatatatatataatgaaaaaggtttcagagttgctaaagcttcagtttgtgacattaagtttatgaaattctaaaaaatgccttttttggagactatattatgctgaagaaggctgttcgtgaggaggagatgcgagcacccagaacgtcttttgaggctgggcgggtgtgattgtttactgcctactggatttttttctattaacattgaaaggtaaaatctgattatttagcatgagaaaaaaaaatccaactctgcttttggtcttgcttctataaatatatagtgtatacttggtgtagactttgcatatatacaaatttgtagtattttcttgttttgatgtctaatctgtatctataatgtaccctagtagtcgaacatacttttgattgtacaattgtacatttgtatacctgtaatgtaaatgtggagaagtttgaatcaacataaacacgttttttggtaagaaaagagaattagccagccctgtgcattcagtgtatattctcaccttttatggtcgtagcatatagtgttgtatattgtaaattgtaatttcaaccagaagtaaatttttttcttttgaaggaataaatgttctttatacagcctagttaatgtttaaaaagaaaaaaatagcttggttttatttgtcatctagtctcaagtatagcgagattctttctaaatgttattcaagattgagttctcactagtgtttttttaatcctaaaaaagtaatgttttgattttgtgacagtcaaaaggacgtgcaaaagtctagccttgcccgagctttccttacaatcagagcccctctcaccttgtaaagtgtgaatcgcccttcccttttgtacagaagatgaactgtattttgcattttgtctacttgtaagtgaatgtaacatactgtcaattttccttgtttgaatatagaattgtaacactacacggtgtacatttccagagccttgtgtatatttccaatgaacttttttgcaagcacacttgtaaccatatgtgtataattaacaaacctgtgtatgcttatgcctgggcaactattttttgtaactcttgtgtagattgtctctaaacaatgtgtgatctttattttgaaaaatacagaactttggaatctgaaaaaaaaaaaaaaaaaaaaaaaaaaaaaaa

SEQ ID NO: 2165 - protein, 1186 aa, Homo sapiens
MSVACVLKRKAVLWQDSFSPHLKHHPQEPANPNMPVVLTSGTGSQAQPQPAANQALAAGTHSSPVPGSIGVAGRSQDDAMVDYFFQRQHGEQLGGGGSGGGGYNNSKHRWPTGDNIHAEHQVRSMDELNHDFQALALEGRAMGEQLLPGKKFWETDESSKDGPKGIFLGDQWRDSAWGTSDHSVSQPIMVQRRPGQSFHVNSEVNSVLSPRSESGGLGVSMVEYVLSSSPGDSCLRKGGFGPRDADSDENDKGEKKNKGTFDGDKLGDLKEEGDVMDKTNGLPVQNGIDADVKDFSRTPGNCQNSANEVDLLGPNQNGSEGLAQLTSTNGAKPVEDFSNMESQSVPLDPMEHVGMEPLQFDYSGTQVPVDSAAATVGLFDYNSQQQLFQRPNALAVQQLTAAQQQQYALAAAHQPHIGLAPAAFVPNPYIISAAPPGTDPYTAGLAAAATLGPAVVPHQYYGVTPWGVYPASLFQQQAAAAAAATNSANQQTTPQAQQGQQQVLRGGASQRPLTPNQNQQGQQTDPLVAAAAVNSALAFGQGLAAGMPGYPVLAPAAYYDQTGALVVNAGARNGLGAPVRLVAPAPVIISSSAAQAAVAAAAASANGAAGGLAGTTNGPFRPLGTQQPQPQPQQQPNNNLASSSFYGNNSLNSNSQSSSLFSQGSAQPANTSLGFGSSSSLGATLGSALGGFGTAVANSNTGSGSRRDSLTGSSDLYKRTSSSLTPIGHSFYNGLSFSSSPGPVGMPLPSQGPGHSQTPPPSLSSHGSSSSLNLGGLTNGSGRYISAAPGAEAKYRSASSASSLFSPSSTLFSSSRLRYGMSDVMPSGRSRLLEDFRNNRYPNLQLREIAGHIMEFSQDQHGSRFIQLKLERATPAERQLVFNEILQAAYQLMVDVFGNYVIQKFFEFGSLEQKLALAERIRGHVLSLALQMYGCRVIQKALEFIPSDQQNEMVRELDGHVLKCVKDQNGNHVVQKCIECVQPQSLQFIIDAFKGQVFALSTHPYGCRVIQRILEHCLPDQTLPILEELHQHTEQLVQDQYGNYVIQHVLEHGRPEDKSKIVAEIRGNVLVLSQHKFASNVVEKCVTHASRTERAVLIDEVCTMNDGPHSALYTMMKDQYANYVVQKMIDVAEPGQRKIVMHKIRPHIATLRKYTYGKHILAKLEKYYMKNGVDLGPICGPPNGII

SEQ ID NO: 2166 - DNA, 5640 bp, Homo sapiens
atggcccgaccgccgccactaccggggcctgagggggcctggcggagcccgagcgcggcccggcccgcagcgtggggccccgagcgcggtgaagagattgttttctgaaagctgcgttggaggctgtgacagagctgagagcctgtgtggagcggatggggaggctttctcaataacatggccctttgccattagccttgccatgaccacatttttcaccagcgtccccccctggattcaagatgcaaagcaggaggaggaagtgggctggaaactagttcccaggcctcggggccgggaggcggagagtcaagtgaagtgccaatgtgaaatttcgggaacacctttctcaaatggggagaagctgaggcctcacagcctcccgcaaccagagcagagaccatatagctgccctcagctgcactgtggcaaggcttttgcttccaaatacaagctgtataggcacatggccacccactcagcccagaaaccccaccagtgtatgtactgtgataagatgtttcaccgcaaggaccatctgcggaaccatctgcagacccatgatcctaacaaagaggccctccactgctctgagtgcggtaagaattacaatacgaagctgggctaccggcgccacctggccatgcatgctgccagcagcggtgacctcagctgcaaggtgtgcctgcagacctttgagagtacccaggccctgctagagcacctgaaggcccactcacgccgggtagcaggcggtgccaaggagaagaagcacccctgtgaccactgcgaccggcggttctatactcgtaaggatgtacggcggcacctagtggtgcacacaggccgtaaggacttcctgtgccagtactgtgcccagcggtttggccgtaaggaccacctgacgcgtcatgtcaagaagagccactcgcaggagctgctcaagatcaagacagagcccgtggacatgttaggcctactcagctgcagctccacagtcagtgtgaaggaagagctgagccctgtgctgtgcatggcctctcgggacgtaatggggaccaaggccttccctggcatgttgcccatgggcatgtatggtgcccacatccctaccatgcccagcacgggcgtgccacactccctggtgcacaacacgctgcccatgggtatgagctaccctctggaatcctcacctatctcttccccagctcagctccctccaaaataccagcttggatctacctcatacttgcccgacaaattgcccaaagtggaggtggatagttttctggcggagcttcctggaagcctgtctctctcatccgctgaaccccagcccgcctcacctcagccggcggcagctgcggccctcctagatgaagcactgcttgccaagagccccgccaacctctctgaggccctctgcgctgctaatgtggacttctcccacctactgggctttcttccactcaacctgcccccgtgtaacccacctggggccacaggaggcctggtcatgggctactcccaggctgaggcacagcccctgcttaccactttgcaagctcagcctcaagattccccaggagctgggggaccactgaactttgggcctctgcactccttgcctcctgtcttcacgtctggcctgagtagcaccaccctgcctcgtttccatcaagcattccagtagcccccacagaggccctcagctcagtttttggctctgttatggagccttagtacccaccccgtctgtgtcccccatgaaggcagctgagctttcagagctgggttcaaaaaaaaaaattccagtgtctgtatacaggagcacttggtttgggggttcaggctctaggatcgattccagaaggagccttgagccccaaccccgtgaaaagatctcataccgtaggacttcaggtattatttacttttatttttttgacctgaatcgggagccacacttggccctcttcctctccaaagcgccagaacctccttctctttggagaatggggaggcctcttggagacacagagggtttcaccttggatgacctctagagaaattgcccaagaagcccaccttctggtcccaacctgcagaccccacagcagtcagttggtcaggccctgctgtagaaggtcacttggctccattgcctgcttccaaccaatgggcaggagagaaggcctttatttctcgcccacccattcctcctgtaccagcacctccgttttcagtcagtgttgtccagcaacggtaccgtttacacagtcacctcagacacaccatttcacctcccttgccaagctgttagccttagagtgattgcagtgaacactgtttacacaccgtgaatccattcccatcagtccattccagttggcaccagcctgaaccatttggtacctggtgttaactggagtcctgtttacaaggtggagtcggggcttgctgacttctcttcatttgaggtcacatttttcccccgtggggaaataaactgactttggactgcttcagtctctgccatcttccatgactgcatttgttcctgcctgcctcggcggtatccacagaagacaggcaagaggattggagcagttttctcacaggtctgcaattctgtttttctccaagtacattatgaccccctcatccttctcttgaactggagaggggaagaaatgaaaggcatgcccacgtccgtcacctccccatcccctagtccccaccttgaacatcatgagctgttgttattagtcttggaagcagagtctgggttggtgtggatagcaaaggaggaagtctgagcccctcattggtcttcctcccacctgtcccttttccgggaagttgtggaattgttggaagaagagtttgcagaaggttaggaatgggtagatagctaagtcctaatctatgggtacattgttgtgtcccaaaccaaaattttccttatccacaatgtcccttctgtctcttccactttacagtggactcggccactgtgcataggcttctctgctctccatcaaatcacttccactttcctgtgcccccacccccgcctccagttttccgctagtatccggcaaggtttcttgcaacaaatgattagttcttttcttctgactcgtggggctccctgctgcagagagcacagcccttgcctggagcccaggaaccccatccttgcttcatctcagttcttcatgggcttcactcttcccactcacggaagggaggtagctcagggacctccactgtgggacccttgagatgcttccactctgattcagaaacacacttctacctctttactgttaactcttaacagatgcagtcagcagtttctgggcacttctctcagtaggtgcctcatgctgacttctccactagggtttcaggacaaactaccaaggaattgcctcagcctcctaccagtcctccctcacccaccttctgtctaggttcacttggtttgtcatcaggaactgagcaggtccaggactcagctttctgcttcagcctaagccagtactccttgtttgaggtaaaagccttaaaatttagctccctagctcttgattagaagcaatttggagtaagtgtgttttgatttaggcagggtagcttgggatacctttttaaaaacaccagatattaaaatgtctggcaaggttagaatcagactagatgatttgcttctaaaaattagtttcagtgagtcccagggactaattaaggtttattttaaaaagtgtctaccttggtacgcagccacctcctgcatgctgtgcatgttattgggacttgtattataggcgatggtatgtgagaatccagttgggactcgctgttgccatcctctttgttgtatctggttttcatcactagactcagcaacccttctcaccttaactgccaccttccctacactctcagtttacagaggccactgggcctctggctgcagaatacaaagtcccgggctgttagaggagtcctttcctctctgcctgccctttcctgtccctccctgaattctctctccccgtaagtgatgctggaaaagtcataggactggcaaagcaactgtttaaaccctttgtaaccggggccttgcccccacctcctgtcttttctccttgccttccccactcctgtgtcctcccatctatcctgtctttcctttcctcctctcagtgtcctcagcacccacaaggaattttcctatcactgtgaactttgctggtacagaggaataatatctgccttcacctttttttttttggaccatagctagccagtcatttcttaaacctcccttcctaaaatctggggggtcggggggaaagaaaaaaaaagccttagtggcctggttgttcaaaggataagaatagctttatcctgcactcagtacccgaactcacttcagtatgcttactgaggccatgagaacctgaggggcatctgcccaggacagaagccatggcatatgacaaagaccaatgagggaccaggaaaaaaagtgatgtcccctttccctgccacctccagcctctgccagcaatgagctgtccccctcccaccctacacagtagctggtcagggctgagtacagtcctgggggtaaggggatgacatgcccaggtgtcagctcaaaggatctctgcatcatcttgaggtgggaggcagggaaaggagcgccaatgaggttccctgcaacccccgccctccagcccaccgcccagccttttacaaatggcattttcttaattgaaaatccgggaagcaggtgtgattacttttttgctcgtagatattgtcctaagttggaattctcccactgccctaaaactttccctagtagtcctttaaactcccccctccctttttggtagctgtttctccgtcctctctccacctgccctcttatctaggagctgtttgtaagcacgatttttttaacaggttatattgtacaggatcaatattttgctttttaacaaggatatttatgtaataagaaactttgccttaggcaggtgttggccagaaaagtccagattcctctgggatcccaccctggcctctcctggaactctgaacctgctgtggaaggaattggccatgaccttcacctctggagagtagggtctatggcgagggaaaagggtgttcaccatgataacctagtgcctccatagaggggtttggaaaaattccagtccgatttctttgtgtgtcagctgacttccttagctgattgttcccacttgcacctctccacctttggcactagaactcctgagacaccacttctcatgcttctccctccctaccagcggtcaaggctttggagccactcttttgtaactccagattatttaaagagaaaagtacaagacagaaatcttctagcactttgtaaacacagtgaataacctcttggagtatttttggctttatataaaacaaggtttttaattgtaaagtataagtgccattagaaaatgcacagggcatatctttgttaaagtagatttttcaatgttttacagaattacattttcaaaaaaaggtttttataatgaagttgtttattaaaaacttctgaatgatgtgttc

SEQ ID NO: 2167 - protein, 496 aa, Homo sapiens
MTTFFTSVPPWIQDAKQEEEVGWKLVPRPRGREAESQVKCQCEISGTPFSNGEKLRPHSLPQPEQRPYSCPQLHCGKAFASKYKLYRHMATHSAQKPHQCMYCDKMFHRKDHLRNHLQTHDPNKEALHCSECGKNYNTKLGYRRHLAMHAASSGDLSCKVCLQTFESTQALLEHLKAHSRRVAGGAKEKKHPCDHCDRRFYTRKDVRRHLVVHTGRKDFLCQYCAQRFGRKDHLTRHVKKSHSQELLKIKTEPVDMLGLLSCSSTVSVKEELSPVLCMASRDVMGTKAFPGMLPMGMYGAHIPTMPSTGVPHSLVHNTLPMGMSYPLESSPISSPAQLPPKYQLGSTSYLPDKLPKVEVDSFLAELPGSLSLSSAEPQPASPQPAAAAALLDEALLAKSPANLSEALCAANVDFSHLLGFLPLNLPPCNPPGATGGLVMGYSQAEAQPLLTTLQAQPQDSPGAGGPLNFGPLHSLPPVFTSGLSSTTLPRFHQAFQ

SEQ ID NO: 2168 - DNA, 3235 bp, Homo sapiens
ggttgctgtccctggacccctaccatggaggagaccatcaaagatccccccacatcagctgtcttgctggatcactgtcatttctctcaggtcatctttaacagtgtggagaagttctacatccctggaggggacgtcacatgtcattataccttcacccagcatttcatccctcgtcgaaaggattggattggcatctttagagtggggtggaagacaacccgtgagtattacaccttcatgtgggttactttgcccattgacctaaacaacaaatcagctaaacagcaggaagtccaattcaaagcttactacctgcccaaggatgatgagtattaccagttctgctatgtggatgaggatggtgtggtccggggagcaagtattcctttccaattccgtccagaaaatgaggaagacatcctggttgttaccactcagggagaggtggaagagattgagcagcacaacaaggagctttgcaaagaaaaccaggagctgaaggacagctgtatcagcctccagaagcagaactcagacatgcaggctgagctccaaaagaagcaggaggagctagaaaccctacagagcatcaataagaagttggaactgaaagtgaaagaacagaaggactattgggagacagagctgcttcaactgaaagaacaaaaccagaagatgtcctcagaaaatgagaagatgggaatcagagtggatcagcttcaggcccagctgtcaactcaagagaaagaaatggagaagcttgttcagggagatcaagataagacagagcagttagagcagctgaaaaaggaaaatgaccacctctttctcagtttaactgaacagaggaaggaccagaagaagctcgagcagacagtggagcaaatgaagcagaatgaaactactgcaatgaagaaacaacaggaattaatggatgaaaactttgacctgtcaaaaagactgagtgagaacgaaattatatgtaatgctctgcagagacagaaagagagattggaaggagaaaatgatcttttgaagagggagaacagcagattgctcagttacatgggtctggattttaattctttgccgtatcaagtacctacttcagatgaaggaggcgcaagacaaaatccaggacttgcctatggaaacccatattctggtatccaagaaagttcttcccccagcccgctctccatcaagaaatgccctatctgcaaagcagatgatatttgtgatcacaccttggagcaacagcagatgcagcccctttgtttcaattgtccaatttgtgacaagatcttcccagctacagagaagcagatctttgaagaccacgtgttctgccactctctctgagtatcccaacctcttggatgtatacagagattttatagaatagaacctatagcttctaccatgagttatatgagtcaagatcctgcctaacctgaaattattagggatttactcagccctgctgccgctaacagtggagttatgtcactgatctgaaggtcactgttaagggcttctgctgccatccttgtgggttgctacctttaagtcgcataactctagctgtatcatcctctcacctgtcattcttctgagggtctcagtacaagggccctgggatggagccaacctgggtattcacaacaggcctgacttgatactaagtgattagttttccaagttgtcccactgccattcaaagtcagcccttgagtgtatttgttctcagtcctaaccctggggccagagattggtccgaggttgagaattccttcctcctcatccttggtgttgctttctccaaatgattgttttagactagccaaaaatgccgtggcaaagagctcagaaatccaatttggataccaaaggtttctcatgttaatttctcagcccccaaagaagcatcttactcctgaaccttagacaggaagtattgtttcagtcacagaaagcttttctgggtacctctggttagcactttctactctctgatatttcctatgtacatagcttttattgttgtaaatcctttcttaatggttaaataggattgttagcaactatgggtttgcagttttctgagtaggtgagttttgaatatgggtaaatcagaataatgagacaacttgttaatctctttaatactaaaaataaattactcttctatttcagggacttaggtaatttaaaataaaccttcaatttatggtcttctgttttgaagctcatgggaaaattgtgatcaaaagggctatgggaagggcagaccccgccaatgatttctcttcacctgtcttaagattaaataaaaaagagtgtcctggcagttatcttgaggtggggaaggaggtgatgaaacattagtttgtgaaatccaaggccctggcttgctttctttcttttttttttttttttttttgaaacagtctctctctgtcacccaggctggcgtgcaatggcgcagttgactcactacagcctctgcctcccaggttcaagcgattctcatgccttagcctcccaagtagctgggattacaggtgtgtgccgcaatgcccagctaatttttgtgtttttagtagagacagggtttcactatgttggccaggctggtctcgaactcctggcctcacgtgatctgtccacttcagccgtccaaagtgctgggattacaagcgtgagccactgtgctgggcccgaggccctgacttcttgctgtaactttccatgcattttttttaaaaggagcagtgtggattttcgcaccctttgtgaactaagttcaatgcgctctatccaaatttgcctaattgaactataagaaagtaataattccattttctatcccctcagggactgaacaaatggaaataactcccaggcagtatcaggtggtcactacagagacttccacaaaaacttttgaatgatgtgaaacacgatgtcatgaataagggttgagccaactatagctctgtgttcctactgggctttccctaatgtggttgggagttatgccctagactaactgtattgtcctagtcacagctccttgctttgatttcatccttgataaaatgaagatgaaacttaaaaaaaaaaaaaaaaaaaaaaaaaaaaaaaaaaaaaaaaaaaaaaaaaaaaaaaaaaaaaaaaaaaaaaaaaaaaaaaaaaaaaaaaaaaaaaaaaaaaaaaaaaaaaaaaaaaa

SEQ ID NO: 2169 - protein, 446 aa, Homo sapiens
MEETIKDPPTSAVLLDHCHFSQVIFNSVEKFYIPGGDVTCHYTFTQHFIPRRKDWIGIFRVGWKTTREYYTFMWVTLPIDLNNKSAKQQEVQFKAYYLPKDDEYYQFCYVDEDGVVRGASIPFQFRPENEEDILVVTTQGEVEEIEQHNKELCKENQELKDSCISLQKQNSDMQAELQKKQEELETLQSINKKLELKVKEQKDYWETELLQLKEQNQKMSSENEKMGIRVDQLQAQLSTQEKEMEKLVQGDQDKTEQLEQLKKENDHLFLSLTEQRKDQKKLEQTVEQMKQNETTAMKKQQELMDENFDLSKRLSENEIICNALQRQKERLEGENDLLKRENSRLLSYMGLDFNSLPYQVPTSDEGGARQNPGLAYGNPYSGIQESSSPSPLSIKKCPICKADDICDHTLEQQQMQPLCFNCPICDKIFPATEKQIFEDHVFCHSL

SEQ ID NO: 2170 - DNA, 6719 bp, Homo sapiens
tcggcgggaagcggcgatcctgccaccgggaggtgtggaagagccgggtagattctggctacattggagattggttgctttctaaaactgaaggagaagcccatgaagagatggtggattctcactgagttttgactagcggaagaaaagagagagttcaagtggatggccttgaggacttgaaaagctgagatatgatgattttgaagtcatttcacatcgaagccatgatttaaatatcggcgttaagatttcaacaagaaaaacttaagcttccttggattcccacgtcaaaggaaagtttcaagctttcagaaggagttctcactcgaagataaagaacagctcgctaaccacgaaagaggaatcgatgctcagcttttagttgcacttcctaaagttgcagaattaagacaaatctttgaaccaaagaagaaagaattcttagaaatgaaaagaaaagaaagaattgccaggcgcctggaagggattgaaaatgacactcagcccatcctcttgcagagctgcacaggattggtgactcaccgcctgctggaggaagacacccctcgatacatgagagccagcgaccctgccagcccccacatcggccgatcaaatgaagaggaggaaacttctgattcttctctagaaaagcaaactcgatccaaatactgcacagaaacctccggtgtccacggtgactcaccctatggttcgggtaccatggacacccacagtctggagtccaaagccgaaagaattgcaaggtacaaagcagaaagaaggcgacagctggcagagaagtatgggctgactctggatcccgaggccgactccgagtatttatcccgctataccaagtccaggaaggagcctgatgctgtcgagaagcggggaggaaaaagtgacaaacaggaagagtcaagcagagatgcgagttctctgtaccccgggaccgagacgatggggctcaggacctgtgccggtgaatccaaggactatgccctccatgtgggtgacggctcttccgacccggaggtgctgctgaacatagaaaaccaaagacgaggtcaagagctgagtgccacccggcaggcccatgacctgtccccagcagccgagagttcctcgaccttctctttctctgggcgagactcctccttcactgaagtgccacggtcccccaagcacgcccacagctcctccctgcagcaggcagcctcccggagcccctcctttggtgacccacagctatcccctgaggcccgacccaggtgcacttcacattcagaaacgccaactgtcgatgatgaagaaaaggtggatgaacgagccaagctgagcgtcgccgccaagaggttgcttttcagggagatggaaaaatcttttgatgaacaaaatgttccaaagcgacgctcaagaaacacagctgtggagcagaggctacgccgtctgcaggacaggtccctcacccagcccatcaccactgaagaggtggtcatcgcagccacattgcaggcctctgctcaccaaaaggccttagccaaggaccagacaaatgagggcaaagagcttgctgagcaaggagaacctgattcctccactctaagcttggccgaaaagttggccttgtttaacaaattgtcccagccagtctcaaaagcgatttctacccggaacagaatagacacgagacagaggagaatgaacgctcgctatcaaactcagccagtcacactgggagaggtggagcaggtgcagagtggaaagctcattcctttctcacctgccgtgaacacatcagtgtctaccgtagcatccacggttgctccaatgtatgccggagatcttcgcacaaagccacctcttgaccacaatgcaagtgccactgactataagttttcttcttcaatagaaaattcggactctccagttagaagcattctgaaatcgcaagcttggcagcctttggtagagggtagcgagaacaagggaatgttgagagaatatggagagacagaaagcaagagagctttgacaggtcgagacagtgggatggagaagtatgggtcctttgaggaagcagaagcatcctaccccatcctgaaccgagccagggaaggagacagccataaggaatctaaatatgctgttcccagaagaggaagcctggaacgggcgaaccctcccatcacccacctcggggatgaaccgaaggaattttccatggctaaaatgaatgcacaaggaaacttggacttgagggacaggctgccctttgaagagaaggtggaggtggagaatgttatgaaaaggaagttttcactaagagcggcagagttcggggagcccacttccgagcagacggggacagctgctgggaaaactattgctcaaaccacagcccccgtgtcctggaagccccaggattcttcggaacagccacaggagaagctctgcaagaatccatgtgcgatgtttgctgctggagagatcaaaacgccgacaggggagggccttcttgactcacccagcaaaaccatgtctattaaagaaagattggcactgttgaagaaaagcggggaggaagattggagaaacagactcagcaggaggcaggagggcggcaaggcgccggccagcagcctgcacacccaggaagcagggcggtccctcatcaagaagcgggtcacagaaagtcgagagagccaaatgacgattgaggagaggaagcagctcatcactgtgagagaggaggcctggaagacgagaggcagaggagcggccaacgactcgacccagttcactgtggctggcaggatggtgaagaaaggtttggcgtcacctactgccataaccccagtagcctcagccatttgcggtaaaacaagaggcaccacacccgtttccaaacccctggaagatatcgaagccagaccagatatgcagttagaatcggacctgaagttggacaggctggaaacctttctaagaaggctgaataacaaagttggcgggatgcacgaaacggtgctcactgtcaccggcaaatctgtgaaggaggtgatgaagccagatgatgatgaaacctttgccaaattttaccgcagcgtggattataatatgccaagaagtcctgtggagatggatgaggacttcgatgtcattttcgatccttatgcacccaaattgacgtcttccgtggccgagcacaagcgggcagttaggcccaagcgccgggttcaggcctccaaaaaccccctgaaaatgctggcggcaagagaagatctccttcaggaatacactgagcagagattaaacgttgccttcatggagtcaaagcggatgaaagtagaaaagatgtcttccaactccaacttctcagaagtcaccctggcgggtttagccagtaaagaaaacttcagcaacgtcagcctgcggagcgtcaacctgacggaacagaactctaacaacagcgccgtgccctacaagaggctgatgctgttgcagattaaaggaagaagacatgtgcagaccaggctggtggaacctcgagcttcggcgctcaacagtggggactgcttcctcctgctctctccccactgctgcttcctgtgggtaggagagtttgcaaacgtcatagaaaaggcgaaggcctcagaacttgcaactttaattcagacaaagagggaacttggttgtagagctacttatatccaaaccattgaagaaggaattaatacacacactcatgcagccaaagacttctggaagcttctgggtggccaaaccagttaccaatctgctggagacccaaaagaagatgaactctatgaagcagccataatagaaactaactgcatttaccgtctcatggatgacaaacttgttcctgatgacgactactgggggaaaattccgaagtgctcccttctgcaacccaaagaggtactggtgtttgattttggtagtgaagtttacgtatggcatgggaaagaagtcacattagcacaacgaaaaatagcatttcagctggcaaagcacttatggaatggaacctttgactatgagaactgtgacatcaatcccctggatcctggagaatgcaatccgcttatccccagaaaaggacaggggcggcccgactgggcgatatttgggagacttactgaacacaatgagacgattttgttcaaagagaagtttctggattggacggaactgaagagatcgaatgagaagaaccccggggaacttgcccagcacaaggaagaccccaggactgatgtcaaggcatacgatgtgacacggatggtgtccatgccccagacgacagcaggcaccatcctggacggagtgaacgtcggccgtggctatggcctggtggaaggacacgacaggaggcagtttgagatcaccagcgtttccgtggatgtctggcacatcctggaattcgactatagcaggctccccaaacaaagcatcgggcagttccatgagggggatgcctatgtggtcaagtggaagttcatggtgagcacggcagtgggaagtcgccagaagggagagcactcggtgagggcagccggcaaagagaagtgcgtctacttcttctggcaaggccggcactccaccgtgagtgagaagggcacgtcggcgctgatgacggtggagctggacgaggaaaggggggcccaggtccaggttctccagggaaaggagcccccctgtttcctgcagtgtttccagggggggatggtggtgcactcggggaggcgggaagaggaagaagaaaatgtgcaaagtgagtggcggctgtactgcgtgcgtggagaggtgcccgtggaagggaatttgctggaagtggcctgtcactgtagcagcctgaggtccagaacttccatggtggtgcttaacgtcaacaaggccctcatctacctgtggcacggatgcaaagcccaggcccacacgaaggaggtcggaaggaccgctgcgaacaagatcaaggaacaatgtcccctggaagcaggactgcatagtagcagcaaagtcacaatacacgagtgtgatgaaggctccgagccactcggattctgggatgccttaggaaggagagacaggaaagcctacgattgcatgcttcaagatcctggaagttttaacttcgcgccccgcctgttcatcctcagcagctcctctggggattttgcagccacagagtttgtgtaccctgcccgagccccctctgtggtcagttccatgcccttcctgcaggaagatctgtacagcgcgccccagccagcacttttccttgttgacaatcaccacgaggtgtacctctggcaaggctggtggcccatcgagaacaagatcactggttccgcccgcatccgctgggcctccgaccggaagagtgcgatggagactgtgctccagtactgcaaaggaaaaaatctcaagaaaccagcccccaagtcttaccttatccacgctggtctggagcccctgacattcaccaatatgtttcccagctgggagcacagagaggacatcgctgagatcacagagatggacacggaagtttccaatcagatcaccctcgtggaagacgtcttagccaagctctgtaaaaccatttacccgctggccgacctcctggccaggccactcccggagggggtcgatcctctgaagcttgagatctatctcaccgacgaagacttcgagtttgcactagacatgacgagggatgaatacaacgccctgcccgcctggaagcaggtgaacctgaagaaagcaaaaggcctgttctgagtggggagacgccagaggagcctcacggtcacgtccaacaacaccactgcaccagggaaatggatatatatttttggactggtgtttttcacaaagtatttttcaatcagagttttcagaacctgacattgttaaagatactgcttgtcccggagttgtgtattttgtaaatgttcaagggaactgtttggaaacttctttccaccattcaggaggttatcagaattaataaaagtatctgttatgtgcacttaagccgcagctgctatagatagcactgccttcttgttccagctaggcaatgcctttttttttttttttgaagcagttctctttataaagtgttattttgatagtttgtggattctaaaatatatatatatttatataaacaccatataagtcaaatatgtatttaacaaagcaatatgtattcattcactttcaagatttgttttggtgtcaaaataacatgaaaaggtagatggagttgcttctgttgaattagctctgccaccaatatgtatcttcatacacgtttggaaatgtttcctgcagcattaggtatgacttgttctgagtactgcttccggtgctaaaatgaacaaagaatttgtacttaatggcatggactctggagaatctatgcgaatcaacctttctaccttaatatctccccaaaaatgtatagtgccttgtttttatgtacagtttatatacagaaaagtttgctctgcatttttgatgatggtttggaacattatctacaattttactctcaaatagtcaaaataaaaacatctcaatttctaataccggttgtaaacaaacagtacacatgtcattttgtgatataggactcccaaataaaagtatcagaataaacacaacaattaactggt

SEQ ID NO: 2171 - protein, 1788 aa, Homo sapiens
MKRKERIARRLEGIENDTQPILLQSCTGLVTHRLLEEDTPRYMRASDPASPHIGRSNEEEETSDSSLEKQTRSKYCTETSGVHGDSPYGSGTMDTHSLESKAERIARYKAERRRQLAEKYGLTLDPEADSEYLSRYTKSRKEPDAVEKRGGKSDKQEESSRDASSLYPGTETMGLRTCAGESKDYALHVGDGSSDPEVLLNIENQRRGQELSATRQAHDLSPAAESSSTFSFSGRDSSFTEVPRSPKHAHSSSLQQAASRSPSFGDPQLSPEARPRCTSHSETPTVDDEEKVDERAKLSVAAKRLLFREMEKSFDEQNVPKRRSRNTAVEQRLRRLQDRSLTQPITTEEVVIAATLQASAHQKALAKDQTNEGKELAEQGEPDSSTLSLAEKLALFNKLSQPVSKAISTRNRIDTRQRRMNARYQTQPVTLGEVEQVQSGKLIPFSPAVNTSVSTVASTVAPMYAGDLRTKPPLDHNASATDYKFSSSIENSDSPVRSILKSQAWQPLVEGSENKGMLREYGETESKRALTGRDSGMEKYGSFEEAEASYPILNRAREGDSHKESKYAVPRRGSLERANPPITHLGDEPKEFSMAKMNAQGNLDLRDRLPFEEKVEVENVMKRKFSLRAAEFGEPTSEQTGTAAGKTIAQTTAPVSWKPQDSSEQPQEKLCKNPCAMFAAGEIKTPTGEGLLDSPSKTMSIKERLALLKKSGEEDWRNRLSRRQEGGKAPASSLHTQEAGRSLIKKRVTESRESQMTIEERKQLITVREEAWKTRGRGAANDSTQFTVAGRMVKKGLASPTAITPVASAICGKTRGTTPVSKPLEDIEARPDMQLESDLKLDRLETFLRRLNNKVGGMHETVLTVTGKSVKEVMKPDDDETFAKFYRSVDYNMPRSPVEMDEDFDVIFDPYAPKLTSSVAEHKRAVRPKRRVQASKNPLKMLAAREDLLQEYTEQRLNVAFMESKRMKVEKMSSNSNFSEVTLAGLASKENFSNVSLRSVNLTEQNSNNSAVPYKRLMLLQIKGRRHVQTRLVEPRASALNSGDCFLLLSPHCCFLWVGEFANVIEKAKASELATLIQTKRELGCRATYIQTIEEGINTHTHAAKDFWKLLGGQTSYQSAGDPKEDELYEAAIIETNCIYRLMDDKLVPDDDYWGKIPKCSLLQPKEVLVFDFGSEVYVWHGKEVTLAQRKIAFQLAKHLWNGTFDYENCDINPLDPGECNPLIPRKGQGRPDWAIFGRLTEHNETILFKEKFLDWTELKRSNEKNPGELAQHKEDPRTDVKAYDVTRMVSMPQTTAGTILDGVNVGRGYGLVEGHDRRQFEITSVSVDVWHILEFDYSRLPKQSIGQFHEGDAYVVKWKFMVSTAVGSRQKGEHSVRAAGKEKCVYFFWQGRHSTVSEKGTSALMTVELDEERGAQVQVLQGKEPPCFLQCFQGGMVVHSGRREEEEENVQSEWRLYCVRGEVPVEGNLLEVACHCSSLRSRTSMVVLNVNKALIYLWHGCKAQAHTKEVGRTAANKIKEQCPLEAGLHSSSKVTIHECDEGSEPLGFWDALGRRDRKAYDCMLQDPGSFNFAPRLFILSSSSGDFAATEFVYPARAPSVVSSMPFLQEDLYSAPQPALFLVDNHHEVYLWQGWWPIENKITGSARIRWASDRKSAMETVLQYCKGKNLKKPAPKSYLIHAGLEPLTFTNMFPSWEHREDIAEITEMDTEVSNQITLVEDVLAKLCKTIYPLADLLARPLPEGVDPLKLEIYLTDEDFEFALDMTRDEYNALPAWKQVNLKKAKGLF

SEQ ID NO: 2172 - DNA, 8300 bp, Homo sapiens
cactgctctgactgcgtcctccccaggctgaagtgtcctcaggtttcatgtggatttgcccagtaatggatggctccaccgaggccaggttggggaagttcagcctcgaggacactaggggacgaaaaacttcaaaaagaagactctttttattaatattttggcgttctttttggagaggaacttttgggatgtagcctttacctgtttcctgaatttgacatccaaaaagccttttggaaaacaccattctaaatttatcctgttctgaatcatcatcgcttctgatagatgcagttgcttgctgacatcgtgatctttgattttgtacaacgctatttgggctaacttttgggattttactttgtgcttagaatttgaaagtagtattcattggaaagagactccaagaaaatactcgaagacatcaaaagctggattcgagggtataacgtgttttgttttgttttttaaattagaaaaataaggaattgcagtgtgattttctttccccctttaacttagaggaacgaggattatacagaaatttgaaatttcaacaagaaaaacttaagcttccttggattcccacgtcaaaggaaagtttcaagctttcagaaggagttctcactcgaagataaagaacagctcgctaaccacgaaagaggaatcgatgctcagcttttagttgcacttcctaaagttgcagaattaagacaaatctttgaaccaaagaagaaagaattcttagaaatgaaaagaaaagaaagaattgccaggcgcctggaaggaattgaaaatgacactcagcccatcctcttgcagagctgcacaggattggtgactcaccgcctgctggaggaagacacccctcgatacatgagagccagcgaccctgccagcccccacatcggccgatcaaatgaagaggaggaaacttccgattcttctctagaaaagcaaactcgatccaaatactgcacagaaacctccggtgtccacggtgactcaccctatggttcgggtaccatggacacccacagtctggagtccaaagccgaaagaattgcaaggtacaaagcagaaagaaggcgacagctggcagagaagtatgggctgactctggatcccgaggccgactccgagtatttatcccgctataccaagtccaggaaggagcctgatgctgtcgagaagcggggaggaaaaagtgacaaacaggaagagtcaagcagagatgcgagttctctgtaccccgggaccgagacgatggggctcaggacctgtgccggtgaatccaaggactatgccctccatgcgggtgacggctcttccgacccggaggtgctgctgaacatagaaaaccaaagacgaggtcaagagctgagtgccacccggcaggcccatgacctgtccccagcagccgagagttcctcgaccttctctttctctgggcgagactcctccttcactgaagtgccacggtcccccaagcacgcccacagctcctccctgcagcaggcagcctcccggagcccctcctttggtgacccacagctatcccctgaggcccgacccagtacagggaaacccaaacatgagtggtttctccagaaagattccgaaggggacacaccttcacttatcaactggccttccagagttaaagttagagaaaaattggtgaaagaggaaagtgctcgaaacagccctgaactcgcctcagagtccgtaactcagaggagacaccagccagcgccagtccattacgtgtcatttcagtctgagcactcagcctttgatagggtccccagcaaggcagcaggctctacacgacagccaatccgtggctatgtccaacccgcagataccggtcacaccgccaagctggtgacgccagaaaccccagaaaatgcatctgagtgtagctgggtagcatcagccacccagaatgtccccaaacctcccagcttgacggttctagaaggtgacggaagggatagcccagttctccatatctgcgagtcaaaagcagaagaagaagaaggggaaggagaaggagaagaaaaagaagaagatgtgtgcttcactgaagctctcgagcaaagcaagaaaaccctactggctttggagggtgatgggctagtgagaagcccagaagatccctctagaaatgaggactttggtaagcctgctgtgagcacagtcaccttagagcatcagaaggaactggaaaacgtggcacaaccccctcaagctccgcaccagcccactgagaggacaggcaggagcgagatggttctctacattcaaagtgagcctgtgtcccaagacgccaaaccaactggtcacaacagggaagcctcgaaaaagcgcaaggtccgtacccgctctctgtcagatttcacaggcccccctcagctccaggccttgaagtataaggacccagcttccaggagagagctggagctgcccagctccaagaccgaagggccttatggggagatcagcatgctggacacaaaggtctctgtcgcccagctccgaagtgcgttcctggcatctgccaacgcctgcaggagacctgaactcaaatcacgggtagagaggtcggctgaaggacctggcttgcccaccggtgtggaacgggagagagggtcccggaaaccaagacgctatttttctcctggtgaaagtagaaaaacttccgagagatttagaacccaacctataacttcagcagaacgaaaggaatcggataggtgcacttcacattcagaaacgccaactgtcgatgatgaagaaaaggtggatgaacgagccaagctgagcgtcgccgccaagaggttgcttttcagggagatggaaaaatcttttgatgaacaaaatgttccaaagcgacgctcaagaaacacagctgtggagcagaggctacgccgtctgcaggacaggtccctcacccagcccatcaccactgaagaggtggtcatcgcagccactgaacctatccccgcttcgtgttctgggggcacccaccctgtaatggcgagacttcctagccccactgtagctaggagcgctgtgcagcctgccagattgcaggcctctgctcaccaaaaggccttagccaaggaccagacaaatgagggcaaagagcttgctgagcaaggagaacctgattcctccactctaagcttggccgaaaagttggccttgtttaacaaattgtcccagccagtctcaaaagcgatttctacccggaacagaatagacacgagacagaggagaatgaacgctcgctatcaaactcagccagtcacactgggagaggtggagcaggtgcagagtggaaagctcattcctttctcacctgccgtgaacacatcagtgtctaccgtagcatccacggttgctccaatgtatgccggagatcttcgcacaaagccacctcttgaccacaatgcaagtgccactgactataagttttcttcttcaatagaaaattcggactctccagttagaagcattctgaaatcgcaagcttggcagcctttggtagagggtagcgagaacaagggaatgttgagagaatatggagagacagaaagcaagagagctttgacaggtcgagacagtgggatggagaagtatgggtcctttgaggaagcagaagcatcctaccccatcctgaaccgagccagggaaggagacagccataaggaatctaaatatgctgttcccagaagaggaagcctggaacgggcgaaccctcccatcacccacctcggggatgaaccgaaggaattttccatggctaaaatgaatgcacaaggaaacttggacttgagggacaggctgccctttgaagagaaggtggaggtggagaatgttatgaaaaggaagttttcactaagagcggcagagttcggggagcccacttccgagcagacggggacagctgctgggaaaactattgctcaaaccacagcccccgtgtcctggaagccccaggattcttcggaacagccacaggagaagctctgcaagaatccatgtgcgatgtttgctgctggagagatcaaaacgccgacaggggagggccttcttgactcacccagcaaaaccatgtctattaaagaaagattggcactgttgaagaaaagcggggaggaagattggagaaacagactcagcaggaggcaggagggcggcaaggcgccggccagcagcctgcacacccaggaagcagggcggtccctcatcaagaagcgggtcacagaaagtcgagagagccaaatgacgattgaggagaggaagcagctcatcactgtgagagaggaggcctggaagacgagaggcagaggagcggccaacgactcgacccagttcactgtggctggcaggatggtgaagaaaggtttggcgtcacctactgccataaccccagtagcctcagccatttgcggtaaaacaagaggcaccacacccgtttccaaacccctggaagatatcgaagccagaccagatatgcagttagaatcggacctgaagttggacaggctggaaacctttctaagaaggctgaataacaaagttggcgggatgcacgaaacggtgctcactgtcaccggcaaatctgtgaaggaggtgatgaagccagatgatgatgaaacctttgccaaattttaccgcagcgtggattataatatgccaagaagtcctgtggagatggatgaggacttcgatgtcattttcgatccttatgcacccaaattgacgtcttccgtggccgagcacaagcgggcagttaggcccaagcgccgggttcaggcctccaaaaaccccctgaaaatgctggcggcaagagaagatctccttcaggaatacactgagcagagattaaacgttgccttcatggagtcaaagcggatgaaagtagaaaagatgtcttccaactccaacttctcagaagtcaccctggcgggtttagccagtaaagaaaacttcagcaacgtcagcctgcggagcgtcaacctgacggaacagaactctaacaacagcgccgtgccctacaagaggctgatgctgttgcagattaaaggaagaagacatgtgcagaccaggctggtggaacctcgagcttcggcgctcaacagtggggactgcttcctcctgctctctccccactgctgcttcctgtgggtaggagagtttgcaaacgtcatagaaaaggcgaaggcctcagaacttgcaactttaattcagacaaagagggaacttggttgtagagctacttatatccaaaccattgaagaaggaattaatacacacactcatgcagccaaagacttctggaagcttctgggtggccaaaccagttaccaatctgctggagacccaaaagaagatgaactctatgaagcagccataatagaaactaactgcatttaccgtctcatggatgacaaacttgttcctgatgacgactactgggggaaaattccgaagtgctcccttctgcaacccaaagaggtactggtgtttgattttggtagtgaagtttacgtatggcatgggaaagaagtcacattagcacaacgaaaaatagcatttcagctggcaaagcacttatggaatggaacctttgactatgagaactgtgacatcaatcccctggatcctggagaatgcaatccgcttatccccagaaaaggacaggggcggcccgactgggcgatatttgggagacttactgaacacaatgagacgattttgttcaaagagaagtttctggattggacggaactgaagagatcgaatgagaagaaccccggggaacttgcccagcacaaggaagaccccaggactgatgtcaaggcatacgatgtgacacggatggtgtccatgccccagacgacagcaggcaccatcctggacggagtgaacgtcggccgtggctatggcctggtggaaggacacgacaggaggcagtttgagatcaccagcgtttccgtggatgtctggcacatcctggaattcgactatagcaggctccccaaacaaagcatcgggcagttccatgagggggatgcctatgtggtcaagtggaagttcatggtgagcacggcagtgggaagtcgccagaagggagagcactcggtgagggcagccggcaaagagaagtgcgtctacttcttctggcaaggccggcactccaccgtgagtgagaagggcacgtcggcgctgatgacggtggagctggacgaggaaaggggggcccaggtccaggttctccagggaaaggagcccccctgtttcctgcagtgtttccagggggggatggtggtgcactcggggaggcgggaagaggaagaagaaaatgtgcaaagtgagtggcggctgtactgcgtgcgtggagaggtgcccgtggaagggaatttgctggaagtggcctgtcactgtagcagcctgaggtccagaacttccatggtggtgcttaacgtcaacaaggccctcatctacctgtggcacggatgcaaagcccaggcccacacgaaggaggtcggaaggaccgctgcgaacaagatcaaggaacaatgtcccctggaagcaggactgcatagtagcagcaaagtcacaatacacgagtgtgatgaaggctccgagccactcggattctgggatgccttaggaaggagagacaggaaagcctacgattgcatgcttcaagatcctggaagttttaacttcgcgccccgcctgttcatcctcagcagctcctctggggattttgcagccacagagtttgtgtaccctgcccgagccccctctgtggtcagttccatgcccttcctgcaggaagatctgtacagcgcgccccagccagcacttttccttgttgacaatcaccacgaggtgtacctctggcaaggctggtggcccatcgagaacaagatcactggttccgcccgcatccgctgggcctccgaccggaagagtgcgatggagactgtgctccagtactgcaaaggaaaaaatctcaagaaaccagcccccaagtcttaccttatccacgctggtctggagcccctgacattcaccaatatgtttcccagctgggagcacagagaggacatcgctgagatcacagagatggacacggaagtttccaatcagatcaccctcgtggaagacgtcttagccaagctctgtaaaaccatttacccgctggccgacctcctggccaggccactcccggagggggtcgatcctctgaagcttgagatctatctcaccgacgaagacttcgagtttgcactagacatgacgagggatgaatacaacgccctgcccgcctggaagcaggtgaacctgaagaaagcaaaaggcctgttctgagtggggagacgccagaggagcctcacggtcacgtccaacaacaccactgcaccagggaaatggatatatatttttggactggtgtttttcacaaagtatttttcaatcagagttttcagaacctgacattgttaaagatactgcttgtcccggagttgtgtattttgtaaatgttcaagggaactgtttggaaacttctttccaccattcaggaggttatcagaattaataaaagtatctgttatgtgcacttaagccgcagctgctatagatagcactgccttcttgttccagctaggcaatgcctttttttttttttttgaagcagttctctttataaagtgttattttgatagtttgtggattctaaaatatatatatatttatataaacaccatataagtcaaatatgtatttaacaaagcaatatgtattcattcactttcaagatttgttttggtgtcaaaataacatgaaaaggtagatggagttgcttctgttgaattagctctgccaccaatatgtatcttcatacacgtttggaaatgtttcctgcagcattaggtatgacttgttctgagtactgcttccggtgctaaaatgaacaaagaatttgtacttaatggcatggactctggagaatctatgcgaatcaacctttctaccttaatatctccccaaaaatgtatagtgccttgtttttatgtacagtttatatacagaaaagtttgctctgcatttttgatgatggtttggaacattatctacaattttactctcaaatagtcaaaataaaaacatctcaatttctaataccggttgtaaacaaacagtacacatgtcattttgtgatataggactcccaaataaaagtatcagaataaacacaacaattaactggt

SEQ ID NO: 2173 - protein, 2214 aa, Homo sapiens
MKRKERIARRLEGIENDTQPILLQSCTGLVTHRLLEEDTPRYMRASDPASPHIGRSNEEEETSDSSLEKQTRSKYCTETSGVHGDSPYGSGTMDTHSLESKAERIARYKAERRRQLAEKYGLTLDPEADSEYLSRYTKSRKEPDAVEKRGGKSDKQEESSRDASSLYPGTETMGLRTCAGESKDYALHAGDGSSDPEVLLNIENQRRGQELSATRQAHDLSPAAESSSTFSFSGRDSSFTEVPRSPKHAHSSSLQQAASRSPSFGDPQLSPEARPSTGKPKHEWFLQKDSEGDTPSLINWPSRVKVREKLVKEESARNSPELASESVTQRRHQPAPVHYVSFQSEHSAFDRVPSKAAGSTRQPIRGYVQPADTGHTAKLVTPETPENASECSWVASATQNVPKPPSLTVLEGDGRDSPVLHICESKAEEEEGEGEGEEKEEDVCFTEALEQSKKTLLALEGDGLVRSPEDPSRNEDFGKPAVSTVTLEHQKELENVAQPPQAPHQPTERTGRSEMVLYIQSEPVSQDAKPTGHNREASKKRKVRTRSLSDFTGPPQLQALKYKDPASRRELELPSSKTEGPYGEISMLDTKVSVAQLRSAFLASANACRRPELKSRVERSAEGPGLPTGVERERGSRKPRRYFSPGESRKTSERFRTQPITSAERKESDRCTSHSETPTVDDEEKVDERAKLSVAAKRLLFREMEKSFDEQNVPKRRSRNTAVEQRLRRLQDRSLTQPITTEEVVIAATEPIPASCSGGTHPVMARLPSPTVARSAVQPARLQASAHQKALAKDQTNEGKELAEQGEPDSSTLSLAEKLALFNKLSQPVSKAISTRNRIDTRQRRMNARYQTQPVTLGEVEQVQSGKLIPFSPAVNTSVSTVASTVAPMYAGDLRTKPPLDHNASATDYKFSSSIENSDSPVRSILKSQAWQPLVEGSENKGMLREYGETESKRALTGRDSGMEKYGSFEEAEASYPILNRAREGDSHKESKYAVPRRGSLERANPPITHLGDEPKEFSMAKMNAQGNLDLRDRLPFEEKVEVENVMKRKFSLRAAEFGEPTSEQTGTAAGKTIAQTTAPVSWKPQDSSEQPQEKLCKNPCAMFAAGEIKTPTGEGLLDSPSKTMSIKERLALLKKSGEEDWRNRLSRRQEGGKAPASSLHTQEAGRSLIKKRVTESRESQMTIEERKQLITVREEAWKTRGRGAANDSTQFTVAGRMVKKGLASPTAITPVASAICGKTRGTTPVSKPLEDIEARPDMQLESDLKLDRLETFLRRLNNKVGGMHETVLTVTGKSVKEVMKPDDDETFAKFYRSVDYNMPRSPVEMDEDFDVIFDPYAPKLTSSVAEHKRAVRPKRRVQASKNPLKMLAAREDLLQEYTEQRLNVAFMESKRMKVEKMSSNSNFSEVTLAGLASKENFSNVSLRSVNLTEQNSNNSAVPYKRLMLLQIKGRRHVQTRLVEPRASALNSGDCFLLLSPHCCFLWVGEFANVIEKAKASELATLIQTKRELGCRATYIQTIEEGINTHTHAAKDFWKLLGGQTSYQSAGDPKEDELYEAAIIETNCIYRLMDDKLVPDDDYWGKIPKCSLLQPKEVLVFDFGSEVYVWHGKEVTLAQRKIAFQLAKHLWNGTFDYENCDINPLDPGECNPLIPRKGQGRPDWAIFGRLTEHNETILFKEKFLDWTELKRSNEKNPGELAQHKEDPRTDVKAYDVTRMVSMPQTTAGTILDGVNVGRGYGLVEGHDRRQFEITSVSVDVWHILEFDYSRLPKQSIGQFHEGDAYVVKWKFMVSTAVGSRQKGEHSVRAAGKEKCVYFFWQGRHSTVSEKGTSALMTVELDEERGAQVQVLQGKEPPCFLQCFQGGMVVHSGRREEEEENVQSEWRLYCVRGEVPVEGNLLEVACHCSSLRSRTSMVVLNVNKALIYLWHGCKAQAHTKEVGRTAANKIKEQCPLEAGLHSSSKVTIHECDEGSEPLGFWDALGRRDRKAYDCMLQDPGSFNFAPRLFILSSSSGDFAATEFVYPARAPSVVSSMPFLQEDLYSAPQPALFLVDNHHEVYLWQGWWPIENKITGSARIRWASDRKSAMETVLQYCKGKNLKKPAPKSYLIHAGLEPLTFTNMFPSWEHREDIAEITEMDTEVSNQITLVEDVLAKLCKTIYPLADLLARPLPEGVDPLKLEIYLTDEDFEFALDMTRDEYNALPAWKQVNLKKAKGLF

SEQ ID NO: 2174 - DNA, 3415 bp, Homo sapiens
ggtggtcggagcgccgactcccttctcgtcgtcgccattttgagctggtgactgtggccggctgggagtaggcggcagtgagtttccctgggagggcagcgcgcttggcgcttctcccctccccccgatctgcctccagtctcggacttggttgttgcgcgctccggctccggctgagctgggagagttggaggaggtggcggcgggcagaggtgatgtctgggagcccttccttgacagcccgggccgagaagagtccctgcaggaagcatcacccaggctggcagatcatggtagcagcagcgggggtggctgggaagtgaaacggagccagcggctgaggaggggccccagcagcccccgaaggccctatcaggacatggagtatgaaagacgtggtggtcgtggtgacaggactggccgctatggagccactgaccgctcgcaggatgatggtggggagaaccgcagccgagaccacgactaccgggacatggactaccgttcatatcctcgcgagtatggcagccaggagggcaagcatgactatgacgactcatctgaggagcagagtgcggaggattcctacgaggcctccccgggctccgagactcagcgtaggcggcggcggcggcacaggcacagccccaccggcccgccaggcttcccccgagacggcgactatcgggaccaggactatcggaccgagcaaggggaggaggaggaggaggaggaggatgaggaggaggaggagaaggccagtaacatcgtcatgctgaggatgctgccacaggcagccactgaggatgacatccgtggccagctgcagtcgcacggcgtgcaagcacgggaggttcggctgatgcggaacaaatcttcaggtcagagccggggcttcgccttcgtcgagtttagtcacttgcaggacgctacacgatggatggaagccaatcagcactccctcaacatcctgggccagaaggtgtcgatgcactacagtgaccccaagcccaagatcaatgaggactggctgtgcaataagtgtggcgtccagaacttcaaacgccgagagaagtgcttcaaatgtggcgtgcccaagtcagaggcagagcagaagctgcccctcggcacgaggctggatcagcagacactgccactgggtggccgggagctgagccagggcctgcttcccctgccgcagccctaccaggcccagggagtcctggcctcccaagccctgtcacagggctcggagccaagctcagagaacgccaatgacaccatcattttgcgcaacctgaacccacacagcaccatggattccatcctgggggccctggcaccctacgcggtgctgtcctcctccaacgtgcgcgtcataaaggacaagcagacccaactgaaccgcggctttgccttcatccagctctccaccatcgtggaggcagcccagctgctgcagatcctgcaggccctgcacccaccactcactatcgacggcaagaccatcaatgttgagtttgccaagggttctaagagggacatggcctccaatgaaggcagtcgcatcagtgctgcctctgtggccagcactgccattgctgcggcccagtgggccatctcacaggcctcccaaggtggggagggtacctgggccacctccgaggagccgccggtcgactacagctactaccaacaggatgagggctatggcaacagccagggcacagagtcttccctctatgcccatggctacctcaagggcaccaagggccctggcatcactggaaccaaaggggatcccactggagcaggtcccgaggcctccctagagcctggggccgactctgtgtcgatgcaggctttctctcgcgcccagcctggtgctgctcctggcatctaccaacaatcagccgaggcgagcagtagccagggcactgctgccaacagccagtcgtataccatcatgtcacccgctgtgctcaaatctgagctccagagccctacccatcctagttctgctctcccaccggctaccagccccactgcccaggaatcctacagccagtaccctgttcccgacgtctctacctaccagtacgatgagacctccggctactactatgacccccagaccggcctctactatgaccccaactcccagtattactacaatgctcagagccagcagtacctgtactgggatggggagaggcggacctatgttcccgccctggagcagtcggccgacggacataaggagacaggggcaccctcgaaggagggcaaagagaagaaggagaagcacaagaccaagacagctcaacagattgccaaggacatggaacgctgggcccgcagtctcaacaaacaaaaagaaaacttcaaaaatagcttccagcctatcagctccctgcgagatgacgagaggcgggagtcagccactgcagatgctggctatgccatcctcgagaagaagggagcactagccgagagacagcacaccagcatggatctcccgaaattggccagtgacgaccgcccaagccctccgcgaggactggtggcagcctacagcggggagagtgacagtgaggaggagcaggagcgtgggggccctgagcgggaggagaagctcaccgactggcagaagctggcctgtctgctctgccgacgccagttccccagcaaagaggcgctcatccggcaccagcagctctcagggctccacaagcaaaaccttgagattcaccggcgagcccacttgtcagaaaacgagctagaagcactagagaagaatgacatggagcaaatgaagtaccgggaccgtgcagctgaacgcagagaaaagtatggcatccccgagccgccagagcccaagaggaggaagtacggcggcatatccacagcctctgtagacttcgagcagcctactcgggacgggctgggcagtgacaacattggcagtcggatgctgcaggccatgggctggaaagagggcagcggcctgggccgcaagaagcagggcattgtaacgcctatcgaggcccaaacacgggtgcggggctccggcctgggtgcacggggcagctcctacggggtcacctcaaccgagtcctacaaggagacactgcacaagacaatggtgacccgcttcaacgaggcccagtgagcagcttcaagagcaacttctccacatgttgggtgtccatcctggggcagggaaggacagagtgttggatggctgggacggggccttgctcttgtcggccagcccactccccagccagagagggcttgaccaaatcaaattgaggtggtgacttttgttggaaaattgggctgggatcacgtcctgttttgtaataaaagctgaaaagtctgaaaaaaaaaaaaaaaaaaaaaaaaaaaaaaa

SEQ ID NO: 2175 - protein, 930 aa, Homo sapiens
MEYERRGGRGDRTGRYGATDRSQDDGGENRSRDHDYRDMDYRSYPREYGSQEGKHDYDDSSEEQSAEDSYEASPGSETQRRRRRRHRHSPTGPPGFPRDGDYRDQDYRTEQGEEEEEEEDEEEEEKASNIVMLRMLPQAATEDDIRGQLQSHGVQAREVRLMRNKSSGQSRGFAFVEFSHLQDATRWMEANQHSLNILGQKVSMHYSDPKPKINEDWLCNKCGVQNFKRREKCFKCGVPKSEAEQKLPLGTRLDQQTLPLGGRELSQGLLPLPQPYQAQGVLASQALSQGSEPSSENANDTIILRNLNPHSTMDSILGALAPYAVLSSSNVRVIKDKQTQLNRGFAFIQLSTIVEAAQLLQILQALHPPLTIDGKTINVEFAKGSKRDMASNEGSRISAASVASTAIAAAQWAISQASQGGEGTWATSEEPPVDYSYYQQDEGYGNSQGTESSLYAHGYLKGTKGPGITGTKGDPTGAGPEASLEPGADSVSMQAFSRAQPGAAPGIYQQSAEASSSQGTAANSQSYTIMSPAVLKSELQSPTHPSSALPPATSPTAQESYSQYPVPDVSTYQYDETSGYYYDPQTGLYYDPNSQYYYNAQSQQYLYWDGERRTYVPALEQSADGHKETGAPSKEGKEKKEKHKTKTAQQIAKDMERWARSLNKQKENFKNSFQPISSLRDDERRESATADAGYAILEKKGALAERQHTSMDLPKLASDDRPSPPRGLVAAYSGESDSEEEQERGGPEREEKLTDWQKLACLLCRRQFPSKEALIRHQQLSGLHKQNLEIHRRAHLSENELEALEKNDMEQMKYRDRAAERREKYGIPEPPEPKRRKYGGISTASVDFEQPTRDGLGSDNIGSRMLQAMGWKEGSGLGRKKQGIVTPIEAQTRVRGSGLGARGSSYGVTSTESYKETLHKTMVTRFNEAQ

SEQ ID NO: 2176 - DNA, 3190 bp, Homo sapiens
ggtggtcggagcgccgactcccttctcgtcgtcgccattttgagctggtgactgtggccggctgggagtaggcggcagtgagtttccctgggagggcagcgcgcttggcgcttctcccctccccccgatctgcctccagtctcggacttggttgttgcgcgctccggctccggctgagctgggagagttggaggaggtggcggcgggcagaggtgatgtctgggagcccttccttgacagcccgggccgagaagagtccctgcaggaagcatcacccaggctggcagatcatggtagcagcagcgggggtggctgggaagtgaaacggagccagcggctgaggaggggccccagcagcccccgaaggccctatcaggacatggagtatgaaagacgtggtggtcgtggtgacaggactggccgctatggagccactgaccgctcgcaggatgatggtggggagaaccgcagccgagaccacgactaccgggacatggactaccgttcatatcctcgcgagtatggcagccaggagggcaagcatgactatgacgactcatctgaggagcagagtgcggagatccgtggccagctgcagtcgcacggcgtgcaagcacgggaggttcggctgatgcggaacaaatcttcaggtcagagccggggcttcgccttcgtcgagtttagtcacttgcaggacgctacacgatggatggaagccaatcagcactccctcaacatcctgggccagaaggtgtcgatgcactacagtgaccccaagcccaagatcaatgaggactggctgtgcaataagtgtggcgtccagaacttcaaacgccgagagaagtgcttcaaatgtggcgtgcccaagtcagaggcagagcagaagctgcccctcggcacgaggctggatcagcagacactgccactgggtggccgggagctgagccagggcctgcttcccctgccgcagccctaccaggcccagggagtcctggcctcccaagccctgtcacagggctcggagccaagctcagagaacgccaatgacaccatcattttgcgcaacctgaacccacacagcaccatggattccatcctgggggccctggcaccctacgcggtgctgtcctcctccaacgtgcgcgtcataaaggacaagcagacccaactgaaccgcggctttgccttcatccagctctccaccatcgaggcagcccagctgctgcagatcctgcaggccctgcacccaccactcactatcgacggcaagaccatcaatgttgagtttgccaagggttctaagagggacatggcctccaatgaaggcagtcgcatcagtgctgcctctgtggccagcactgccattgctgcggcccagtgggccatctcacaggcctcccaaggtggggagggtacctgggccacctccgaggagccgccggtcgactacagctactaccaacaggatgagggctatggcaacagccagggcacagagtcttccctctatgcccatggctacctcaagggcaccaagggccctggcatcactggaaccaaaggggatcccactggagcaggtcccgaggcctccctagagcctggggccgactctgtgtcgatgcaggctttctctcgcgcccagcctggtgctgctcctggcatctaccaacaatcagccgaggcgagcagtagccagggcactgctgccaacagccagtcgtataccatcatgtcacccgctgtgctcaaatctgagctccagagccctacccatcctagttctgctctcccaccggctaccagccccactgcccaggaatcctacagccagtaccctgttcccgacgtctctacctaccagtacgatgagacctccggctactactatgacccccagaccggcctctactatgaccccaactcccagtattactacaatgctcagagccagcagtacctgtactgggatggggagaggcggacctatgttcccgccctggagcagtcggccgacggacataaggagacaggggcaccctcgaaggagggcaaagagaagaaggagaagcacaagaccaagacagctcaacagattgccaaggacatggaacgctgggcccgcagtctcaacaaacaaaaagaaaacttcaaaaatagcttccagcctatcagctccctgcgagatgacgagaggcgggagtcagccactgcagatgctggctatgccatcctcgagaagaagggagcactagccgagagacagcacaccagcatggatctcccgaaattggccagtgacgaccgcccaagccctccgcgaggactggtggcagcctacagcggggagagtgacagtgaggaggagcaggagcgtgggggccctgagcgggaggagaagctcaccgactggcagaagctggcctgtctgctctgccgacgccagttccccagcaaagaggcgctcatccggcaccagcagctctcagggctccacaagcaaaaccttgagattcaccggcgagcccacttgtcagaaaacgagctagaagcactagagaagaatgacatggagcaaatgaagtaccgggaccgtgcagctgaacgcagagaaaagtatggcatccccgagccgccagagcccaagaggaggaagtacggcggcatatccacagcctctgtagacttcgagcagcctactcgggacgggctgggcagtgacaacattggcagtcggatgctgcaggccatgggctggaaagagggcagcggcctgggccgcaagaagcagggcattgtaacgcctatcgaggcccaaacacgggtgcggggctccggcctgggtgcacggggcagctcctacggggtcacctcaaccgagtcctacaaggagacactgcacaagacaatggtgacccgcttcaacgaggcccagtgagcagcttcaagagcaacttctccacatgttgggtgtccatcctggggcagggaaggacagagtgttggatggctgggacggggccttgctcttgtcggccagcccactccccagccagagagggcttgaccaaatcaaattgaggtggtgacttttgttggaaaattgggctgggatcacgtcctgttttgtaataaaagctgaaaagtctgcaaaaaaaaaaaaaaaaaaaaaaaaaaaaaaaaaaaaaaa

SEQ ID NO: 2177 - protein, 852 aa, Homo sapiens
MEYERRGGRGDRTGRYGATDRSQDDGGENRSRDHDYRDMDYRSYPREYGSQEGKHDYDDSSEEQSAEIRGQLQSHGVQAREVRLMRNKSSGQSRGFAFVEFSHLQDATRWMEANQHSLNILGQKVSMHYSDPKPKINEDWLCNKCGVQNFKRREKCFKCGVPKSEAEQKLPLGTRLDQQTLPLGGRELSQGLLPLPQPYQAQGVLASQALSQGSEPSSENANDTIILRNLNPHSTMDSILGALAPYAVLSSSNVRVIKDKQTQLNRGFAFIQLSTIEAAQLLQILQALHPPLTIDGKTINVEFAKGSKRDMASNEGSRISAASVASTAIAAAQWAISQASQGGEGTWATSEEPPVDYSYYQQDEGYGNSQGTESSLYAHGYLKGTKGPGITGTKGDPTGAGPEASLEPGADSVSMQAFSRAQPGAAPGIYQQSAEASSSQGTAANSQSYTIMSPAVLKSELQSPTHPSSALPPATSPTAQESYSQYPVPDVSTYQYDETSGYYYDPQTGLYYDPNSQYYYNAQSQQYLYWDGERRTYVPALEQSADGHKETGAPSKEGKEKKEKHKTKTAQQIAKDMERWARSLNKQKENFKNSFQPISSLRDDERRESATADAGYAILEKKGALAERQHTSMDLPKLASDDRPSPPRGLVAAYSGESDSEEEQERGGPEREEKLTDWQKLACLLCRRQFPSKEALIRHQQLSGLHKQNLEIHRRAHLSENELEALEKNDMEQMKYRDRAAERREKYGIPEPPEPKRRKYGGISTASVDFEQPTRDGLGSDNIGSRMLQAMGWKEGSGLGRKKQGIVTPIEAQTRVRGSGLGARGSSYGVTSTESYKETLHKTMVTRFNEAQ

SEQ ID NO: 2178 - DNA, 3165 bp, Homo sapiens
ccacgcgtccgcggacgcgtgggtggtattgaatacttttgaaacagtggcacaagaatggctcaactctccaaatagagagaatttctatcagttgcaagtacgaaaatttcctgccgattatataaaatactgggagtttgcagtttatctggaagaatgtgaactggctaaacagctttatccaaaggaaaacgatttggtgtttttagctcctgagagaataaatgaagagaagaaagatacagagagaaatgacatacaagatctccacgaatatcattctggttatgttcataaatttcgccgcacgtcagtcatgcgtaatgggaaaactgagtgttacctttccatccagactcaagagaactttccggccaatttaaacgaacttgtgaattgtattgtaatcagttctctggtaactacacaaaggaagttgaaagccatgtctctgttgggtagtcggaaccaactggctagagctgttctgaatccaaaccctatggacttctgtacaaaagatttactgactacaacatctgagagaattattgcgtacttaagagatttcaatgaagatcaaaagaaagcaatagaaactgcatatgctatggtgaaacactcaccatcagttgccaaaatctgcttgattcatggaccacctggaacaggaaaatcaaaaactattgttggcctcctctatcgtctactgacagagaaccagaggaaggggcattcagacgaaaactccaatgccaaaatcaaacaaaaccgtgtcctcgtgtgtgcaccttccaatgcagctgttgatgaactcatgaaaaaaattatccttgaattcaaagaaaaatgtaaagacaagaagaatcctttaggaaactgtggagatataaatttagtacgactgggtccagaaaagtctattaatagtgaggttctaaagttcagtttggacagccaagtaaaccacagaatgaaaaaagagttaccttctcatgttcaggcgatgcataaaagaaaggaatttctagattatcagctggatgagctttcccggcagcgagctctatgccgaggtggacgggaaatacagaggcaagaattagatgaaaacatttccaaagtttctaaggaaaggcaggaacttgcttctaaaattaaagaggttcaaggacgcccacagaaaacacagagtatcatcatcttagagtcccatatcatctgctgcacgttgagcacaagtggtggtttactacttgagtctgctttccgtgggcaagggggtgtccccttcagctgtgtcattgttgatgaggctggacagtcttgtgaaattgagactcttactccactcatccatcgctgcaataagctcatcctagtaggagatcctaagcagctccctccgacagtcatctctatgaaagcacaggagtatggctacgaccagtcaatgatggctcgcttctgcagactgctggaagagaatgtagaacacaacatgatcagcaggctgcccattctacagctcactgttcagtacaggatgcatccagacatatgcctcttcccttctaattatgtttataacagaaacttaaaaacaaatagacagacagaagccattcgatgttcatcagattggccatttcagccataccttgtgtttgatgttggagatggttcagaaagacgggataatgactcatatataaatgttcaagaaataaaactggtgatggaaataattaagcttattaaagacaaaagaaaggatgttagttttcgaaacattggcataataactcattacaaggcccagaagacgatgattcagaaggatttggacaaagagttcgatagaaaaggaccagcagaagtagacactgtggatgcattccagggtcggcagaaggattgtgttattgttacgtgtgtcagagcaaatagcatccaaggttcaattggattcctggcaagtttgcagagattgaatgtcaccatcacacgagccaagtacagcctcttcatcctcggacatttgaggaccctgatggaaaaccagcattggaatcagctgattcaggatgctcagaagcgtggtgccattattaagacctgtgacaaaaactatagacatgatgcagtgaagattctgaaactcaagcctgtgctgcagagaagtctcactcaccctcctaccatagccccagaggggtccagaccccagggtggtttgcccagcagcaagctagacagtggatttgccaagacatctgttgctgcttctctataccacacaccctctgactccaaggaaattactcttactgttacttcaaaggaccctgaaagacctcctgttcatgaccaacttcaggacccacgactgctgaagaggatgggcattgaggtcaaaggaggaatattcctttgggatccacaaccctcgagcccccagcatcctggagcaacacctcctacgggcgagccgggcttccctgtcgttcaccaggacctgagccatatacagcagcccgctgctgtagtggctgctctgagcagccacaaacctcccgtgcggggcgaacctccagctgccagtcccgaggcttccacgtgtcagagcaaatgtgatgacccggaagaggagctctgtcacaggagagaggccagggctttcagtgaaggggagcaggagaagtgtggttccgagacccatcacaccaggaggaactctaggtgggacaagaggacactggagcaggaggacagcagttccaagaaaagaaagcttttataggaaagcccagtgacatgggccagcagccacagcatattgtaaactgaagatgaccagctcgtgggaccatctagataagcttgttttttgtaaggagtttgtgtgctgttggaaaacatggaaaatgcatccttaacacctgagcctctggtcatcttcagtattttctgtcatttgcaaaagctttcagagggcattgtgtatccgtaataatgtccttgaagtcagagactggaaatgttgatctcttagtcttctatagacaaggaggtcagactggagtgaatgttgtaaaagttgaaatgtatatttgtatagcaaataacaaaatccttttaaaatttaaaaaaaaaaaaaaa

SEQ ID NO: 2179 - protein, 828 aa, Homo sapiens
MRNGKTECYLSIQTQENFPANLNELVNCIVISSLVTTQRKLKAMSLLGSRNQLARAVLNPNPMDFCTKDLLTTTSERIIAYLRDFNEDQKKAIETAYAMVKHSPSVAKICLIHGPPGTGKSKTIVGLLYRLLTENQRKGHSDENSNAKIKQNRVLVCAPSNAAVDELMKKIILEFKEKCKDKKNPLGNCGDINLVRLGPEKSINSEVLKFSLDSQVNHRMKKELPSHVQAMHKRKEFLDYQLDELSRQRALCRGGREIQRQELDENISKVSKERQELASKIKEVQGRPQKTQSIIILESHIICCTLSTSGGLLLESAFRGQGGVPFSCVIVDEAGQSCEIETLTPLIHRCNKLILVGDPKQLPPTVISMKAQEYGYDQSMMARFCRLLEENVEHNMISRLPILQLTVQYRMHPDICLFPSNYVYNRNLKTNRQTEAIRCSSDWPFQPYLVFDVGDGSERRDNDSYINVQEIKLVMEIIKLIKDKRKDVSFRNIGIITHYKAQKTMIQKDLDKEFDRKGPAEVDTVDAFQGRQKDCVIVTCVRANSIQGSIGFLASLQRLNVTITRAKYSLFILGHLRTLMENQHWNQLIQDAQKRGAIIKTCDKNYRHDAVKILKLKPVLQRSLTHPPTIAPEGSRPQGGLPSSKLDSGFAKTSVAASLYHTPSDSKEITLTVTSKDPERPPVHDQLQDPRLLKRMGIEVKGGIFLWDPQPSSPQHPGATPPTGEPGFPVVHQDLSHIQQPAAVVAALSSHKPPVRGEPPAASPEASTCQSKCDDPEEELCHRREARAFSEGEQEKCGSETHHTRRNSRWDKRTLEQEDSSSKKRKLL

SEQ ID NO: 2180 - DNA, 6155 bp, Homo sapiens
ggaaggaggtgggggccgggagcgcaaatggcgttgagatggttcagggccctgttcaaactccagcactgaccattcaccggcggaagcggcgccgctcctgcccccccaaccgggcttcctatttaccgaaagcagagtccctcgcctctctcggctctcacctgccggccctgctctcccgcgcgagggttccgcgcccgcccgcgggccgtagggagcgggagaggcggaggcggcccgtggccaaagcacccgccaggctccgaggagaatatgaaactggtgtcaaaatgacatccagatttgggaaaacatacagtaggaaaggtggaaatggcagttcaaaattcgatgaagtcttttccaacaaacggactacccttagcacaaaatggggagagaccacatttatggctaaattagggcagaagaggcccaatttcaaaccagatatccaagaaattccgaagaaacctaaagtggaagaagaaagtactggagatccttttggatttgatagtgatgatgagtctctaccagtttcttcaaagaatttagcccaggttaagtgttcctcttattcagaatctagtgaagctgctcagttggaagaggtcacttcagtacttgaagctaatagcaaaattagtcatgtggtcgttgaagacactgtcgtttctgataaatgcttccctttggaggacactttacttgggaaagaaaagagcacaaaccgaattgtagaagatgatgcaagcataagtagctgtaataaattaataacttcagataaagtggagaattttcatgaagaacatgaaaagaatagtcaccatattcacaaaaatgctgatgacagtactaagaaacccaatgcagaaactacagtggcttctgaaatcaaggaaacaaatgatacttggaactcccagtttgggaaaaggccagaatcaccatcagaaatatctccaatcaagggatctgttagaactggtttgtttgaatgggataatgattttgaagatatcagatcagaagactgtattttaagtttggatagtgatccccttttggagatgaaggatgacgattttaaaaatcgattggaaaatctgaatgaagccattgaggaagatattgtacaaagtgttcttaggccaaccaactgtaggacgtactgtagggccaataaaacgaaatcctcccaaggagcatcaaattttgataagctgatggacggcaccagtcaggccttagccaaagcaaacagtgaatcgagtaaagatggcctgaatcaggcaaagaaagggggtgtaagttgtgggaccagttttagagggacagttggacggactagagattacactgttttacatccatcttgcttgtcagtttgtaatgttaccatacaggatactatggaacgcagcatggatgagttcactgcatccactcctgcagatttgggagaagctggtcgtctcagaaaaaaggcagatattgcaacttctaagactactactagatttcgacctagtaatactaaatccaaaaaggatgttaaacttgaattttttggttttgaagatcatgagacaggaggtgatgaaggaggttctggaagttctaattacaaaattaagtattttggctttgatgatctcagtgaaagcgaagatgatgaagatgatgactgtcaagtagaaagaaagacaagcaaaaaaagaactaaaacagctccatcaccctccttgcagcctcccccagaaagcaatgataattcccaggacagtcagtctggtactaacaatgcagaaaacttggattttacagaggacttgcctggtgtgcctgaaagtgtgaagaagcccataaataaacaaggagataaatcaaaggaaaataccagaaagatttttagtggccccaaacggtcacccacaaaagctgtatataatgccagacattggaatcatccagattcagaagaactgcctgggccaccagtagtaaaacctcagagtgtcacagtgaggctgtcttcaaaggaaccaaatcaaaaagatgatggagtttttaaggctcctgcaccaccatccaaagtgataaaaactgtgacaatacctactcagccctaccaagatatagttactgcactgaaatgcagacgagaagacaaagaattatatactgttgttcagcacgtgaagcacttcaacgatgttgtagaatttggtgaaaatcaagagttcactgatgacattgagtacttgttaagtggcttaaagagcactcagcctctaaacacacgttgccttagtgttattagcttggctactaaatgtgccatgcccagttttcgaatgcacctgagagcacatgggatggtagcaatggtctttaaaaccttggatgattcccagcaccatcagaatctgtccctctgtacagctgccctcatgtatatactgagtagagatcgtttgaacatggatcttgatagagctagcttagatctaatgattcgacttttggaactggaacaagatgcttcatcagccaagctactgaatgaaaaagacatgaacaaaattaaagaaaaaatccgaaggctctgtgaaactgtacacaacaagcatcttgatctagaaaatataacgactgggcatttagctatggagacattattatcccttacttctaaacgagcaggagactggtttaaagaagaactccggcttttgggtggtctggatcatattgtagataaagtaaaagaatgtgtggatcatttaagtagagatgaggatgaagagaaactggtagcctcactatggggagcagagagatgtttacgagttttagaaagtgtaactgtgcataatcccgaaaatcaaagctacttgatagcatataaagattcccaacttattgtttcatcagctaaagcattacagcattgtgaagaactgattcagcagtacaaccgtgctgaggacagcatatgcttagctgacagtaagcctctgcctcaccagaatgtaactaaccatgtaggcaaagcagtggaggactgcatgagggccatcatcggggtgttgcttaatttaactaatgataatgagtggggcagcaccaaaacaggagagcaggacggtctcataggcacagcgctgaactgtgtgcttcaggttccaaagtacctacctcaggagcagagatttgatattcgagtgctgggcttaggtctgctgataaatctagtggagtatagtgctcggaatcggcactgtcttgtcaacatggaaacatcgtgctcttttgattcttccatctgtagtggagaaggggatgatagtttaaggataggtggacaagttcatgctgtccaggctttagtgcagctattccttgagcgagagcgggcagcccagctagcagaaagtaaaacagatgagttgatcaaagatgctcccaccactcagcatgataagagtggagagtggcaagaaacaagtggagaaatacagtgggtgtcaactgaaaagactgatggtacagaagagaaacataagaaggaggaggaggatgaagaacttgacctcaataaagcccttcagcatgccggcaaacacatggaggattgcattgtggcctcctacacggcactacttcttgggtgtctctgccaggaaagtccaatcaatgtaaccactgtgcgggaatatctgccagaaggagacttttcaataatgacagagatgctcaaaaaatttttgagttttatgaatctcacttgtgctgttggaacaactggccagaaatctatctctagagtgattgaatatttggaacattgctagctgctttacctttgcttcaggtgctcggtaatgctggagctatccttagacaaagaaaagtcaagtcatgaaagaagtccttgaagatataccaagaacattcatcagtatcattcgtgtttggatttttaaggccacctgatttcttcgtcatgcattcggcatttgctaaatgacagttactacatcaatctgcaactatcaaaaatgaggggaaaaggttcaggctgttaacaattccatgcagtatttaaatacatttactttggcagagtttataccctccccttgttttcttgctttattctgggcaagtttgaaggggaaaatttgtgctgctgttagtgcaactgctgtgtatgttgagccactgttgtcatgccagccaggtgcaaaggcagcttagctactgaggtagcgaatgttctgaggacattctagacaacagcttagttcctttttcaggctcatttgcttttgcttttttgttgaatgattccaatcgtaaataaagcttttaataattttgtgaattttttggttgttgttccctgaactactgtctatatttaaaattagatggaatccaaagatacacgggattaatagtatatttttttattcttgattaggtttgggttattgaactattttttacttttgagaccacaaccatattcaatatcataccataatgtgtcatagctataggcacaagaaaaacaacagtttgagagaatattatataagatgatgtgccctgttaaaaggaggaggcaaaatagtcaaacccagggtagtttacacttaatgctagggaggctcttaaaacattattagattttgaggaaagactctctagatatattttctaatgttcagtacaataaatataaggaagctaaaacaccaatgtggaattcctgtttccagataacatgtatattcttctatagagtgacaggatcaattgcataagcgcaaagccttaaattgctggtttagagaagacccttttttcattcagattctttgttcgtagagcagttatttgaaaaacagttatggaacacaaaacattttatagatttaatatcataacattgcaaatttttcttgtattattgttcacaccactggttatacttttttttttccttttttattgattgggcctgaatacaggctttctagagatctttttcattaatacttttaaatacctttcaggtagttacatcatgtttcttcattggatttgtaaaacttgaagccataaaaatattagtttggtgtgtattggggaaaatagctaaaagtctaatttttacccatttagactttgttatttccttgtataaagtgacaaatcggggctcttgtatcagtgccagctgtaatgtttttaaatgcagtggctgccttctattgtcttcctatttttgataatgcagattgttgggaaatctgtaaggaagtaactgattccaggcaaattgttttcttccttctacccaccccaacccctacccatcaccttttaagaacatagtacgccagtgtaacgtgggaaccattgagattgtatttgccctgagtattaaagctagcttagcaaaatacttttaaaaacatattggtaaatgatacccataaaattaaattagttatattttattttaaaatgcaaaatacattgatatttattaatcattggatttagggaaagggacagatttttggtgaacctgacttgtggcagatggtaaggaatattataaaacatttggatgagaacaatcagggcgaactgcatttttctgttacactggtaatcatttgaaaattgatttacctcagtgtttaacagttttttgttttgttttgttttttaaataataactaattgtcgagcactgatagagatgcagattttggtggggggaggtggtgggggagataatcacttcaccaactgcagtgcatttgtgtgtttttaaccctcagagaactctgcattttagggtacttgaggctgacttaactaaaagttttaaagtaaccttttttccattgtaaatatttctgtaaatactaccaattggaaattagaacagtagagtacttttctgaatccaatcctatttttattttatacagtatttctcagctgtgatctttggagcaaaagccaacggcaggaaaaaatagtttgtaccagtttcatgaagtatgtctttgggtttttgtaaataattttaactcaaataaaattgctactttcaatac

SEQ ID NO: 2181 - protein, 1287 aa, Homo sapiens
KEVGAGSANGVEMVQGPVQTPALTIHRRKRRRSCPPNRASYLPKAESLASLGSHLPALLSRARVPRPPAGRRERERRRRPVAKAPARLRGEYETGVKMTSRFGKTYSRKGGNGSSKFDEVFSNKRTTLSTKWGETTFMAKLGQKRPNFKPDIQEIPKKPKVEEESTGDPFGFDSDDESLPVSSKNLAQVKCSSYSESSEAAQLEEVTSVLEANSKISHVVVEDTVVSDKCFPLEDTLLGKEKSTNRIVEDDASISSCNKLITSDKVENFHEEHEKNSHHIHKNADDSTKKPNAETTVASEIKETNDTWNSQFGKRPESPSEISPIKGSVRTGLFEWDNDFEDIRSEDCILSLDSDPLLEMKDDDFKNRLENLNEAIEEDIVQSVLRPTNCRTYCRANKTKSSQGASNFDKLMDGTSQALAKANSESSKDGLNQAKKGGVSCGTSFRGTVGRTRDYTVLHPSCLSVCNVTIQDTMERSMDEFTASTPADLGEAGRLRKKADIATSKTTTRFRPSNTKSKKDVKLEFFGFEDHETGGDEGGSGSSNYKIKYFGFDDLSESEDDEDDDCQVERKTSKKRTKTAPSPSLQPPPESNDNSQDSQSGTNNAENLDFTEDLPGVPESVKKPINKQGDKSKENTRKIFSGPKRSPTKAVYNARHWNHPDSEELPGPPVVKPQSVTVRLSSKEPNQKDDGVFKAPAPPSKVIKTVTIPTQPYQDIVTALKCRREDKELYTVVQHVKHFNDVVEFGENQEFTDDIEYLLSGLKSTQPLNTRCLSVISLATKCAMPSFRMHLRAHGMVAMVFKTLDDSQHHQNLSLCTAALMYILSRDRLNMDLDRASLDLMIRLLELEQDASSAKLLNEKDMNKIKEKIRRLCETVHNKHLDLENITTGHLAMETLLSLTSKRAGDWFKEELRLLGGLDHIVDKVKECVDHLSRDEDEEKLVASLWGAERCLRVLESVTVHNPENQSYLIAYKDSQLIVSSAKALQHCEELIQQYNRAEDSICLADSKPLPHQNVTNHVGKAVEDCMRAIIGVLLNLTNDNEWGSTKTGEQDGLIGTALNCVLQVPKYLPQEQRFDIRVLGLGLLINLVEYSARNRHCLVNMETSCSFDSSICSGEGDDSLRIGGQVHAVQALVQLFLERERAAQLAESKTDELIKDAPTTQHDKSGEWQETSGEIQWVSTEKTDGTEEKHKKEEEDEELDLNKALQHAGKHMEDCIVASYTALLLGCLCQESPINVTTVREYLPEGDFSIMTEMLKKFLSFMNLTCAVGTTGQKSISRVIEYLEHC

SEQ ID NO: 2182 - DNA, 7247 bp, Homo sapiens
gggaatatattcactaaggattctatctgcttactgctacagacctatgtgttaaggaattcttctcctcctccttgcgtagaagttgatcagcactgtggtcagactgcatttatcttgtcattgccagaagaaatcttggacagaatgtaacagtacgtctctctctgattgcgatggaaggtgataaactgatactcctttattaaagttacatcgcactcaccacagaaaaccattctttaaagtgaatagaaaccaagcccttgtgaacacttctattgaacatgactcatggagaagagcttggctctgatgtgcaccaggattctattgttttaacttacctagaaggattactaatgcatcaggcagcagggggatcaggtactgccgttgacaaaaagtctgctgggcataatgaagaggatcagaactttaacatttctggcagtgcatttcccacctgtcaaagtaatggtccagttctcaatacacatacatatcagggatctggcatgctgcacctcaaaaaagccagactgttgcagtcttctgaggactggaatgcagcaaagcggaagaggctgtctgattctatcatgaatttaaacgtaaagaaggaagctttgctagctggcatggttgacagtgtccgtaaaggcaaacaggatagcacattactggcctctttgcttcagtcattcagctctaggctgcagactgttgctctgtcacaacaaatcaggcagagcctcaaggagcaaggatatgccctcagtcatgattctttaaaagtggagaaggatttaaggtgctatggtgttgcatcaagtcacttaaaaactttgttgaagaaaagtaaagttaaagatcaaaagcctgatacgaatcttcctgatgtgactaaaaacctcatcagagataggtttgcagagtctcctcatcatgttggacaaagtggaacaaaggtcatgagtgaaccgttgtcatgtgctgcaagattacaggctgttgcaagcatggtggaaaaaagggctagtcctgccacctcacctaaacctagtgttgcttgtagccagttagcattacttctgtcaagcgaagcccatttgcagcagtattctcgagaacacgctttaaaaacgcaaaatgcaaatcaagcagcaagtgaaagacttgctgctatggccagattgcaagaaaatggccagaaggatgttggcagttaccagctcccaaaaggaatgtcaagccatcttaatggtcaggcaagaacatcatcaagcaaactgatggctagcaaaagtagtgctacagtgtttcaaaatccaatgggtatcattccttcttcccctaaaaatgcaggttataagaactcactggaaagaaacaatataaaacaagctgctaacaatagtttgcttttacatcttcttaaaagccagactatacctaagccaatgaatggacacagtcacagtgagagaggaagcatttttgaggaaagtagtacacctacaactattgatgaatattcagataacaatcctagttttacagatgacagcagtggtgatgaaagttcttattccaactgtgttcccatagacttgtcttgcaaacacggaactgaaaaatcagaatctgaccaacctgtttccctggataacttcactcaatccttgctaaacacttgggatccaaaagtcccagatgtagatatcaaagaagatcaagatacctcaaagaattctaagctaaactcacaccagaaagtaacacttcttcaattgctacttggccataagaatgaagaaaatgtagaaaaaaacaccagccctcagggagtacacaatgatgtgagcaagttcaatacacaaaattatgcaaggacttctgtgatagaaagccccagtacaaatcggactactccagtgagcactccacctttacttacatcaagcaaagcagggtctcccatcaatctctctcaacactctctggtcatcaaatggaattccccaccatatgtctgcagtactcagtctgaaaagctaacaaatactgcatctaaccactcaatggaccttacaaaaagcaaagacccaccaggagagaaaccagcccaaaatgaaggtgcacagaactctgcaacgtttagtgccagtaagctgttacaaaatttagcacaatgtggaatgcagtcatccatgtcagtggaagagcagagacccagcaaacagctgttaactggaaacacagataaaccgataggtatgattgatagattaaatagccctttgctctcaaataaaacaaatgcagttgaagaaaataaagcatttagtagtcaaccaacaggtcctgaaccagggctttctggttctgaaatagaaaatctgcttgaaagacgtactgtcctccagttgctcctggggaacccaacaaagggaagagtgaaaaaaaaagagaaaactcccttaagagatgaaagtactcaggaacactcagagagagctttaagtgaacaaatactgatggtgaaaataaaatctgagccttgtgatgacttacaaattcctaacacaaatgtgcacttgagccatgatgctaagagtgccccattcttgggtatggctcctgctgtgcagagaagcgcacctgccttaccagtgtccgaagactttaaatcggagcctgtttcacctcaggatttttctttctccaagaatggtctgctaagtcgattgctaagacaaaatcaagatagttacctggcagatgattcagacaggagtcacagaaataatgaaatggcacttctagaatcaaagaatctttgcatggtccctaagaaaaggaagctttatactgagccattagaaaatccatttaaaaagatgaaaaacaacattgttgatgctgcaaacaatcacagtgccccagaagtactgtatgggtccttgcttaaccaggaagagctgaaatttagcagaaatgatcttgaatttaaatatcctgctggtcatggctcagccagcgaaagtgaacacaggagttgggccagagagagcaaaagctttaatgttctgaaacagctgcttctctcagaaaactgtgtgcgagatttgtccccgcacagaagtaactctgtggctgacagtaaaaagaaaggacacaaaaataatgtgaccaacagcaaacctgaatttagcatttcttctttaaatggactgatgtacagttccactcagcccagcagttgcatggataacaggacattttcatacccaggtgtagtaaaaactcctgtgagtcctactttccctgagcacttgggctgtgcagggtctagaccagaatctgggcttttgaatgggtgttccatgcccagtgagaaaggacccattaagtgggttatcactgatgcggagaagaatgagtatgaaaaagactctccaagattgaccaaaaccaacccaatactatattacatgcttcaaaaaggaggcaattctgttgccagtcgagaaacacaagacaaggacatttggagggaggcttcatctgctgaaagtgtctcacaggtcacagccaaagaagagttacttcctactgcagaaacgaaagcttctttctttaatttaagaagcccttacaatagccatatgggaaataatgcttctcgcccacacagcgcaaatggagaagtttatggacttctgggaagcgtgctaacgataaagaaagaatcagaataaaatgtacctgccatccagttttggatctttttaaaactaatgagtatgaacttgagatctgtataaataagagcatgatttgaaaaaagcatggtataattgaaacttttttcattttgaaaagtattggttactggtgatgttgaaatatgcatactaatttttgcttaacattagatgtcatgaggaaactactgaactagcaattggttgtttaacacttctgtatgcgtcagataacaactgtgagtagcctatgaatgaaattcttttataaatattaggcataaattaaaatgtaaaactccattcatagtggattaatgcattttgctgcctttattagggtactttattttgcttttcagaagtcagcctacataacacatttttaaagtctaaactgttaaacaactctttaaaggataattatccaataaaaaaaaacctagtgctgattcacagcttattatccaattcaaaaataaattagaaaaatatatgcttacatttttcacttttgctaaaaagaaaaaaaaaggtgtttatttttaactcttggaagaggttttgtggttcccaatgtgtctgtcccaccctgagccttttcaatatatatttctttaaaccttgtgctacttagtaaaaattgattacaattgagggaagtttgatagatcctttaaaaaaaaggcagatttccattttttgtattttaactactttactaaattaatactcctccttttacaaattagaaaagttaacatttatctttaggtggtttcctgaaaagttgaatatttaagaaattgtttttaacagaagcaaaatggcttttctttggacagttttcaccatctcttgtaaaagttaattctcaccattcctgtggtacctgcgagtgttatgaccaggattccttaaacctgaactcagaccacttgcattagaaccatctggagcacttgttttaaaatgcagattcataggcagcatctcagatctacagaacaagaatctctgctaagtggacctggaatcttccatctgcatcttaacatgctctctaggtgtttcttgtgtttgagaaccatgacttatgactttcctcagaacatgagactgtaaaacaaaaacaaaaaactatgtgatgcctctattttccccaatacagtcacacatcagctcaaaatttgcaatattgtagttatatattaccgttatatctttggaaatccgggttcagaacactttttatgacaaaaattgggtggaggggataactttcatatctggctcaacatctcaggaaaatctgtgattatttgtgtgttctaatgagtaacatctacttagttagccttagggatggaaaaacagggccacttaccaaactcaggtgattccaggatggtttggaaacttctcctgaatgcatccttaacctttattaaaaccattgtcctaagaacaatgccaacaaagcttacaacatttagtttaaacccaagaaggacactaaactagattgactaataaaagtacaaggcacatatacgtgacagaattggtactcaatcactccattggatcttttactttaaagtagtgatgaaaagtacatgttgatactgtcttagaagaaattaatatattagtgaagccacatggggtttcagttgcgaaacaggtctgtttttatgttcagtttgtacaatccacaattcattcaccagatattttgttcttaattgtgttccaggttagcaaatgacctatcaaaaattattctataatcactactagttaggatattgatttaaaattgttctacttgaagtggtttctaagatttttatatttaaaaataggtgtgatttcctaatatgatctaaaaccctaaatggttatttttcctcagaatgatttgtaaatagctactggaaatattatacagtaataggagtgggtattatgcaacatcatggagagtgaaggcataggcttattctgacataaaattccactggccagttgaatatattctattccatgtccatactctgacaatcttattgtcaacactatataaataagcttttaaacaagtcatttttcttgatcgttgtggaaggtttggagccttagaggtatgtcagaaaaaatatgttggtattctcccttgggtagggggaaatgacctttttacaagagagatgaaatttaggtcagggaaaagaccaagggccagcatgctacttttgtgtgtgtgtgtgtgggttttgttttgttttttttggttggctggttgttttcattattattaacaaaggaatgagaatatgtaatacttaaataaacatgaccacgaagaatgctgttctgatttactagagaatgttcccaatttgaatttagggtgattttaaagaacagtgagaaagggcatacatccacagattcactttgtttatgcatatgtagatacaaggatgcacatatacacattttcaaggactattttagatatctagacaatttcttctaataaagtcatttgtgaaagggtactacagcttattgacatcagtaaggtagcattcattacctgtttattctctgctgcatcttacagaagagtaaactggtgagagtatatattttatatatatatatatatataatatgtatatatatatatattgacttgttacatgaagatgttaaaatcggtttttaaaggtgatgtaaatagtgatttccttaatgaaaaatacatattttgtattgttctaatgcaacagaaaagccttttaatctctttggttcctgtatattccatgtataagtgtaaatataatcagacaggtttaaaagttgtgcatgtatgtatacagttgcaagtctggacaaatgtatagaataaaccttttatttaagttgtgattacctgctgcatgaaaagtggcatgggggaccctgtgcatctgtgcatttggcaaaatgtcttaacaaatcagatcagatgttcatcctaacatgacagtattccatttctggacatgacgtctgtggtttaagctttgtgaaagaatgtgctttgattcgaagggtcttaaagaatttttttaatcgtcaaccacttttaaacataaagaattcacacaactactttcatgaattttttaatcccattgcaaacattattccaagagtatcccagtattagcaatactggaatataggcacattaccattcatagtaagaattctggtgtttacacaaccaaatttgatgcgatctgctcagtaatataatttgccatttttattagaaatttaatttcttcatgtgatgtcatgaaactgtacatactgcagtgtgaatttttttgttttgttttttaatcttttagtgtttacttcctgcagtgaatttgaataaatgagaaaaaatgcaaaaaaaaaaaaaaaaaaaaa

SEQ ID NO: 2183 - protein, 1158 aa, Homo sapiens
MTHGEELGSDVHQDSIVLTYLEGLLMHQAAGGSGTAVDKKSAGHNEEDQNFNISGSAFPTCQSNGPVLNTHTYQGSGMLHLKKARLLQSSEDWNAAKRKRLSDSIMNLNVKKEALLAGMVDSVRKGKQDSTLLASLLQSFSSRLQTVALSQQIRQSLKEQGYALSHDSLKVEKDLRCYGVASSHLKTLLKKSKVKDQKPDTNLPDVTKNLIRDRFAESPHHVGQSGTKVMSEPLSCAARLQAVASMVEKRASPATSPKPSVACSQLALLLSSEAHLQQYSREHALKTQNANQAASERLAAMARLQENGQKDVGSYQLPKGMSSHLNGQARTSSSKLMASKSSATVFQNPMGIIPSSPKNAGYKNSLERNNIKQAANNSLLLHLLKSQTIPKPMNGHSHSERGSIFEESSTPTTIDEYSDNNPSFTDDSSGDESSYSNCVPIDLSCKHGTEKSESDQPVSLDNFTQSLLNTWDPKVPDVDIKEDQDTSKNSKLNSHQKVTLLQLLLGHKNEENVEKNTSPQGVHNDVSKFNTQNYARTSVIESPSTNRTTPVSTPPLLTSSKAGSPINLSQHSLVIKWNSPPYVCSTQSEKLTNTASNHSMDLTKSKDPPGEKPAQNEGAQNSATFSASKLLQNLAQCGMQSSMSVEEQRPSKQLLTGNTDKPIGMIDRLNSPLLSNKTNAVEENKAFSSQPTGPEPGLSGSEIENLLERRTVLQLLLGNPTKGRVKKKEKTPLRDESTQEHSERALSEQILMVKIKSEPCDDLQIPNTNVHLSHDAKSAPFLGMAPAVQRSAPALPVSEDFKSEPVSPQDFSFSKNGLLSRLLRQNQDSYLADDSDRSHRNNEMALLESKNLCMVPKKRKLYTEPLENPFKKMKNNIVDAANNHSAPEVLYGSLLNQEELKFSRNDLEFKYPAGHGSASESEHRSWARESKSFNVLKQLLLSENCVRDLSPHRSNSVADSKKKGHKNNVTNSKPEFSISSLNGLMYSSTQPSSCMDNRTFSYPGVVKTPVSPTFPEHLGCAGSRPESGLLNGCSMPSEKGPIKWVITDAEKNEYEKDSPRLTKTNPILYYMLQKGGNSVASRETQDKDIWREASSAESVSQVTAKEELLPTAETKASFFNLRSPYNSHMGNNASRPHSANGEVYGLLGSVLTIKKESE

SEQ ID NO: 2184 - DNA, 1258 bp, Homo sapiens
gacataaaaaccgggtgccggcaggcgccagtcgcaggtgtgctgctgaggcgtgagaatggcgtcccgcggccggcgtccggagcatggcggacccccagagctgttttatgacgagacagaagcccggaaatacgttcgcaactcacggatgattgatatccagaccaggatggctgggcgagcattggagcttctttatctgccagagaataagccctgttacctgctggatattggctgtggcactgggctgagtggaagttatctgtcagatgaagggcactattgggtgggcctggatatcagccctgccatgctggatgaggctgtggaccgagagatagagggagacctgctgctgggggatatgggccagggcatcccattcaagccaggcacatttgatggttgcatcagcatttctgctgtgcagtggctctgtaatgctaacaagaagtctgaaaaccctgccaagcgcctgtactgcttttttgcttctcttttttctgttctcgtccggggatcccgagctgtcctgcagctgtaccctgagaactcagagcagttggagctgatcacaacccaggccacaaaggcaggcttctccggtggcatggtggtagactaccctaacagtgccaaagcaaagaaattctacctctgcttgttttctgggccttcgacctttataccagaggggctgagtgaaaatcaggatgaagttgaacccagggagtctgtgttcaccaatgagaggttcccattaaggatgtcgaggcggggaatggtgaggaagagtcgggcatgggtgctggagaagaaggagcggcacaggcgccagggcagggaagtcagacctgacacccagtacaccggccgcaagcgcaagccccgcttctaagtcaccacgcggttctggaaaggcacttgcctctgcacttttctatattgttcagctgacaaagtagtattttagaaaagttctaaagttataaaaatgttttctgcagtaaaaaaaaagttctctgggccgggcgtggtggctcacacctgtaatcccagcaccttgggaggctgaggtgggaggatcatttgaggccaggagtttgagacctgcctgggcaacataatgaaacttcctttccagggaggaaaaaaaaaaaaaaaaaaagctctgagagcatcttattttgtttaaaggcaagaaataaaatttccttttgtggaaaaaaaaaaaaaaaaaaaaaaaaaaaaa

SEQ ID NO: 2185 - protein, 281 aa, Homo sapiens
MASRGRRPEHGGPPELFYDETEARKYVRNSRMIDIQTRMAGRALELLYLPENKPCYLLDIGCGTGLSGSYLSDEGHYWVGLDISPAMLDEAVDREIEGDLLLGDMGQGIPFKPGTFDGCISISAVQWLCNANKKSENPAKRLYCFFASLFSVLVRGSRAVLQLYPENSEQLELITTQATKAGFSGGMVVDYPNSAKAKKFYLCLFSGPSTFIPEGLSENQDEVEPRESVFTNERFPLRMSRRGMVRKSRAWVLEKKERHRRQGREVRPDTQYTGRKRKPRF

SEQ ID NO: 2186 - DNA, 3482 bp, Homo sapiens
ccctaccgcccccaattccgccctgcccccgccgcggcggcgctagccgccactgagggaccgaccctataaaggccgctccgcgaggggtgcgcagcattcggcagagggcgcttcgacgggctgggctgtgcgcctgcgcagtgtgggtcgctcccgattccctgccccggccggccccgcctcggctccgcaccctcgccccgctctcagccgccgctctgccccgcagcagccagccccgtgtccggcagtatgttcagctgggtcagcaaggatgcccgccgcaagaaggagccggagctcttccagacggtggctgaggggctgcggcagctgtacgcgcagaagctgctacccctggaggagcactaccgcttccacgagttccactcgcccgcgctggaggacgctgacttcgacaacaagcctatggtgctcctcgtggggcagtacagcacgggcaagaccaccttcatccgacacctgatcgagcaggacttcccggggatgcgcatcgggcccgagcccaccaccgactccttcatcgccgtcatgcacggccccactgagggcgtggtgccgggcaacgcgctcgtggtggacccgcggcgccccttccgcaagctcaacgcgtttggcaacgctttcctcaacaggttcatgtgtgcccagctgcccaaccccgtcctggacagcatcagcatcatcgacacccccgggatcctgtctggagagaagcagcggatcagcagaggctatgactttgcagccgtcctggagtggttcgcggagcgtgtggaccgcatcatcctgctcttcgacgcccacaagctggacatctccgatgagttctcggaagtgatcaaggctctgaagaaccatgaggacaagatccgcgtggtgctgaacaaggcagaccagatcgagacgcagcagctgatgcgggtgtacggggccctcatgtggtccctgggcaagatcatcaacacccccgaggtggtcagggtctacatcggctccttctggtcccacccgctcctcatccccgacaaccgcaagctctttgaggccgaggagcaggacctcttcaaggacatccagtcactgccccgaaacgccgccctcaggaagctcaatgacctgatcaagcgggcacggctggccaaggttcacgcctacatcatcagctccctcaagaaagagatgcccaatgtctttggtaaagagagcaaaaagaaagagctggtgaacaacctgggagagatctaccagaagattgagcgcgagcaccagatctcccctggggacttcccgagcctccgcaagatgcaggaactcctgcagacccaggacttcagcaagttccaggcgctgaagcccaagctgctggacacggtggatgacatgctggccaacgacatcgcgcggctgatggtgatggtgcggcaggaggagtccctgatgccttcccaggtggtcaagggcggcgcctttgacggcaccatgaacgggccgttcgggcacggctacggcgagggggccggcgagggcatcgacgacgtggagtgggtggtgggcaaggacaagcccacctacgacgagatcttctacacgctgtcccctgtcaacggcaagatcacgggcgccaacgccaagaaggagatggtgaagtccaagctccccaacaccgtgctagggaagatctggaagctggccgacgtggacaaggacgggctgctggacgacgaggagttcgcgctggccaaccacctcatcaaggtcaagctggagggccacgagctgcccgccgacctgcccccgcacctggtgccgccctccaagcgcagacatgagtgatggcgcccggccccgcacctgccatttgcacgcccggccgggaggcagagacggggggaggggaagcctcaccatttctcaaggtccataaagactgagcggatgtttcctcgcctctcgaaaaggaaaaccaccatctttcttttaaggctgttcctgggcctggcgggggaggcaggggtgagaggatggaattgtgtgcacaagaactgtggctattttaatatataacgttagaggctgcgttctttgtcgccgcctcccctgtgtgccagccctgtgtgcacggcctctgccccccggcctttgctgtggctggagctggacagtgcagcgactgcgaccgtgggggagccaggtcgcccttttggcagctgctaggctgaggctgcatggacaggaacaccaggcaccctccgtgtgcttctgagctgaggttgcttcacgggaccgtggcttccttcctcacctggctctgcctcccccgtgctctcgggcgaagtgggttcttgtgccttcccctcccgggcccaggctccccgtgcgcgggccctgccctttcctcccgcgccccaccggctccgacgcgcaaccccgctcagcagtcacagaagcagggcccagccaccttggtctttttttgggagttcaggggagtaggagaatgtcttccagaaaaatacataagctagtttctgttctgtaaagtgatatctttcatacttgaccaaagttcccaataacttcccaaccactgttcaaaagctgtgatttttgtctccccttcccaccctccagccaaggagcagccctgcccagggggcattaggtgtgggtacccggggagcaccccgttcctggaccccagtgttgcatttcctggctgaggaagggtggtcatcccagctcctgccctaccctctcacttaactggagctttgggacgcaccctccacagtgggaggtggtggtgggtggcggtggcggggcctcacgacagcttggtgctggtaagaggaagcccgtggttctggctaggctctcatgtccagacagcggggaccaggggaaaacccagccccttctgtaatcccccttcatttcctaccttccttcctcctctgtttagcaaaggagggcagctcacttggatgtccttacaacgcccctggcccccaggttgagcaataagaaaccagaaccttgcggcccagtggcccgggccagttcaggccgcctccccctcctctgcctggggccattgagcccagcctccagggcccgggcgcgtttgcaggccagtggccactgtccgggctgtgatggcaccaaggcaggtggagcaccaggtaccacacagctgggcttcccaccaggctttcccgcgggggtctcagggagcttctccccagcgctgctcggagtctgcaggaactggccttgttctccttagcccgtcactccatacagtattaggtgaggatggatgcgggcgctgtccttgccgggaagtcactgttgaagttgcagtggcttgttcacacctgtgggaagagaagtgaagactttctccttgcattaaaaagtctgaactgtgaaaaaaaaaaaaaaaaaaaaaaaaa

SEQ ID NO: 2187 - protein, 534 aa, Homo sapiens
MFSWVSKDARRKKEPELFQTVAEGLRQLYAQKLLPLEEHYRFHEFHSPALEDADFDNKPMVLLVGQYSTGKTTFIRHLIEQDFPGMRIGPEPTTDSFIAVMHGPTEGVVPGNALVVDPRRPFRKLNRFGNAFLNRFMCAQLPNPVLDSISIIDTPGILSGEKQRISRGYDFAAVLEWFADCWDRIILLFDAHKQDISHEFSEVIKALKNHEDKIRMVLNKADQIETQQLMRVYGALMWSLGKIINTPEVVRVYIGSFWSHPLLIPDNRKLFEAEEQDLFKDIQSLPRNAALRKLNDLIKRARLAKVHAYIISSLKKEMPNVFGKESKKKELVNNLGEIYQKIEREHQISPGDFPSLRKMQELLQTQDFSKFQALKPKLLDTVDDMLANDIARLMVMVRQEESLMPSQVVKGGAFDGTMNGPFGHGYGEGAGEGIDDVEWVVGKDKPSYDEIFYTLSPVNGKITGANVKKEMVKSKLPNTELGKIWKLADVDKDGLLDDEEFALANHLIKVKLEGHELPADLPPHLVPPSKRRHE

SEQ ID NO: 2188 - DNA, 2207 bp, Homo sapiens
ggcacgagggcgacgccgagcaccgccctcgccgtcgcctccgggctttctccggtcgctgccgccaccaccgttgcttcgcgggctgggaggcccggggtccccgggcgaacagaggctgcggtggactgacgccgcaggggcgagctagccggctccgcgcctctccgcgggatccagacgcctcctggggctgctggcggagggtctgaggcggcgcggccatggctcacctccggggatttgccaaccagcactctcgagtggaccctgaggagctcttcaccaagctcgaccgcattggcaagggctcgtttggggaggtctacaagggcatcgataaccacacaaaggaggtggtggccatcaagatcatcgacctggaggaggccgaggatgagatcgaggacatccagcaggagatcactgtcctcagtcagtgcgacagcccctacatcacccgctactttggctcctacctaaagagcaccaagctatggatcatcatggagtacctgggcggcggctcagcactggacttgcttaaaccaggtcccctggaggagacatacattgccacgatcctgcgggagattctgaagggcctggattatctgcactccgaacgcaagatccaccgagacatcaaagctgccaacgtgctactctcggagcagggtgacgtgaagctggcggactttggggtagcagggcagctcacagacacgcagattaagaggaacacattcgtgggcacccccttctggatggcacctgaggtcatcaagcagtcggcctacgacttcaaggctgacatctggtccctggggatcacagccatcgagctggccaagggggagcctccaaactctgacctccaccccatgcgcgtcctgttcctgattcccaagaacagcccacccacactggagggccagcacagcaagcccttcaaggagttcgtggaggcctgcctcaacaaagacccccgattccggcccacggccaaggagctcctgaagcacaagttcatcacacgctacaccaagaagacctccttcctcacggagctcatcgaccgctataagcgctggaagtcagaggggcatggcgaggagtccagctctgaggactctgacattgatggcgaggcggaggacggggagcagggccccatctggacgttcccccctaccatccggccgagtccacacagcaagcttcacaaggggacggccctgcacagttcacagaagcctgcggagcccgtcaagaggcagccgaggtcccagtgcctgtccacgctggtccggcccgtcttcggagagctcaaagagaagcacaagcagagcggcgggagcgtgggtgcgctggaggagctggagaacgccttcagcctggccgaggagtcctgccccggcatctcagacaagctgatggtgcacctggtggagcgagtgcagaggttttcacacaacagaaaccacctgacatccacccgctgaagcgcactgctgttcagataggggacggaaggtcgtttgtttttgttctgagctccataagaactgtgctgacttggaaggtgccctgtgctatgtcgtgcctgcagggacacgtcggatcccgtgggcctcacatgccaggtcaccaggtcaccgtctccttccacccctgcagtgtgctgttgtgcacgtcagggacgctgttctctatgcccactgccctcctccctctcctggcccagcagtattgctcacgggggctccagccgccggcgtggccctcatgagctacgcctgggtcttctgcagactcatgcagccctatggccgctcagaccaaggcgcagagcaactatcagggcagctctgcctcctcctcccatgaggtggggagaggcaacagggcagcccccagaggagtgtcctggccgctgtcctcccggggcccatgatggccatagatttgccttgtggtgttggatcaggtactgtgtctgctcataagtacttgtgtcatccagaatgttttgttttttaagaaaattgaattacttgtttcctgaaatattctgaggttaatatgttagttttcatagaacattgagaggcccctgccactttcaataaagacctgacttggagacaaaaaaaaaaaaaaaaaaaaaaaaaaaaaaaaaaaaaaaaaaaaaaaaaaaaaaaaaa

SEQ ID NO: 2189 - protein, 426 aa, Homo sapiens
MAHLRGFANQHSRVDPEELFTKLDRIGKGSFGEVYKGIDNHTKEVVAIKIIDLEEAEDEIEDIQQEITVLSQCDSPYITRYFGSYLKSTKLWIIMEYLGGGSALDLLKPGPLEETYIATILREILKGLDYLHSERKIHRDIKAANVLLSEQGDVKLADFGVAGQLTDTQIKRNTFVGTPFWMAPEVIKQSAYDFKADIWSLGITAIELAKGEPPNSDLHPMRVLFLIPKNSPPTLEGQHSKPFKEFVEACLNKDPRFRPTAKELLKHKFITRYTKKTSFLTELIDRYKRWKSEGHGEESSSEDSDIDGEAEDGEQGPIWTFPPTIRPSPHSKLHKGTALHSSQKPAEPVKRQPRSQCLSTLVRPVFGELKEKHKQSGGSVGALEELENAFSLAEESCPGISDKLMVHLVERVQRFSHNRNHLTSTR

SEQ ID NO: 2190 - DNA, 3872 bp, Homo sapiens
cggacgaggcacgagtgaggggggaggcggtggcggcggccattttgagccgctgccgccattggagtgggccccccccctttcccccttcgcctcctgacaggaaaggtttaagggggacagagccctgggaggccgggccgggctcgggggccaccccgggggcccgggccatggatgtgcgccgtctgaaggtgaacgaacttcgcgaggagctgcagcgccgcggcctggacactcgaggcctcaaggccgagcttgctgagcggctgcaggcggcgttggaggccgaggagcctgacgacgagcgggagctcgacgccgacgacgaaccggggcgacccgggcacatcaacgaggaggtcgagaccgaggggggctccgagctggaggggaccgcgcagccaccgccgcccgggctgcagccgcacgcggagcccggcggctactcggggccggacggacattatgccatggacaatattaccaggcagaaccaattctacgatacccaagtcatcaaacaagaaaacgagtcaggctacgagaggagaccactggaaatggagcagcagcaggcctatcgtccagaaatgaagacagagatgaagcaaggagcacccaccagcttcctcccgcctgaagcttctcaactcaagccagacaggcagcaattccagagtcgaaagaggccttatgaagaaaaccggggacgggggtactttgagcaccgagaggataggaggggccgctctcctcagcctcctgctgaagaggatgaagatgactttgatgatacccttgttgctattgacacctataactgcgacctccacttcaaggtggcccgagatcggagtagtggctatccgctcacaattgagggctttgcatacctgtggtcaggagcccgtgccagctatggggtcagaaggggccgtgtatgcttcgagatgaagatcaatgaggaaatctccgtgaagcaccttccgtctacagagcctgacccccacgtggtccgtatcggctggtccctggactcctgcagcacccagctaggcgaagagcctttctcctatggctatggaggcactgggaagaagtccaccaatagccggtttgaaaactacggagacaagtttgcagagaacgatgtgattggctgctttgcggattttgaatgtggaaatgacgtggaactgtcttttaccaagaatggaaagtggatgggcattgctttccgaatccagaaggaagccttggggggtcaggccctctatcctcatgtcctggtgaagaattgcgcagtggagttcaacttcggacagagagcagagccctactgttctgtcctcccggggtttaccttcatccagcaccttccccttagtgagcgtatccggggcaccgttggaccaaagagcaaggcagaatgtgagattctgatgatggtgggcctgcctgctgctggcaagaccacatgggccatcaaacatgcagcctccaacccttccaagaagtacaacatcctgggtaccaatgccatcatggataagatgcgggtgatgggcctacgccggcagcggaactatgctggccgctgggatgtcctgatccagcaggccacccagtgcctcaaccgcctcatccagattgctgcccgcaagaaacgcaactatatcctagatcagacaaatgtttatgggtcagcccagagacgaaaaatgagaccatttgaaggcttccagcgcaaagctattgtaatttgtcccactgacgaggacctaaaagaccgaacaataaagcgaaccgacgaggaagggaaggatgtcccagatcatgcggtcttagaaatgaaagccaacttcacgttgccagatgttggggacttcctggatgaggttctgttcattgagctgcagcgggaggaagcggacaagctagtgaggcagtacaacgaggaaggccgcaaggctgggccaccccctgaaaagcgctttgacaaccgaggtggtggtggcttccggggccgcgggggtggtggtggcttccagcgctatgaaaaccgaggaccccctggaggcaaccgtggcggcttccagaaccgagggggaggcagcggtggaggaggcaactaccgaggaggtttcaaccgcagcggaggtggtggctatagccagaaccgctggggtaacaacaaccgggataacaacaactccaacaacagaggcagctacaaccgggctccccagcaacagccgccaccacagcagcctccgccaccacagccaccaccccagcagccaccgccaccacccagctacagccctgctcggaaccccccaggggccagcacctacaataagaacagcaacatccctggctcaagcgccaataccagcacccccaccgtcagcagctacagccctccacagccgagttacagccagccaccctacaaccagggaggttacagccagggctacacagccccaccgcctccacctccaccaccacctgcctacaactatgggagctacggcggttacaacccggccccctataccccaccgccaccccccactgcacagacctaccctcagcccagctataaccagtatcagcagtatgcccagcagtggaaccagtactatcagaaccagggccagtggccgccatactacgggaactacgactacgggagctactccgggaacacacagggtggcacaagtacacagtagccagtgtgacccagaggctcccggaggcccctgccggcttcctccaccagcgcctgcctcggcccctcctctgcccccgccagatcccgtggtgctggggatggggtcatcccagggctgcctccctccagcccactgcctcccctctgaggggcttccttcccctccatagggccaggcatttttttctggattcaaacaggcaacaatgaccttttattttctgtttgtccccacctccccagccttccacctcctgttcttcctaccttcttcctttttgactaaataatccccacctcccttgatcatacagtgaggctacagtgactgaggggagaatcccctcctgttcactctcccaaccctgctccagcccctcagcttcccagaccctcatgcagttggttgtaaattctcccaggagctgttttactgtctacttttcaggattaaaaaaaaaatcaaaacttaaaaaaaaaaaagtttaaaaagcaaaatggggagggggaggaagcagtgacttttttttggtaattatgcgcttttttttaatttttagaatttgtctttttactgtgggtgggctgttgatatttcatcaagataagcatttctttcctgagttcaggtgactgaggaagagccacaaaacaaaacacaacaaaaccaaaccacagaatcatctttaacccaactttttatacgatgccccagttccccataactttgcacacaagcttctgtgttcagttgaattgtaactgctttttgtatttggagagagtgactattgaacttgaaaccttttattccgggcgtcttggtagtttctggtgggattcagtgggtgagagggaagaaggggaggttggggggctccttcccttcagaacttgaagtttctcccactgcctcctctccagtggtctcccaggtgccagacccaaaagcttttcctacagtgataccctttatttttacttccccttgactcatatgttttaacatgattttaacaaactgcacttattaagaaatgtgtttgccctgttttgtttggtttcgttttgttttctttgaataaatgacatggcacctcctagcaggaaggaagcagggttgaaa

SEQ ID NO: 2191 - protein, 856 aa, Homo sapiens [sequence omitted]

SEQ ID NO: 2192 - DNA, 3468 bp, Homo sapiens
agagagagaggaagtcggacgtgggcgaggggcggggtgtctggactggaacctctgggcccacatgccatggacaatattaccaggcagaaccaattctacgatacccaagtcatcaaacaagaaaacgagtcaggctacgagaggagaccactggaaatggagcagcagcaggcctatcgtccagaaatgaagacagagatgaagcaaggagcacccaccagcttcctcccgcctgaagcttctcaactcaagccagacaggcagcaattccagagtcgaaagaggccttatgaagaaaaccggggacgggggtactttgagcaccgagaggataggaggggccgctctcctcagcctcctgctgaagaggatgaagatgactttgatgatacccttgttgctattgacacctataactgcgacctccacttcaaggtggcccgagatcggagtagtggctatccgctcacaattgagggctttgcatacctgtggtcaggagcccgtgccagctatggggtcagaaggggccgtgtatgcttcgagatgaagatcaatgaggaaatctccgtgaagcaccttccgtctacagagcctgacccccacgtggtccgtatcggctggtccctggactcctgcagcacccagctaggcgaagagcctttctcctatggctatggaggcactgggaagaagtccaccaatagccggtttgaaaactacggagacaagtttgcagagaacgatgtgattggctgctttgcggattttgaatgtggaaatgacgtggaactgtcttttaccaagaatggaaagtggatgggcattgctttccgaatccagaaggaagccttggggggtcaggccctctatcctcatgtcctggtgaagaattgcgcagtggagttcaacttcggacagagagcagagccctactgttctgtcctcccggggtttaccttcatccagcaccttccccttagtgagcgtatccggggcaccgttggaccaaagagcaaggcagaatgtgagattctgatgatggtgggcctgcctgctgctggcaagaccacatgggccatcaaacatgcagcctccaacccttccaagaagtacaacatcctgggtaccaatgccatcatggataagatgcgggtgatgggcctacgccggcagcggaactatgctggccgctgggatgtcctgatccagcaggccacccagtgcctcaaccgcctcatccagattgctgcccgcaagaaacgcaactatatcctagatcagacaaatgtttatgggtcagcccagagacgaaaaatgagaccatttgaaggcttccagcgcaaagctattgtaatttgtcccactgacgaggacctaaaagaccgaacaataaagcgaaccgacgaggaagggaaggatgtcccagatcatgcggtcttagaaatgaaagccaacttcacgttgccagatgttggggacttcctggatgaggttctgttcattgagctgcagcgggaggaagcggacaagctagtgaggcagtacaacgaggaaggccgcaaggctgggccaccccctgaaaagcgctttgacaaccgaggtggtggtggcttccggggccgcgggggtggtggtggcttccagcgctatgaaaaccgaggaccccctggaggcaaccgtggcggcttccagaaccgagggggaggcagcggtggaggaggcaactaccgaggaggtttcaaccgcagcggaggtggtggctatagccagaaccgctggggtaacaacaaccgggataacaacaactccaacaacagaggcagctacaaccgggctccccagcaacagccgccaccacagcagcctccgccaccacagccaccaccccagcagccaccgccaccacccagctacagccctgctcggaaccccccaggggccagcacctacaataagaacagcaacatccctggctcaagcgccaataccagcacccccaccgtcagcagctacagccctccacagccgagttacagccagccaccctacaaccagggaggttacagccagggctacacagccccaccgcctccacctccaccaccacctgcctacaactatgggagctacggcggttacaacccggccccctataccccaccgccaccccccaccgcacagacctaccctcagcccagctataaccagtatcagcagtatgcccagcagtggaaccagtactatcagaaccagggccagtggccgccatactacgggaactacgactacgggagctactccgggaacacacagggtggcacaagtacacagtagccagtgtgacccagaggctcccggaggcccctgccggcttcctccaccagcgcctgcctcggcccctcctctgcccccgccagatcccgtggtgctggggatggggtcatcccagggctgcctccctccagcccactgcctcccctctgaggggcttccttcccctccatagggccaggcatttttttctggattcaaacaggcaacaatgaccttttattttctgtttgtccccacctccccagccttccacctcctgttcttcctaccttcttcctttttgactaaataatccccacctcccttgatcatacagtgaggctacagtgactgaggggagaatcccctcctgttcactctcccaaccctgctccagcccctcagcttcccagaccctcatgcagttggttgtaaattctcccaggagctgttttactgtctacttttcaggattaaaaaaaaaatcaaaacttaaaaaaaaaaaagtttaaaaagcaaaatggggagggggaggaagcagtgacttttttttggtaattatgcgcttttttttaatttttagaatttgtctttttactgtgggtgggctgttgatatttcatcaagataagcatttctttcctgagttcaggtgactgaggaagagccacaaaacaaaacacaacaaaaccaaaccacagaatcatctttaacccaactttttatacgatgccccagttccccataactttgcacacaagcttctgtgttcagttgaattgtaactgctttttgtatttggagagagtgactattgaacttgaaaccttttattccgggcgtcttggtagtttctggtgggattcagtgggtgagagggaagaaggggaggttggggggctccttcccttcagaacttgaagtttctcccactgcctcctctccagtggtctcccaggtgccagacccaaaagcttttcctacagtgataccctttatttttacttccccttgactcatatgttttaacatgattttaacaaactgcacttattaagaaatgtgtttgccctgttttgtttggtttcgttttgttttctttgaataaatgacatggcacctcctagcaggaaggaagcagggttgaaa

SEQ ID NO: 2193 - protein, 756 aa, Homo sapiens
MDNITRQNQFYDTQVIKQENESGYERRPLEMEQQQAYRPEMKTEMKQGAPTSFLPPEASQLKPDRQQFQSRKRPYEENRGRGYFEHREDRRGRSPQPPAEEDEDDFDDTLVAIDTYNCDLHFKVARDRSSGYPLTIEGFAYLWSGARASYGVRRGRVCFEMKINEEISVKHLPSTEPDPHVVRIGWSLDSCSTQLGEEPFSYGYGGTGKKSTNSRFENYGDKFAENDVIGCFADFECGNDVELSFTKNGKWMGIAFRIQKEALGGQALYPHVLVKNCAVEFNFGQRAEPYCSVLPGFTFIQHLPLSERIRGTVGPKSKAECEILMMVGLPAAGKTTWAIKHAASNPSKKYNILGTNAIMDKMRVMGLRRQRNYAGRWDVLIQQATQCLNRLIQIAARKKRNYILDQTNVYGSAQRRKMRPFEGFQRKAIVICPTDEDLKDRTIKRTDEEGKDVPDHAVLEMKANFTLPDVGDFLDEVLFIELQREEADKLVRQYNEEGRKAGPPPEKRFDNRGGGGFRGRGGGGGFQRYENRGPPGGNRGGFQNRGGGSGGGGNYRGGFNRSGGGGYSQNRWGNNNRDNNNSNNRGSYNRAPQQQPPPQQPPPPQPPPQQPPPPPSYSPARNPPGASTYNKNSNIPGSSANTSTPTVSSYSPPQPSYSQPPYNQGGYSQGYTAPPPPPPPPPAYNYGSYGGYNPAPYTPPPPPTAQTYPQPSYNQYQQYAQQWNQYYQNQGQWPPYYGNYDYGSYSGNTQGGTSTQ

SEQ ID NO: 2194 - DNA, 3716 bp, Homo sapiens
cggacgaggcacgagtgaggggggaggcggtggcggcggccattttgagccgctgccgccattggagtgggccccccccctttcccccttcgcctcctgacaggaaaggtttaagggggacagagccctgggaggccgggccgggctcgggggccaccccgggggcccgggccatggatgtgcgccgtctgaaggtgaacgaacttcgcgaggagctgcagcgccgcggcctggacactcgaggcctcaaggccgagcttgctgagcggctgcaggcggcgttggaggccgaggagcctgacgacgagcgggagctcgacgccgacgacgaaccggggcgacccgggcacatcaacgaggaggtcgagaccgaggggggctccgagctggaggggaccgcgcagccaccgccgcccgggctgcagccgcacgcggagcccggcggctactcggggccggacggacattatgccatggacaatattaccaggcagaaccaattctacgatacccaagtcatcaaacaagaaaacgagtcaggctacgagaggagaccactggaaatggagcagcagcaggcctatcgtccagaaatgaagacagagatgaagcaaggagcacccaccagcttcctcccgcctgaagcttctcaactcaagccagacaggcagcaattccagagtcgaaagaggccttatgaagaaaaccggggacgggggtactttgagcaccgagaggataggaggggccgctctcctcagcctcctgctgaagaggatgaagatgactttgatgatacccttgttgctattgacacctataactgcgacctccacttcaaggtggcccgagatcggagtagtggctatccgctcacaattgagggctttgcatacctgtggtcaggagcccgtgccagctatggggtcagaaggggccgtgtatgcttcgagatgaagatcaatgaggaaatctccgtgaagcaccttccgtctacagagcctgacccccacgtggtccgtatcggctggtccctggactcctgcagcacccagctaggcgaagagcctttctcctatggctatggaggcactgggaagaagtccaccaatagccggtttgaaaactacggagacaagtttgcagagaacgatgtgattggctgctttgcggattttgaatgtggaaatgacgtggaactgtcttttaccaagaatggaaagtggatgggcattgctttccgaatccagaaggaagccttggggggtcaggccctctatcctcatgtcctggtgaagaattgcgcagtggagttcaacttcggacagagagcagagccctactgttctgtcctcccggggtttaccttcatccagcaccttccccttagtgagcgtatccggggcaccgttggaccaaagagcaaggcagaatgtgagattctgatgatggtgggcctgcctgctgctggcaagaccacatgggccatcaaacatgcagcctccaacccttccaagaagtacaacatcctgggtaccaatgccatcatggataagatgcgggtgatgggcctacgccggcagcggaactatgctggccgctgggatgtcctgatccagcaggccacccagtgcctcaaccgcctcatccagattgctgcccgcaagaaacgcaactatatcctagatcagacaaatgtttatgggtcagcccagagacgaaaaatgagaccatttgaaggcttccagcgcaaagctattgtaatttgtcccactgacgaggacctaaaagaccgaacaataaagcgaaccgacgaggaagggaaggatgtcccagatcatgcggtcttagaaatgaaagccaacttcacgttgccagatgttggggacttcctggatgaggttctgttcattgagctgcagcgggaggaagcggacaagctagtgaggcagtacaacgaggaaggccgcaaggctgggccaccccctgaaaagcgctttgacaaccgaggtggtggtggcttccggggccgcgggggtggtggtggcttccagcgctatgaaaaccgaggaccccctggaggcaaccgtggcggcttccagaaccgagggggaggcagcggtggaggaggcaactaccgaggaggtttcaaccgcagcggaggtggtggctatagccagaaccgctggggtaacaacaaccgggataacaacaactccaacaacagaggcagctacaaccgggctccccagcaacagccgccaccacagcagcctccgccaccacagccaccaccccagcagccaccgccaccacccagctacagccctgctcggaaccccccaggggccagcacctacaataagaacagcaacatccctggctcaagcgccaataccagcacccccaccgtcagcagctacagccctccacagacctaccctcagcccagctataaccagtatcagcagtatgcccagcagtggaaccagtactatcagaaccagggccagtggccgccatactacgggaactacgactacgggagctactccgggaacacacagggtggcacaagtacacagtagccagtgtgacccagaggctcccggaggcccctgccggcttcctccaccagcgcctgcctcggcccctcctctgcccccgccagatcccgtggtgctggggatggggtcatcccagggctgcctccctccagcccactgcctcccctctgaggggcttccttcccctccatagggccaggcatttttttctggattcaaacaggcaacaatgaccttttattttctgtttgtccccacctccccagccttccacctcctgttcttcctaccttcttcctttttgactaaataatccccacctcccttgatcatacagtgaggctacagtgactgaggggagaatcccctcctgttcactctcccaaccctgctccagcccctcagcttcccagaccctcatgcagttggttgtaaattctcccaggagctgttttactgtctacttttcaggattaaaaaaaaaatcaaaacttaaaaaaaaaaaagtttaaaaagcaaaatggggagggggaggaagcagtgacttttttttggtaattatgcgcttttttttaatttttagaatttgtctttttactgtgggtgggctgttgatatttcatcaagataagcatttctttcctgagttcaggtgactgaggaagagccacaaaacaaaacacaacaaaaccaaaccacagaatcatctttaacccaactttttatacgatgccccagttccccataactttgcacacaagcttctgtgttcagttgaattgtaactgctttttgtatttggagagagtgactattgaacttgaaaccttttattccgggcgtcttggtagtttctggtgggattcagtgggtgagagggaagaaggggaggttggggggctccttcccttcagaacttgaagtttctcccactgcctcctctccagtggtctcccaggtgccagacccaaaagcttttcctacagtgataccctttatttttacttccccttgactcatatgttttaacatgattttaacaaactgcacttattaagaaatgtgtttgccctgttttgtttggtttcgttttgttttctttgaataaatgacatggcacctcctagcaggaaggaagcagggttgaaa

SEQ ID NO: 2195 - protein, 804 aa, Homo sapiens
MDVRRLKVNELREELQRRGLDTRGLKAELAERLQAALEAEEPDDERELDADDEPGRPGHINEEVETEGGSELEGTAQPPPPGLQPHAEPGGYSGPDGHYAMDNITRQNQFYDTQVIKQENESGYERRPLEMEQQQAYRPEMKTEMKQGAPTSFLPPEASQLKPDRQQFQSRKRPYEENRGRGYFEHREDRRGRSPQPPAEEDEDDFDDTLVAIDTYNCDLHFKVARDRSSGYPLTIEGFAYLWSGARASYGVRRGRVCFEMKINEEISVKHLPSTEPDPHVVRIGWSLDSCSTQLGEEPFSYGYGGTGKKSTNSRFENYGDKFAENDVIGCFADFECGNDVELSFTKNGKWMGIAFRIQKEALGGQALYPHVLVKNCAVEFNFGQRAEPYCSVLPGFTFIQHLPLSERIRGTVGPKSKAECEILMMVGLPAAGKTTWAIKHAASNPSKKYNILGTNAIMDKMRVMGLRRQRNYAGRWDVLIQQATQCLNRLIQIAARKKRNYILDQTNVYGSAQRRKMRPFEGFQRKAIVICPTDEDLKDRTIKRTDEEGKDVPDHAVLEMKANFTLPDVGDFLDEVLFIELQREEADKLVRQYNEEGRKAGPPPEKRFDNRGGGGFRGRGGGGGFQRYENRGPPGGNRGGFQNRGGGSGGGGNYRGGFNRSGGGGYSQNRWGNNNRDNNNSNNRGSYNRAPQQQPPPQQPPPPQPPPQQPPPPPSYSPARNPPGASTYNKNSNIPGSSANTSTPTVSSYSPPQTYPQPSYNQYQQYAQQWNQYYQNQGQWPPYYGNYDYGSYSGNTQGGTSTQ

SEQ ID NO: 2196 - DNA, 1800 bp, Homo sapiens
cggacgaggcacgagtgaggggggaggcggtggcggcggccattttgagccgctgccgccattggagtgggccccccccctttcccccttcgcctcctgacaggaaaggtttaagggggacagagccctgggaggccgggccgggctcgggggccaccccgggggcccgggccatggatgtgcgccgtctgaaggtgaacgaacttcgcgaggagctgcagcgccgcggcctggacactcgaggcctcaaggccgagcttgctgagcggctgcaggcggcgttggaggccgaggagcctgacgacgagcgggagctcgacgccgacgacgaaccggggcgacccgggcacatcaacgaggaggccgagttacagccagccaccctacaaccagggaggttacagccagggctacacagccccaccgcctccacctccaccaccacctgcctacaactatgggagctacggcggttacaacccggccccctataccccaccgccaccccccactgcacagacctaccctcagcccagctataaccagtatcagcagtatgcccagcagtggaaccagtactatcagaaccagggccagtggccgccatactacgggaactacgactacgggagctactccgggaacacacagggtggcacaagtacacagtagccagtgtgacccagaggctcccggaggcccctgccggcttcctccaccagcgcctgcctcggcccctcctctgcccccgccagatcccgtggtgctggggatggggtcatcccagggctgcctccctccagcccactgcctcccctctgaggggcttccttcccctccatagggccaggcatttttttctggattcaaacaggcaacaatgaccttttattttctgtttgtccccacctccccagccttccacctcctgttcttcctaccttcttcctttttgactaaataatccccacctcccttgatcatacagtgaggctacagtgactgaggggagaatcccctcctgttcactctcccaaccctgctccagcccctcagcttcccagaccctcatgcagttggttgtaaattctcccaggagctgttttactgtctacttttcaggattaaaaaaaaaatcaaaacttaaaaaaaaaaaagtttaaaaagcaaaatggggagggggaggaagcagtgacttttttttggtaattatgcgcttttttttaatttttagaatttgtctttttactgtgggtgggctgttgatatttcatcaagataagcatttctttcctgagttcaggtgactgaggaagagccacaaaacaaaacacaacaaaaccaaaccacagaatcatctttaacccaactttttatacgatgccccagttccccataactttgcacacaagcttctgtgttcagttgaattgtaactgctttttgtatttggagagagtgactattgaacttgaaaccttttattccgggcgtcttggtagtttctggtgggattcagtgggtgagagggaagaaggggaggttggggggctccttcccttcagaacttgaagtttctcccactgcctcctctccagtggtctcccaggtgccagacccaaaagcttttcctacagtgataccctttatttttacttccccttgactcatatgttttaacatgattttaacaaactgcacttattaagaaatgtgtttgccctgttttgtttggtttcgttttgttttctttgaataaatgacatggcacctcctagcaggaaggaagcagggttgaaa

SEQ ID NO: 2197 - protein, 122 aa, Homo sapiens
MDVRRLKVNELREELQRRGLDTRGLKAELAERLQAALEAEEPDDERELDADDEPGRPGHINEEAELQPATLQPGRLQPGLHSPTASTSTTTCLQLWELRRLQPGPLYPTATPHCTDLPSAQL

SEQ ID NO: 2198 - DNA, 1625 bp, Homo sapiens
cttttaaaacccgcttcccgctgagtctgcacccaggagaccagagagcaccttgcccttccatggaaactcaggctgatctcgtatctcaggaacctcaggccctgcttgacagtgctcttctttcaaaagttcctgccttttccgacaaggacagcctgggggatgagatgttggcggctgcgctcctaaaggccaagtcccaggagctggtaacctttgaggatgtagctgtgtacttcatccggaaggagtggaagcgtttggaacctgctcagagggacctctatagagatgtgatgctggagaattacgggaatgtgttctcactggatcgtgagaccaggactgaaaatgatcaagaaatttctgaagacacaagatcacatggggtcctactgggaagatttcaaaaggatatttctcagggtctcaagtttaaagaagcctatgaacgagaagtcagtctgaaaaggccgctggggaactcccctggagaaagactgaacaggaaaatgccagattttggtcaagtgacagttgaggagaagctaacccccaggggagagagaagcgagaaatataatgattttgggaacagcttcactgtgaattccaaccttatctcacatcagagactccccgtgggagacagaccccataagtgtgatgaatgtagcaagagctttaatcgaacttcagaccttattcaacatcagagaatccacactggggaaaagccctatgaatgtaatgagtgtgggaaggccttcagccagagctcacaccttattcagcatcagagaatccacactggggaaaaaccttatgaatgtagtgattgtgggaaaaccttcagctgtagctctgccctcattctgcatcggaggatccacacgggggagaaaccctatgaatgtaatgagtgtgggaagaccttcagctggagctccaccctcacccaccatcagagaatccacactggtgagaaaccctacgcctgcaatgaatgtgggaaggccttcagcaggagctcaacccttattcaccatcagagaatccacactgaagctcttcccacattcgttacactgataaggcttctccccagtgtggatccgatagtgacgaatgaggctgcctttcccgctgaaagccttgccacaatctttgcactgatatggcgcctcttctgtgtgcattctctgatgtttaagaaggtctgagctctgcccaaaagcttttccacacttacagtcatagggccggtccaccaagtgtgttctgtaatggagggtgaggtttgagctgtggctgaaagctttcccacacttggtgcacacgtaaggtttctccccagtgtgtgttctcctgtgtttggtgagatttgagctattactaaaggctttgccacattcagcacatatataacgtctctctcctggggtaggtttagtaggaactgattctctacctttcttggagcctgcctcttgaagagggggttttgttcctttttcattttcaaggtttacgcactgcctctctaagctggcctcaggtttattggcgataatcacagaaattatatcccctttgagcccctcaaaaaaaaaaaaaaaaaa

SEQ ID NO: 2199 - protein, 387 aa, Homo sapiens
METQADLVSQEPQALLDSALLSKVPAFSDKDSLGDEMLAAALLKAKSQELVTFEDVAVYFIRKEWKRLEPAQRDLYRDVMLENYGNVFSLDRETRTENDQEISEDTRSHGVLLGRFQKDISQGLKFKEAYEREVSLKRPLGNSPGERLNRKMPDFGQVTVEEKLTPRGERSEKYNDFGNSFTVNSNLISHQRLPVGDRPHKCDECSKSFNRTSDLIQHQRIHTGEKPYECNECGKAFSQSSHLIQHQRIHTGEKPYECSDCGKTFSCSSALILHRRIHTGEKPYECNECGKTFSWSSTLTHHQRIHTGEKPYACNECGKAFSRSSTLIHHQRIHTEALPTFVTLIRLLPSVDPIVTNEAAFPAESLATIFALIWRLFCVHSLMFKKV

SEQ ID NO: 2200 - DNA, 2603 bp, Homo sapiens
gtgggtctgtgacagggtccaacagggcctggtccgtgtccggtcccccaaatctgtcgtccctgcccccaggcattggcatcaacaaaagtcagaattcccgggaacttgaacagaggctgctaaattcccagtaattgctcctttggccttctagggactgacttcaaagaaggaaggaaagaatcaggcagtgcttcctcattctcttttaaaacccgcttcccgctgagtctgcacccaggagaccagagagcaccttgcccttccatggaaactcaggctgatctcgtatctcaggaacctcaggccctgcttgacagtgctcttccttcaaaagttcctgccttttccgacaaggacagcctgggggatgagatgttggcggctgcgctcctaaaggccaagtcccaggagctggtaacctttgaggatgtagctgtgtacttcatccggaaggagtggaagcgtttggaacctgctcagagggacctctatagagatgtgatgctggagaattacgggaatgtgttctcactggatcgtgagaccaggactgaaaatgatcaagaaatttctgaagacacaagatcacatggggtcctactgggaagatttcaaaaggatatttctcagggtctcaagtttaaagaagcctatgaacgagaagtcagtctgaaaaggccgctggggaactcccctggagaaagactgaacaggaaaatgccagattttggtcaagtgacagttgaggagaagctaacccccaggggagagagaagcgagaaatataatgattttgggaacagcttcactgtgaattccaaccttatctcacatcagagactccccgtgggagacagaccccataagtgtgatgaatgtagcaagagctttaatcgaacttcagaccttattcaacatcagagaatccacactggggaaaagccctatgaatgtaatgagtgtgggaaggccttcagccagagctcacaccttattcagcatcagagaatccacactggggaaaaaccttatgaatgtagtgattgtgggaaaaccttcagctgtagctctgccctcattctgcatcggaggatccacacgggggagaaaccctatgaatgtaatgagtgtgggaagaccttcagctggagctccaccctcacccaccatcagagaatccacactggtgagaaaccctacgcctgcaatgaatgtgggaaggccttcagcaggagctcaacccttattcaccatcagagaatccacactggagaaaaaccctatgaatgtaatgaatgtgggaaagccttcagccagagctcacacctctatcagcaccagagaatccacactggagagaagccctacgaatgtatggaatgtggaggaaagtttacctacagttcaggccttattcagcatcaaagaatccacaccggggagaacccctatgaatgtagtgagtgtgggaaagccttcaggtacagctcggctcttgttcgccatcagagaattcacactggagagaagcctttgaatgggatcggcatgagcaaaagctccctcagagttacgaccgagttaaatatcagagagtccacgtgaaagagccacacacccattttcctcactttccctgagtctcaagagctcttgccttaccctataaatctcaacagcttaggatgtgtccctttcaactcagacttttcattttagagaatggggcagatggggcaaatcgttgaattttcccagaaatcacaccagccttagaaagcgtcaaggcaagtggatggcgtgctgggaatagaaagcagctctgggaccagttaccccatttaggaaaggagtttgcactaaactgtttttctcacagcagaggaacctttccaaggtggggatggaagcacagtcgggacagaattcgatggattcctttagttggagtccgcgtagtcagcacagacagcagtggaaaggacgctctgggtcctgttatttgctagggagggtaaagggagactatttcaaagctactgttcctagtccagctttaagtttcggtaagaaacatgctgttttgtttcatgatttcgttaattatggaaatttggcattgagggattattttattgagggtagaagagattccagaatcatcatctgtgatgatggtgtcctttagggctcttggagcagccagaccatgtttccaagagaaacctggtgatattgccagcagaccccctgccatcccccccagttgtcctggggctgaatgggcaaatctgtccaaacagctagtaaccggctgtgagggagagggtcagaagcacttagcgttggcctctgattgctgtcctctcttgtcctcttcccactccaatgatgaaaatgattttctctaaatgcctgggtaaggatgctttcaaggagctcacttggcctgcttgccctgccctctcacctctgacacccagccccaggagccagaccactcctgcctccacctctgactcttcagcagctgaagattaatgcagagaaagagcaaagcccaaaagggagaaaaaaaaaacaaaaaaaaaaaaaaa

SEQ ID NO: 2201 - protein, 78 aa, Homo sapiens
MVSFRALGAARPCFQEKPGDIASRPPAIPPSCPGAEWANLSKQLVTGCEGEGQKHLALASDCCPLLSSSHSNDENDFL

SEQ ID NO: 2202 - DNA, 2307 bp, Homo sapiens
ggcacgaggcgatggagccggggcgccggggggccgcggcgctgctagcgctgctgtgcgtggcctgcgcgctgcgcgccgggcgcgcccaatacgaacgctacagcttccgcagcttcccacgggacgagctgatgccgctcgagtcggcctaccggcacgcgctggacaagtacagcggcgagcactgggccgagagcgtgggctacctggagatcagcctgcggctgcaccgcttgctgcgcgacagcgaggccttctgccaccgcaactgcagcgccgcgccgcagcccgagcccgccgccggcctcgccagctatcccgagctgcgcctcttcgggggcctgctgcgccgcgcgcactgcctcaagcgctgcaagcagggcctgccagccttccgccagtcccagcccagccgcgaggtgctggcggacttccagcgccgcgagccctacaagttcctgcagttcgcttacttcaaggcaaataatctccccaaagccatcgccgctgctcacacctttctactgaagcatcctgatgacgaaatgatgaagaggaacatggcatattataagagcctgcctggtgccgaggactacattaaagacctggaaaccaagtcatatgaaagcctgttcatccgagcagtgcgggcatacaacggtgagaactggagaacatccatcacagacatggagctggcccttcccgacttcttcaaagccttttacgagtgtctcgcagcctgcgagggttccagggagatcaaggacttcaaggatttctacctttccatagcagatcattatgtagaagttctggaatgcaaaatacagtgtgaagagaacctcaccccagttataggaggctatccggttgagaaatttgtggctaccatgtatcattacttgcagtttgcctattataagttgaacgacctgaagaatgcagccccctgtgcagtcagctatctgctctttgatcagaatgacaaggtcatgcagcagaacctggtgtattaccagtaccacagggacacttggggcctctcggatgagcacttccagcccagacctgaagcagttcagttctttaatgtgaccacactccagaaggagctgtatgactttgctaaggaaaatataatggatgatgatgagggagaagttgtggaatatgtggatgacctcttggaactggaggagaccagctagcccacagcaaccaaagagacttcctcttggcgttcaggaaacacagattctttgtccttttcccaacagcccaggctgttgatacctcagagccttctctttactctccaaagtgaaagggaagcccccgtctctctaactgcatgtcatcaggggtgagcctgcctttcctatcttcacacctgccacctcatgttcacacctatctttctcaccttttttttgagatggagtctcgctctcttgcccaggctggagtgcaatggcacgttctcagctcactgcaacctccgcctcttgggttcaagcaattctgctgcatcagcctcccgagtacctgggattacaggcatgtgccaccacgcccggctaattttgtatttttaagtaagagacggggttttgccatgttggccaggctggtctcgaactcttgacttcagatgatccatctgccttgggcctcccacagtgctgggattacaggcgtgagccaccatgcccggcctctttctcacctttacacctgtcttcttatcctcacatctgttttcacaccttcatccctgtcttcctcatgttcacacttgtcttccccatgttcatagctgcctttcttaccattttggtttgaagggcagtcttctctggcttgtttttttgtttttcccagaaaatcagtattattttttaaataagaaaaacattcctagaagatgataattgtgaaaacctcctttggcttatttgcttttccagattttagtctcctttctccccatccgggaaagatggtggaagacataggctaaatttctccagcctcacaatggtcttcacttggtctgacttgtaccaattctagcacccactgaaaaacaagttgagtagagagtgtagagtgcagaaatgtggcttttgccccactttgcatctccaaaattacaacggttggccgatcccatttgaggacaatgcttagttataagtctccgagttggaaaaggaagaaagccagagctgtctagtttcattcattctttcagtaaatatttattgagtaaaaaaaaaaaaaaaaaaaaaaaaaaaa

SEQ ID NO: 2203 - protein, 401 aa, Homo sapiens
MEPGRRGAAALLALLCVACALRAGRAQYERYSFRSFPRDELMPLESAYRHALDKYSGEHWAESVGYLEISLRLHRLLRDSEAFCHRNCSAAPQPEPAAGLASYPELRLFGGLLRRAHCLKRCKQGLPAFRQSQPSREVLADFQRREPYKFLQFAYFKANNLPKAIAAAHTFLLKHPDDEMMKRNMAYYKSLPGAEDYIKDLETKSYESLFIRAVRAYNGENWRTSITDMELALPDFFKAFYECLAACEGSREIKDFKDFYLSIADHYVEVLECKIQCEENLTPVIGGYPVEKFVATMYHYLQFAYYKLNDLKNAAPCAVSYLLFDQNDKVMQQNLVYYQYHRDTWGLSDEHFQPRPEAVQFFNVTTLQKELYDFAKENIMDDDEGEVVEYVDDLLELEETS

SEQ ID NO: 2204 - DNA, 2932 bp, Homo sapiens
agagaggagccgactcggcagggactgggggaccgggccgagagtgcgagcgagcgagggagggagtgagggagcgtgcgagccagaaggggaaaggcggccactcgtgcctgagcgaccgcagaggggagtgggagcagtggggtaaaggagcggggggcgggaataagaaaggccgagagaaggcggacagaggctagtggtggtggtggtggtagggggagaaggaggagctggaggagggcaggggctgagggagtgagtgaagcggacgcgcgagggaggggagggaagggaagggaagggaagggggggtcacgcgggggcgcgcgcgcgcaccgggagcgcgctcggaggcgagtggaactggatcgggtttgctgccagcggcgtgagcttcggccgccattttacaacagctccactcgcgccggacacagggagcagcgagcacgcgtttcccgcaacccgataccatcggacaggatttctccgcctcagcccaacggggagatctctggaaacatggctacagaacatgttaatggaaatggtactgaagagcccatggatactacttctgcagttatccattcagaaaattttcagacattgcttgatgctggtttaccacagaaagttgctgaaaaactagatgaaatttacgttgcagggctagttgcacatagtgatttagatgaaagagctattgaagctttaaaagaattcaatgaagacggtgcattggcagttcttcaacagtttaaagacagtgatctctctcatgttcagaacaaaagtgcctttttatgtggagtcatgaagacttacaggcagagagaaaaacaagggaccaaagtagcagattctagtaaaggaccagatgaggcaaaaattaaggcactcttggaaagaacaggctacacacttgatgtgaccactggacagaggaagtatggaggaccacctccagattccgtttattcaggtcagcagccttctgttggcactgagatatttgtgggaaagatcccaagagatctatttgaggatgaacttgttccattatttgagaaagctggacctatatgggatcttcgtctaatgatggatccactcactggtctcaatagaggttatgcgtttgtcactttttgtacaaaagaagcagctcaggaggctgttaaactgtataataatcatgaaattcgttctggaaaacatattggtgtctgcatctcagttgccaacaataggctttttgtgggctctattcctaagagtaaaaccaaggaacagattcttgaagaatttagcaaagtaacagagggtcttacagacgtcattttataccaccaaccggatgacaagaaaaaaaacaggagcttttgctttcttgaatatgaagatcacaaaacagctgcccaggcaaggcgtaggttaatgagtggtaaagtcaaggtctgggggaatgttggaactgttgaatgggctgatcctatagaagatcctgatcctgaggttatggcaaaggtaaaagtgctgtttgtacgcaaccttgccaatactgtaacagaagagattttagaaaaggcatttagtcagtttgggaaactggaacgagtgaagaagttaaaagattatgcgttcattcattttgatgagcgagatggtgctgtcaaggctatggaagaaatgaatggcaaagacttggagggagaaaatattgaaattgtttttgccaagccaccagatcagaaaaggaaagaaagaaaagctcagaggcaagcagcaaaaaatcaaatgtatgacgattactactattatggtccacctcatatgccccctccaacaagaggtcgagggcgtggaggtagaggtggttatggatatcctccagattattatggatatgaagattattatgattattatggttatgattaccataactatcgtggtggatatgaagatccatactatggttatgaagattttcaagttggagctagaggaaggggtggtagaggagcaaggggtgctgctccatccagaggtcgtggggctgctcctccccgcggtagagccggttattcacagagaggaggtcctggatcagcaagaggcgttcgaggtgcgagaggaggtgcccaacaacaaagaggccgcggggtacgtggtgcgaggggtggccgcggtggaaatgtaggaggaaagcgcaaagctgatgggtacaaccagccagattccaagcggcgccagaccaataatcagaactggggctcccaacccattgctcagcaaccgctccaaggtggtgatcattctggtaactatggttacaaatctgaaaaccaggagttttatcaggatacttttgggcaacagtggaagtagaaacagtagggcctctgtaaaattggagactgataggttgatcagaaactcaccctaaatctgaacgggtgccgctataatttgtgacatctggcaagatttccctttatgtatatattttaacaatccgcttggacacgaacaaagccacacttctaactgcttctggcgaactgattttatttttaatttttttcaataaagatattcttagatactgaaagaaatagttaatgagtttgcatttgtgcttgagaaaatttggctcaagtccatttggctgtagtgtcaacgatgtttccagtagtgtttagatttggtgtcttcaaaggtagttgattaaaaccaagtgtgtctttaatatcttgtatcagaataactttgtatgttaccaacttaaattgctagaataaggtaaattgatacacaactgctatttttaatttagaactttgacctaatttgggttttcaaaaccattttggctacttgtattctttatgctgttgtttatttcaataaaaaattcacacct

SEQ ID NO: 2205 - protein, 562 aa, Homo sapiens
MATEHVNGNGTEEPMDTTSAVIHSENFQTLLDAGLPQKVAEKLDEIYVAGLVAHSDLDERAIEALKEFNEDGALAVLQQFKDSDLSHVQNKSAFLCGVMKTYRQREKQGTKVADSSKGPDEAKIKALLERTGYTLDVTTGQRKYGGPPPDSVYSGQQPSVGTEIFVGKIPRDLFEDELVPLFEKAGPIWDLRLMMDPLTGLNRGYAFVTFCTKEAAQEAVKLYNNHEIRSGKHIGVCISVANNRLFVGSIPKSKTKEQILEEFSQVTEGLTDVILYHQPDDKKKNRGFCFLEYEDHKTAAQARRRLMSGKVKVWGNVGTVEWADPIEDPDPEVMAKVKVLFVRNLANTVTEEILEKAFSQFGKLERVKKLKDYAFIHFDERDGAVKAMEEMNGKDLEGENIEIVFAKPPDQKRKERKAQRQAAKNQMYDDYYYYGPPHMPPPTRGRGRGGRGGYGYPPDYYGYEDYYDYYGYDYHNYRGGYEDPYYGYEDFQVGARGRGGRGARGAAPSRGRGAAPPRGRAGYSQRGGPGSARGVRGARGGAQQQRGRGQGKGVEAGPDLLQ

SEQ ID NO: 2206 - DNA, 3336 bp, Homo sapiens
ggcggcggtgaccccggcctggaactgccccggtacggaagtgttccggggtccgtggggagcaggagagggaggcggcggaccgtcccgcgcggggcacgatgttgaacatgtggaaggtgcgcgagctggtggacaaagccaccaatgttgttatgaattattcagagatcgagtctaaggttcgagaggcaacgaacgatgatccttggggaccttctgggcaactcatgggagagattgccaaggctacatttatgtatgaacaatttccagaacttatgaacatgctttggtcacgaatgttaaaagacaacaaaaagaattggagaagagtttataagtcgttgctgctcctagcttacctcataaggaatggatcagagcgtgttgttacaagtgccagagaacacatttatgatttacgatccctggaaaattaccactttgtagatgagcatggtaaggatcaaggtataaatattcgacagaaggtgaaggaattggttgaatttgcccaggatgacgacaggcttcgtgaagagcgaaagaaagcaaagaagaacaaagacaagtatgttggggtttcctcagacagtgttggaggattcagatacagtgaaagatatgatcctgagcccaaatcaaaatgggatgaggagtgggataaaaacaagagtgcttttccattcagtgataaattaggtgagctgagtgataaaattggaagcacaattgatgacaccatcagcaagttccggaggaaagatagagaagactctccagaaagatgcagcgacagcgatgaggaaaagaaagcgagaagaggcagatctcccaaaggtgaattcaaagatgaagaggagactgtgacgacaaagcatattcatatcacacaggccacagagaccaccacaaccagacacaagcgcacagcaaatccttccaaaaccattgatcttggagcagcagcacattacacaggggacaaagcaagtccagatcagaatgcttcaacccacacacctcagtcttcagttaagacttcagtgcctagcagcaagtcatctggtgaccttgttgatctgtttgatggcaccagccagtcaacaggaggatcagctgatttattcggaggatttgctgactttggctcagctgctgcatcaggcagtttcccttcccaagtaacagcaacaagtgggaatggagactttggtgactggagtgccttcaaccaagccccatcaggccctgttgcttccagtggcgagttctttggcagtgcctcacagccagcggtagaacttgttagtggctcacaatcagctctaggcccacctcctgctgcctcaaattcttcagacctgtttgatcttatgggctcgtcccaggcaaccatgacatcttcccagagtatgaatttctctatgatgagcactaacactgtgggacttggtttgcctatgtcaagatcacagaatacagatatggtccagaaatcagtcagcaaaaccttgccctctacttggtctgaccccagtgtaaacatcagcctagacaacttactacctggtatgcagccttccaaaccccagcagccatcactgaatacaatgattcagcaacagaatatgcagcagcctatgaatgtgatgactcaaagttttggagctgtgaacctcagttctccatcgaacatgcttcctgtccggccccaaactaatgctttgatagggggacccatgcctatgagcatgcccaatgtgatgactggcaccatgggaatggcccctcttggaaatactccgatgatgaaccagagcatgatgggcatgaacatgaacatagggatgtccgctgctgggatgggcttgacaggcacaatgggaatgggcatgcccaacatagccatgacttctggaactgtgcaacccaagcaagatgcctttgcaaatttcgccaattttagcaaataagagattgtaaaagaagcagattgaatgaagaatttttagctgtgcagataggtgatgttgggatggaaaatgctaatcaactaccctttcttttatcaagtaattaaaataaatctacataaagaaccaaaaaggctgttttataaaagtgaaatatccagtatttcagagggccaggcaagagcacttcagatgaggcagtcaaaatcatttttttccagtgaggatagaccacaagtgggtggtgagaccattgaaagcctttatcaactgaagagtccatttaacagcataatttgtgggaagactggaatagggctgaataaatgtgtttgaatctctaattttatactttcttttcctgaggaacttgatttttctgtccctggatcgccttgtcataattgggtctgttccttttactaccactcttgagtccatatatgaaatcattaaagttggatgatcagttttttataaaaatatatatttttgtccaagaaaaaaaaaagcatacatatgtgattatggctaaatcaaaggtaactggaatgtatatacttttgctaatgttccagcaacactgctattatactatccaaatttttattgtaacaaaacctctttaagcaattggtgattgccatgggacttttcccatgtcttctgctgtaattatcctgtgcagaactaggaagaaatttttttcaggactgctctatggtttcctttaaaagaaaaaaacttctgtttgtttttagcagtcattatttacaatttgcagtgattaacttggcaaggcttccttccgtgtttatccctgtagccatcatttaagtcaggaacagtcagaaaaatatttattttattttttttttgggtgtctgcaaaggtaaaaatccattaaaaccttaagttaaatataaatgttacaactcaatgtttgcttttagattttatacagtatttgttttgttttggttttgagtgtatataatgcagcattagcaatatggttccaatagaggagttaaatatatattgttaaaggagacctgtagcagtcaaagattttattgatttaatgacaaaggaaattaatgaaaatgtttttgtttttctgctgtaattctgcattaagctcacatgaaaatcatgattctagagtttggaatgcaaaattaattgttttaccctcaagctgggaatatttttcaaaataaatactataatatagatatcaaattattacctccccatgttatgttgaaaatttttttattaaattgataaaactttatttccattatattcataatgttctgttatacataacattaaaatgttcattaaaatc

SEQ ID NO: 2207 - protein, 625 aa, Homo sapiens
MLNMWKVRELVDKATNVVMNYSEIESKVREATNDDPWGPSGQLMGEIAKATFMYEQFPELMNMLWSRMLKDNKKNWRRVYKSLLLLAYLIRNGSERVVTSAREHIYDLRSLENYHFVDEHGKDQGINIRQKVKELVEFAQDDDRLREERKKAKKNKDKYVGVSSDSVGGFRYSERYDPEPKSKWDEEWDKNKSAFPFSDKLGELSDKIGSTIDDTISKFRRKDREDSPERCSDSDEEKKARRGRSPKGEFKDEEETVTTKHIHITQATETTTTRHKRTANPSKTIDLGAAAHYTGDKASPDQNASTHTPQSSVKTSVPSSKSSGDLVDLFDGTSQSTGGSADLFGGFADFGSAAASGSFPSQVTATSGNGDFGDWSAFNQAPSGPVASSGEFFGSASQPAVELVSGSQSALGPPPAASNSSDLFDLMGSSQATMTSSQSMNFSMMSTNTVGLGLPMSRSQNTDMVQKSVSKTLPSTWSDPSVNISLDNLLPGMQPSKPQQPSLNTMIQQQNMQQPMNVMTQSFGAVNLSSPSNMLPVRPQTNALIGGPMPMSMPNVMTGTMGMAPLGNTPMMNQSMMGMNMNIGMSAAGMGLTGTMGMGMPNIAMTSGTVQPKQDAFANFANFSK

SEQ ID NO: 2208 - DNA, 452 bp, Homo sapiens
gggcacagcggacaccaggactccaaaatggcgtcagttggtgagtgtccggccccagtaccagtgaaggacaagaaacttctggaggtcaaactgggggagctgccaagctggatcttgatgcgggacttcagtcctagtggcattttcggagcgtttcaaagaggttactaccggtactacaacaagtacatcaatgtgaagaaggggagcatctcggggattaccatggtgctggcatgctacgtgctctttagctactccttttcctacaagcatctcaagcacgagcggctccgcaaataccactgaagaggacacactctgcacccccccaccccacgaccttggcccgagcccctccgtgaggaacacaatctcaatcgttgctgaatcctttcatatcctaataggaattaacctccaaataaaacatgactggtaaaaaaaaa

SEQ ID NO: 2209 - protein, 94 aa, Homo sapiens
MASVGECPAPVPVKDKKLLEVKLGELPSWILMRDFSPSGIFGAFQRGYYRYYNKYINVKKGSISGITMVLACYVLFSYSFSYKHLKHERLRKYH

SEQ ID NO: 2210 - DNA, 3423 bp, Homo sapiens
acggccgcggtctccggaggtggcgggggtgttggggacgggtgctgcgaccggcactgcccatccgagcgggacgggcgctgagtggccgggaggagccgggtagccgcctggaggagcagtctcggggcctattattggttttttccctccgagaccgattccatctgcagagaccgcgacgccccatcctgggccgggccgcagtgccgcccgcctgagaggcgccgcccgccagccggcccgagcgaacctggagccgccgccgtgcccgccgctcttctcgcggagcctgggcggtcggcggggcctggggcctgggcttcgggcgcggcgttgcggcggccgctcctccccccgcagaacacgctgggccccgggcctggcccggccgagcgccgcgccctcctgacccgcggccgcggagtccggcccccacggcccctcgggccccggcctgccgcccggatccccgcctcctgggcggatctgagttattttttggtctccccctcccccttgagatcgcggcaccggagggccgaccccgccacctgggtcagtgcccgccccggggaagcgtccctcgttttgttcttccccgcgagctctcccgcgcgcccctctcctttctgtgcttaatggatggggttttgagtttttcccctttatttttgtcggctcttgactgggaggcccggcgcgaggctctgcgtctctgcgtccctcgtcgccgcctcgcgcccgcgcggatcccgtcacctgcttcccgccggggatggccggccagtgacggcgccgggtggcccgcgcgtggacacggggccctcgcccaagctgccaccgagccgcggcccccgccctcgacccttctctctcccgtattccgagctctctggaaagagaggagactccagggaagatgtggctgaagctttttttcttgctcctctatttcctggtcctgttcgtcctggccaggttttttgaggccattgtgtggtatgaaactggcatctttgccacccagctggtggatccggtggcgctgagcttcaagaagctgaagaccattttggagtgccgggggttgggctactcagggttgcccgagaagaaggatgtccgggagctggtggaaaagtcaggtgacttgatggagggtgagctctattctgctctcaaggaagaagaagcatccgaatcggtttctagtaccaatttcagtggtgaaatgcacttctatgagcttgtggaagacacaaaagatggcatctggctggttcaggtcatagcaaatgacagaagtcccttggtgggcaaaattcactgggagaaaatggttaaaaaggtgtcaagatttggaatacgtacaggcacatttaactgttccagtgatcccagatattgcaggagaagaggctgggtccgatccacactcattatgtctgttccacaaacaagtacttcaaaagggaaagtcatgcttaaagaatacagtggacgcaagattgaagtagagcacatttttaaatggataactgctcatgcagcttctcggatcaaaaccatttataatgctgaacacttgaaagaagaatggaataaaagtgatcagtattggttaaaaatatacctatttgcaaaccttgaccagcccccagctttcttctctgcactaagtataaagtttactggaagagttgagtttatttttgttaatgtagaaaattgggacaacaagagttatatgacagatattggcatatataatatgccatcatacatacttagaactcctgaaggaatttacaggtatggaaaccacacaggcgaatttatatcccttcaggccatggattcatttttgcgctcattacaacccgaggtaaatgatctgtttgttttgagcttggttctagttaatcttatggcttggatggacttatttattacacaaggagctaccataaagcgatttgtggttctcataagcactttagggacatataattctctattaattatttcctggctacctgtgttgggctttttacagctaccttacttagatagcttttatgaatatagcttaaaattgttgagatattccaatacaaccacactggcttcatgggtaagggcagactggatgttttactcttcacacccagccctgtttctcagtacataccttggtcatggtttactaattgattactttgagaagaagagaaggcgcaacaacaacaatgatgaagtcaatgccaataacttagaatggttatcaagtctgtgggactggtacaccagctacctcttccacccgattgcttcttttcagaactttcctgtagaatctgattgggacgaagaccctgacttattcttggagcgcttagctttccctgacctttggcttcaccctctgataccaactgattatattaaaaacttaccaatgtggcgatttaaatgtcttggagtccagtctgaagaggaaatgtcggaggggtctcaagatactgaaaatgactcggaaagtgagaacacagacactttgagtagtgagaaggaagtatttgaagataagcaaagcgtacttcacaattctccaggaacagcaagtcactgtgatgctgaggcttgttcatgtgccaataaatattgtcagaccagcccatgtgaaaggaaggggaggtcatatggatcatataacactaatgaagatatggaacctgattggttaacttggcctgctgatatgctgcactgtactgaatgtgttgtttgcctagagaattttgaaaatggatgtttgctaatggggttgccttgtggtcatgtgtttcatcagaattgcattgtgatgtggttggctgggggccgacattgttgccctgtttgccggtggccttcttataaaaaaaagcagccatatgcacaacaccagcccttgtcaaatgatgtcccatcttaaccatgtgcaatttgtcctttataagctttgagtatcttacagcttgcctttttaatgttagtcacaatgtttttgtggtttgaagtttagtttaatgttagtgcagtgacgggaaatacacattatgctaatgttgatgacagaatttatttggttgccttgtgtgttaattgaatgcatacctaattgtaaaatttttttatttacaacattggaaattcagaagttaatgtttttttgtaagcacaaaagaagtattatagaaatttatcctagcaagactttacaagataggatcaaattctaatggaattgagccggtttcttatcctaaatgtttcctccctttttacaatctctgtccagcacctcttggttaaataatgtatgctgtgagacatgaaattaaaacagacctatgaaataaattattttaaaaccag

SEQ ID NO: 2211 - protein, 685 aa, Homo sapiens
MWLKLFFLLLYFLVLFVLARFFEAIVWYETGIFATQLVDPVALSFKKLKTILECRGLGYSGLPEKKDVRELVEKSGDLMEGELYSALKEEEASESVSSTNFSGEMHFYELVEDTKDGIWLVQVIANDRSPLVGKIHWEKMVKKVSRFGIRTGTFNCSSDPRYCRRRGWVRSTLIMSVPQTSTSKGKVMLKEYSGRKIEVEHIFKWITAHAASRIKTIYNAEHLKEEWNKSDQYWLKIYLFANLDQPPAFFSALSIKFTGRVEFIFVNVENWDNKSYMTDIGIYNMPSYILRTPEGIYRYGNHTGEFISLQAMDSFLRSLQPEVNDLFVLSLVLVNLMAWMDLFITQGATIKRFVVLISTLGTYNSLLIISWLPVLGFLQLPYLDSFYEYSLKLLRYSNTTTLASWVRADWMFYSSHPALFLSTYLGHGLLIDYFEKKRRRNNNNDEVNANNLEWLSSLWDWYTSYLFHPIASFQNFPVESDWDEDPDLFLERLAFPDLWLHPLIPTDYIKNLPMWRFKCLGVQSEEEMSEGSQDTENDSESENTDTLSSEKEVFEDKQSVLHNSPGTASHCDAEACSCANKYCQTSPCERKGRSYGSYNTNEDMEPDWLTWPADMLHCTECVVCLENFENGCLLMGLPCGHVFHQNCIVMWLAGGRHCCPVCRWPSYKKKQPYAQHQPLSNDVPS

SEQ ID NO: 2212 - DNA, 5429 bp, Homo sapiens
ggcgcggggtccgcgcccggagcgccccgccgcgcacaggagttgaccacatttggccatttcccagaagggccccaccccaagggtgagtggccaatggggagctgtttctgctgacatcaattccccaggaggtactcaccccaagtctgcccaagtgaagatggctgatacccaccctgggatggagcccagcgcctgaggcccttatcatggtgatggtcctaagtgaaagcctcagcacccggggagctgactccattgcatgtgggaccttcagccgtgaactgcacacgccaaagaagatgagtcaaggacctacacttttctcttgtggaattatggaaaatgacagatggcgagacctggacaggaaatgccctcttcagattgaccaaccgagcaccagcatctgggaatgcctgcctgaaaaggacagctcactatggcaccgggaggcagtgaccgcctgcgctgtgaccagtctgatcaaagacctcagcatcagcgaccacaacgggaacccctcagcaccccctagcaagcgccagtgccgctcactgtccttctccgatgagatgtccagttgccggacatcatggaggcccttgggctccaaagtctggactcccgtggaaaagagacgctgctacagcgggggcagcgtccagcgctattccaacggcttcagcaccatgcagaggagttccagcttcagcctcccttcccgggccaacgtgctctcctcaccctgcgaccaggcaggactccaccaccgatttggagggcagccctgccaaggggtgccaggctcagccccgtgtggacaggcaggtgacacctggagccctgacctgcaccccgtgggaggaggccggctggacctgcagcggtccctctcttgctcacatgagcagttttcctttgtggaatactgtcctccctcagccaacagcacacctgcctcaacaccagagctggcgagacgctccagcggcctttcccgcagccgctcccagccgtgtgtccttaacgacaagaaggtcggtgttaaaaggcggcgccctgaagaagtgcaagagcagaggccttctctagaccttgccaagatggcacagaactgtcagaccttcagcagcctcagctgcctgagcgcagggacagaggactgcggtccccagagccccttcgcccgccacgtcagcaacaccagggcctggaccgccctgctctcagcctccggcccagggggcaggacccccgctgggaccccggtccctgagcctcttcccccttccttcgacgaccacctcgtctgccaggaggacctgtcctgtgaggagtcagacagctgcgccctggacgaggattgtggcaggagagcggagccggctgcagcctggcgggaccgcggggcccctgggaacagcctctgctccctggacggcgagttggacattgagcagatagagaagaactgagggggtgtgggcccaggcagggctggggtgtgctggcatcgacagcccccactctgggcactaggtgggcccttgaaggggagcccaactcgtgggcctgatgaaagcttcctgagtggtgtcgggtcccagagagggagcccacctgctgcctgggggagagcctggcctggccgcgtcatacagcgggtgtgtcagcctctcaccggctccccgagcgtggcagccaccaggtccacagaactactgcagcccagaggacagctttgaagtttgcgtcttttctgcctctttccctgtgggatgttgggcagtctctgttgtccccggcagagctgggcaccgctctgtatccccctggtggtgggggctgtcagggagggcctggggtgggggccaggggccatctgctatgtcagggcccttcttggcctcactcaggttcacttctggggagtcggccccgcagcttctttcactcagttttactccgtgccttctctcccaggtctccctgcttcaggcttgggaaggttcgggagatgcttccttctgtaacaccagaaccatttggccttaattccaatgtgagagacagaatccctggggtgctggactggccctccagagggtaagccatgtccggagtctcgggcccaaggaacgatttggagggtgcttgttagggcctcccgtgttgggtagaaatttggtggatctgttggctgaaaagatggacttgcttgcctctcctacagcatggagaggctgaccccatggctctgccaccgttggggcagggttagcagatggcagcccttctctgtggctgacaggtcactgagtgataagcatggttggttccggtgagtgtagggatggcacgataccagggcagcctcttgaaaacggcctcgggagacgggagctgcgagcaggtgggcagatgagggccctatgcgcactcaggggtgaagggcgtccgctggccactctgcaggggcccctgcaggattccaggcacctcccgtttgtccttgaggactgctggctgtaaccagggcacatcacccacctcaagacaagcccacgcccttgtcagcttagggggagcccagtcctgagggctgcatctctgttgtaggcccagccaccggcacaaagctggattcatgctccctgcccctaccccaccctggctcctcaccctggggcatccgaggagcctagccccctgagggtttgctctcctctcaaggtttgtagctcctctccggctgccttgcagacaccaccacatgggctctgctctatgggaatctggcttttagcgaatgtggcgtcttctgcaaacaatagcaattgggctggcttaggagcaagtggctcattttcccataaggctaaaaataactggtgcgctcccttgtgttggctgacacgcgcgttcaaagcacttttgtagtcactttgcttttgctcgtcttcatggacgagtgaacgcctcgcttctgcaggttgagtccagatgcttctcaccttctttctcctcaagaaagatgctttttgggaaacgttgtttaaatcttatttttttactacatcaaaaggatggtggttcaagttcccaatatgtgggtggcacttcttaaaaatcagctttaaggagctggcagaaagcccccagccccacagccctgagagatggtgttgctagctcaggtggctgacacatggggtatgccgggcactgggcaggtcccagagccggggaaccagctcacctctggttgctgtagctcctgccggaggcatgtctacttgtgatcccggacagccgaacccaagagctggtggctctgagcagacagagacatcttggcctgtccctgcctgggggtcatggagaccatgtcttcttagagcaaatgtggaggcggccagggcagttgttgggtgaatgtggagagcacatggccatgtcttgcccccggagtaccactgggcgtggggggtcctggcaccacatgcccggtgtggccgagggcacacagcctctatagcaggccttcctgtggaaggcagaggcagtgagggaggtggacggtgccagctgaggctgaggcatgcagcagcccccagctacctttgcttagggctggggtgggaggcacatggtgacaggtatatgtcgtgggactggggtgtgggtgacctgccctcaaaccttgcctgccacctccccattcaggcctggtggcaggaagggacaagctgtggagctggctgagtcacagccacctccccacctccccgcaagctggtcccatcgaccagcaagcccagccccagggcgcttagggagaaatgacccagcctcctcagaccccgcctgcctgtcctgtgcccaccacgcagcagtcaggggagaaaatggtggctatcccttctgcttagagaaagaaatggcctttagctggtttcatgtttgtgttttgactggagggagtagaccctatctataaggtgccaccccatcatccaagctgccacactgcccggagcagcctgttcctgcactccaccctgctggccccaggacttctgatctcagtcctctgggagggaggttcgcctaggaggtgccccccacattggtgtccccatgggcagcaggcagacagctcacccccaccagcatgatggccccagctgggggcagtggcaggagccttacttttgtcacagccttgcccacaaaccctgcctctgaggggagactgaggaagggcagagccagaagcaagccgtgccaggccatctgcctgctcatggggtcctaaagcgcgggctaagcctgcaggaaagccggggcggtggggggggcttagtgccacatgcaccccactcattccaaagccaccaaactgccaggggctgccgtccacccgtggggcccaggggctggggccacagccttgccattttcgttgccataccctcttgccttactcgcggtggaggccggatttgcacgggcagacgtgcacctgggcccgtggggagcttgttctgaccagacgtacagattttcattctcagaaagccttacttttcaaccaaatttttgtagccagttttgtgaatttgtacactgaaagaaaatttaaataaaggggaagtccacattaaaaagaaaacaaaacaaaccctaactaacttccaaatgggtctcctggtgcgggggcgtgagtggccgtgccctgggtgtgctgcctgtctgagcaagcttccctagctgtggaaccccgggccccctgctgcgggctctgccttggtgtcatgcctgctgcacccccgtttccactgacgtgccgtctgtggctatgggggtggtcactggaatgacggtcactccagacgtcagccggcagggatgcagcaggctggccgcgcaccggggctcgggcaccctctggccccacactggcaatgatgccacaccttgccatgtccacgctgttggtcaaacccctctgtcatgcctctttaaagagaaaagaagagaaagattttttttttttttaatggcagaccgaagtggagatcttgtagcctagataggatagtctgaccttctagcatagtctttttggcaaatgatttgtgttttcagtgtgtggggaagctgtcctgggggctggggcgacagatagcacataggctgtttctggggctgcaggggcttccctgagctggatgttgtgggtgttgccgtgcttcaggaagtgtggcgaccagaaagcgtagacccggggcccagggtctgcccgcccctgcagcctggcctccccgcacaggctgtggcttgcactccagccgctctagtctctcaggaatttgcttgttacttgtactgtgtaaataaagcttcctggttcaataccc

SEQ ID NO: 2213 - protein, 422 aa, Homo sapiens
MVMVLSESLSTRGADSIACGTFSRELHTPKKMSQGPTLFSCGIMENDRWRDLDRKCPLQIDQPSTSIWECLPEKDSSLWHREAVTACAVTSLIKDLSISDHNGNPSAPPSKRQCRSLSFSDEMSSCRTSWRPLGSKVWTPVEKRRCYSGGSVQRYSNGFSTMQRSSSFSLPSRANVLSSPCDQAGLHHRFGGQPCQGVPGSAPCGQAGDTWSPDLHPVGGGRLDLQRSLSCSHEQFSFVEYCPPSANSTPASTPELARRSSGLSRSRSQPCVLNDKKVGVKRRRPEEVQEQRPSLDLAKMAQNCQTFSSLSCLSAGTEDCGPQSPFARHVSNTRAWTALLSASGPGGRTPAGTPVPEPLPPSFDDHLVCQEDLSCEESDSCALDEDCGRRAEPAAAWRDRGAPGNSLCSLDGELDIEQIEKN

SEQ ID NO: 2214 - DNA, 2000 bp, Homo sapiens
cccacgcgtccggtaaaccagccggagcggcgcggcagcggcaggaccgccgtggcgcctagagtagcgacccggggggagcgcggggcgacgctggctgcagggacccggtgacagcgtgagaggttcgcagagtactaggttttgacaagcttgcatcatgcgtgagtataagctagtcgttcttggctcaggaggcgttggaaagtctgctttgactgtacaatttgttcaaggaatttttgtagaaaaatacgatcctacgatagaagattcttatagaaagcaagttgaagtagatgcacaacagtgtatgcttgaaatcttggatactgcaggaacggagcaatttacagcaatgagggatttatacatgaaaaatggacaaggatttgcattagtttattccatcacagcacagtccacatttaacgatttacaagacctgagagaacagattcttcgagttaaagacactgatgatgttccaatgattcttgttggtaataagtgtgacttggaagatgaaagagttgtagggaaggaacaaggtcaaaatctagcaagacaatggaacaactgtgcattcttagaatcttctgcaaaatcaaaaataaatgttaatgagatcttttatgacctagtgcggcaaattaacagaaaaactccagtgcctgggaaggctcgcaaaaagtcatcatgtcagctgctttaatatactaaatgcattgtagctctgagccaggtctgaagaactgttgcccaattcaacagtgccagcattccaactttgttaaacctaccaacatcttaaatggactttcctgtggtggtaccctttaagaggcggatgaaagctactatatcagtttgcacattctaatcactttccagtatcacaagagagatttttacttatataatagtcctagagtttgcagctggtaaaaccagaggctacatccagtattactgctaagagacattcttcatccaccaatgttgtacatgtatgaaaatggtgtactgtatactttaacatgccccatactttgtattggagagtacaataatgtaaatcctaaaagcaccactattttagcataataaaagaaagtccaaagagctcctatatagactactccagataacttcgcttctttgatacttgtagcttattgtaattttttttaagaaattcaaggtcattattattgtacaaaataagcgctttgattaacacagctatatagtttttttaatttttaaaaaacctgtggagacggtgatcttgtctttaaaacatgatagtcctttcagtataatgtcttagattaaagacgttgcctttaatatctgttgggaaggaaatgtccagacttttcaaatctcttattatatgtttcctttttttgtttacatagggaacaatgtttatagtcgtgtgtacagtgggggtctacaacaagaagtgtatattttcaaacaattttttaatgatttaacaatttttgtaaatcattttcaggcttctgcagctgtagattctcactgtgaatcccttgcttgctcatgcataagtgtatttgcaataccaaatatacaggtttagtatttttgcctgttagtgattgtttcacatgtgtaacgttttggttgagatgttaaatggtggacgagtactgtggatgtgaatgtgggaagtaattttaatcatatgtaattggtcacaaggcctaatttgcagtaactattgctgttttatttaacaatgccttgttgctttgtatgcattaatgtttggatgtaaagattgtgtgtctatccaacagggagccacagtatttaaattgaccaacctaatgttacaactactttgaggtggccaaatgtaaactaaaagccttaattaaagtggtgcaattttgtataacttagcatcagtagttcaataaatttggattgccatgcaagggcttgcattataaaaaaaaaaaaaa

SEQ ID NO: 2215 - protein, 184 aa, Homo sapiens
MREYKLVVLGSGGVGKSALTVQFVQGIFVEKYDPTIEDSYRKQVEVDAQQCMLEILDTAGTEQFTAMRDLYMKNGQGFALVYSITAQSTFNDLQDLREQILRVKDTDDVPMILVGNKCDLEDERVVGKEQGQNLARQWNNCAFLESSAKSKINVNEIFYDLVRQINRKTPVPGKARKKSSCQLL

SEQ ID NO: 2216 - DNA, 6014 bp, Homo sapiens
cgcttcctgcgcctcttcaggtcaccgcttgctctagttcccaggctttggcctctagtggatgagaatcaccgagtctgcggggctggacgctgaccgcccgggccagcacctaggcgggcgggagctgtgcggcccagggttcgcgcgggccgggtagaggctcgagccgggacccccgagcgtgaaccccggagccagcggcgctggggccagaggggccaggcgggaggtggtggcggaggcgaaggggcgacgggacctgggcctggcccgtgtgtgtcctcggcggcctggcgccggccgtcgctgtacggtgagccccagggaggcggatctgggccccgagaaggacacccgcctggatttgccccgtaggcccggcccgggcccctcgggagcagaacagccttggtgaggtggacaggaggggacttcgcgagcagacgcgcgcgccagcgacagcagcccgccccggcctctcgggagccgtggggcagaggctgcagagccccaggagggggccagtgtcattcaaagatgtggctgtggatttcacccaggaggagtggtggcaactggaccctgatgagaagataacatacggggatgtgatgttggagaactacagccatctagtttccctggcttatgaggtggcaacatcttgtacttcggagatctgaagccgagcaacttgcccaagtccttcttcttttcccattaacaagatatgatatcaccaagccaaacgtcatcattaagttggagcagggagaggagctgtggataacgggaggtgaatttccatgtcaacatagtccagggattgtgggactttaccaaatcggtttgtaataacacctagaagacgctatccgatccatcaggcccagtattcctgtctgggggtacttcccaccgtgtgctggaatggttatcacaagaaggctgtgctgtcccctcgcaactccaggatggtgtgtagcccagtgactgtgaggatcgcccctcctgacagaagattttcgcgttctgcgataccagagcagataatcagctcaacactgtcctcaccatcaagtaacgccccagacccatgtgcaaaggagacagtactgagtgccctcaaagagaaggagaagaaaaggacagtggaggaagaagaccaaatattccttgatggccaggaaaataaaagaaggcgccatgatagcagtggcagtggacattcagcatttgagcccctggtggccaatggagtccccgcttcttttgtgcctaagcctgggtctctgaagagaggcctcaattctcagagctcagatgaccacttgaataagagatcccgaagctcttccatgagctccttgacaggcgcttacgcaagtggcatccctagctccagccgcaatgccattaccagttcctacagctccactcgaggcatctcacagctctggaagagaaatggccccagttcatcacccttctctagcccagcctcctcccgctcccagacaccggagaggccagcaaagaaaataagagaagaggagctgtgtcatcattccagttcttcaactccattggcagcagacagggagtcccagggagaaaaggctgcagatacaaccccaaggaagaaacaaaactcgaattctcagtctacacctggcagctctgggcagcgtaagcggaaagttcagctgctgccttctcggcgaggggaacagctgaccttgcctccacctccccagcttggctattcgatcactgccgaggacctagacttagagaagaaggcttcattacagtggttcaaccaggccttggaggacaagagcgatgctgcctcgaactctgtcactgagaccccacctatcactcagccttcatttacctttaccctgcctgctgctgcacctgcctccccacccacctccctcctggccccaagcaccaacccactgttagagagcttgaagaagatgcagactcccccgagcctgccaccctgcccagaatctgctggagcagcaaccactgaggccctctcacctccaaagacacccagcctcctacccccgctgggtttatcacagtcagggccgccagggctgctccccagcccctcctttgactccaaacccccgaccactttgctggggctgatccctgctccatccatggtaccagccactgacaccaaggcacctccaacccttcaggcagagacggctaccaaaccccaagccacatctgccccgtcccccgcccccaagcaaagcttcctgtttggaacacagaacacctcaccttccagccctgccgcccctgctgcatcttcagcacctcccatgttcaagcccattttcacggctccacccaagagtgagaaggaaggccccacaccgcctggcccttcagtcacagccacagcgccctccagctcctccctccccacgaccaccagcaccacagccccgaccttccagcctgtctttagcagcatggggccacctgcatctgtgcccttgcctgctcccttcttcaagcagacaactactcccgccactgctcccaccacaactgccccgctcttcactggcctggccagcgccacctctgctgtggctcccatcacctctgccagtccatccacagactctgcttcgaagcctgcgtttggctttggcataaacagtgtgagcagcagcagtgtgagtaccacgaccagcaccgccactgccgcctcacagcctttcctcttcggggcgccccaggcctctgctgccagcttcaccccggccatgggctccatattccagtttggcaaacctcctgccttgcccacaaccaccacagtcaccaccttcagccagtccctgcacactgccgtgccaacggccaccagcagcagcgctgccgactttagtggttttggcagcaccctcgccacctccgccccggccaccagcagccagcccactctgacgttcagtaacacgagcacccccacgttcaacattccctttggctcaagcgccaagtccccgctcccatcatatccgggagccaacccccagcccgcatttggggccgctgaggggcagccaccgggggccgccaagccggcccttgcccccagctttggcagctctttcacttttggaaactctgcagccccggctgctgcacccacacctgcacctccgtccatgatcaaggtcgtgcctgcgtacgtgcctacgcccatccatcctatctttggcggtgccacgcactcggcgtttgggttgaaagccacggcttcggccttcggcgctcccgccagctcacagcccgcctttggcggctccactgctgtcttcttcggtgcagccaccagctccggctttggagccaccacccagaccgccagcagcgggagcagcagctcggtgtttggcagcacaacaccatcacccttcacgtttgggggttcggcagcccccgctggcagtgggagctttgggatcaatgtggccaccccaggctccagcaccaccaccggagctttcagctttggagcaggacagagtgggagcacagccacctccacccccttcgcagggggcttaggtcagaacgccctgggcaccaccggccagagcacaccgtttgccttcaacgtgagcagcacaactgagagcaaacctgtgtttggaggcaccgccacccccacctttggtctgaacacccctgcgcctggagtgggcacatcaggcagcagcctctcctttggggcatcctcagcacccgcccaaggctttgttggtgttgcacctttcggatcggcggccctttcattttccattggtgcgggatccaagaccccaggggctcgacagcgactgcaggcccgaaggcagcacacccgcaaaaagtagcctttgtcccctgtccctgttccccccaccccttccctaaatctggaccttggcacctgctaggaagagccttggacccttccagttgcgtaaagcaaacctaccccggatctctggcttcagccgccagggggcagtggcagccctggggccctttcccttctggaggaagcacaagcctcagggaaggggaagcaggatgcggagggccaaagcccgggacctctacttgaacagttctactggggaggctggagaactaaggaaacacctgtacatagtgtccgctgccctgactcccgcttagcacacccttaggcaggcgccccttccacctttccccgagaccgtcgtcgctggagggggcagggtccagcccgcctggatcggtggtgtgcacctgatgggatttgggaaatgggctatccgtaaagctttatcttgcttggcttagctgtgagaagtggttctcttcctctggtcccttctggggactctgtttccccatttcttgctgctgtgtccctcaccagttccttgcaggattccttcgtttttaaatgcccttgaatctagctttgccttggagaccccagtgggtgctgctcctgccgttttcttcctgccaagcctgaatcaatgtttcatctccaaccctctgccagtttggcccctcagagcttggtggctcaagactgttagcctggcagagccaggggtgaagggagaagctcttggagcaggcaggatgcccaccgctgcttcagctgcctcctcgcccagctaccctttggccccattgggccctcgtctgcctctccaggattgtatgtttcaagccttgtcctgtgttcctttgtctgacgctctgtgtattgctctttgaatcgagtttggaggaagagttgagttgtatgagtggcggcatgttggtagtgccggacttcctgtttcaagttttctggggcctcgctaattgaatgtggaaagtagcaccacttgacggctacaagtgccgactcctgaattttcccatggtgttctgacttcaagggctggcagccagggagaatgggcccaggggaagcaaagacctcttccctctgccgtttctgtcccacttaactgacctcactggaggctacatcacccaaagtagatgttagaaaacctaaattaatgaaccatatttttaaaatcctatttttcccaaacagggccctctgcagcccatcctttccttccgtccttctgaaaccacataccccaggcccaagcgccttgctgccacgcccaacctctttgggagaagtatgaatgcgtgtgtctaaattaaaagaaaaaaatatttaaacgttttttaacaaaaatttatttttgtatttaagctaaattgccttttaaattccttcaagcttggttcattgaggtggttaagtataaatgctattaactaggaattagctgtatagttaagttatgcctgtgcaaagaagaggctcaaatgctgtccccggcagctttcctgggggactagagctccttctggccatgttatatgaaatgtaattcttattttataaataatgtgatgtaaatgtaactggtgccccctccccgatgtgactgagggtgagtgagtggtggcggggctgctccttcccacccctcagaacagctctgatcctcgttaatacctggctgcgtgtgcagctgaggagggagtgaacctcaagcctaaatacctgttaggattggagggtctgggtgggcctgggcctagcaatcaagcttctacctgtaccttatgtaaggtagaccctcctagtgtcagtacctgagctagtttacctcagttccgcaggcaggacagccggtccgggaaccctgagtgagaatgagtgtggatgtgtacagtacacgcactggacggcagcgggaggctgggactttccattacaaatagagacttcattcctgttgagtctagttggaatttttagtatgaatgtgagatttttctcctgcttgtgacattaagaataaaaaactgtgatctatcgtaaaaaaaaaaaaaaaaaa

SEQ ID NO: 2217 - protein, 984 aa, Homo sapiens
MVCSPVTVRIAPPDRRFSRSAIPEQIISSTLSSPSSNAPDPCAKETVLSALKEKEKKRTVEEEDQIFLDGQENKRRRHDSSGSGHSAFEPLVANGVPASFVPKPGSLKRGLNSQSSDDHLNKRSRSSSMSSLTGAYASGIPSSSRNAITSSYSSTRGISQLWKRNGPSSSPFSSPASSRSQTPERPAKKIREEELCHHSSSSTPLAADRESQGEKAADTTPRKKQNSNSQSTPGSSGQRKRKVQLLPSRRGEQLTLPPPPQLGYSITAEDLDLEKKASLQWFNQALEDKSDAASNSVTETPPITQPSFTFTLPAAAPASPPTSLLAPSTNPLLESLKKMQTPPSLPPCPESAGAATTEALSPPKTPSLLPPLGLSQSGPPGLLPSPSFDSKPPTTLLGLIPAPSMVPATDTKAPPTLQAETATKPQATSAPSPAPKQSFLFGTQNTSPSSPAAPAASSAPPMFKPIFTAPPKSEKEGPTPPGPSVTATAPSSSSLPTTTSTTAPTFQPVFSSMGPPASVPLPAPFFKQTTTPATAPTTTAPLFTGLASATSAVAPITSASPSTDSASKPAFGFGINSVSSSSVSTTTSTATAASQPFLFGAPQASAASFTPAMGSIFQFGKPPALPTTTTVTTFSQSLHTAVPTATSSSAADFSGFGSTLATSAPATSSQPTLTFSNTSTPTFNIPFGSSAKSPLPSYPGANPQPAFGAAEGQPPGAAKPALAPSFGSSFTFGNSAAPAAAPTPAPPSMIKVVPAYVPTPIHPIFGGATHSAFGLKATASAFGAPASSQPAFGGSTAVFFGAATSSGFGATTQTASSGSSSSVFGSTTPSPFTFGGSAAPAGSGSFGINVATPGSSTTTGAFSFGAGQSGSTATSTPFAGGLGQNALGTTGQSTPFAFNVSSTTESKPVFGGTATPTFGLNTPAPGVGTSGSSLSFGASSAPAQGFVGVAPFGSAALSFSIGAGSKTPGARQRLQARRQHTRKK

SEQ ID NO: 2218 - DNA, 2222 bp, Homo sapiens
ggctcgagtgcctggcgggctccggcttccgcgtccgcccctgctccggcttcgcccgcagctccgcgcccgcgggcaaccaagcccccagcgaagcccgcacagctccgggtgccaggacggggggccatgccgtgccggagggaggaggaagaggaagccggcgaggaggcggagggggaggaagaggaggacgacagcttcctcctgctgcagcagtcggtgacgctgggcagctcgggcgaggtggaccggctggtggcccagatcggcgagacgctgcagctggacgcggcgcaggacagcccggcctcgccgtgcgcgcccccgggggtgccgctgcgggccccggggcccctggctgcggcggtgccggcggacaaggcccggcccccggcggtgccgctgctgctgccgcccgcttcggctgagacggtgggcccggcgccctctggggccctgcgctgcgccctaggggaccgcggccgcgtgcgcggacgcgctgcgccctactgcgtggcggaggtcgccgcaggccccagcgcgctgccggggccgtgccggcgaggatggctcagggacgcggtcacctcccgccgcttgcagcagcgccgatggacccaagccggggcacgcgccggcgacgacgacccgcatcggctcctccagcagctcgtgctctcgggaaacctcatcaaggaagccgtgcggagactccaacgagccgtcgccgcggttgcagccacgggccccgcaagcgcccctgggcccgggggaggccgcagcggacctgaccgcattgccctgcagccctcaggctccttgctctgacgcaggcctcctggaggaggaagtggaggccgctgcgtagacccaacagcgtccagttcctactaactctgagctgaagccgacgtcgccagcctgggagcgaccactttggctgcggggaggcgcgtggggagagatctcaaccagagaagttaccagccgcggcgaggccgtcggagaaaacttaagcgtggagaaatgtatgcgccagggtgcttccgtggggcatgagaatttcccgggccatccaagcccaaggacctgggataaactgggagaactatggcagctacttgcatcgacttgtacctcacttagcccttgggggcgtcgtgagcttggattgtttaaggagggctcaggggtaggaatcgcgatggctttataacaatacttgaaaactaacgacacgcatacattttcttattttctggtggaggagcttagtaagtggtgctacaattgctgtgcaaagaaattccagaggggagaagaatgtaaaagtttggtggtgggtggcttggcattgcccctttttcccaccgattcggtggctggtgaaggtgggagatgtgaactccaattaagggactggagagaggtgaagaattttgcaggtgggagatttggatttgaatgtggacttgtaaatgacttgaccttgccatctgtgttcaaggtcacggtttgctgtggggttcctgggagagcttactcaccccggagtcttttctttctcttgctccaagaagagccctgttggtgctttaccaccgcttggagtctcccgaggacacaaacaggcagagagggacgtgtagggagagttctttcctgttttctgtgctttcctttttacaggactcccggaaggccactcatggccatgccaggagctttctcagaaacagtcataaacgatctcttgagtctctttcttgtcctcccagctgagctttcttattccaccctttctggtgtctataggaatgcatgagagaccctggacgtttttctgctctcttctggccctccatggagtcatgggcctcggcctcggcggctcctcaccctcacaatttatttcctcctcccgtgccagcccttcttttgtgtctgaaaccggttttaaaatgtgactctcccagagaagaagccgctggctgtatgaaacttgacggcgcttttgtaaggtgccacccccaaactttaaggtagctaaaccaatttttaaaagattcaatggcttgttcatcctccagatgtagctattgatgtacacttcgcaacggagtgtctgaaattgtggtggtcctgatttataggatttcataattaaaatgtctgctgaataaatttggcttttgttttggaaaaaaaaaaaaaaaaaa

SEQ ID NO: 2219 - protein, 233 aa, Homo sapiens
MPCRREEEEEAGEEAEGEEEEDDSFLLLQQSVTLGSSGEVDRLVAQIGETLQLDAAQDSPASPCAPPGVPLRAPGPLAAAVPADKARPPAVPLLLPPASAETVGPAPSGALRCALGDRGRVRGRAAPYCVAEVAAGPSALPGPCRRGWLRDAVTSRRLQQRRWTQAGARAGDDDPHRLLQQLVLSGNLIKEAVRRLQRAVAAVAATGPASAPGPGGGRSGPDRIALQPSGSLL

SEQ ID NO: 2220 - DNA, 2460 bp, Homo sapiens
agcggggttccctctccggggagcggcggcggacgcgcggctcccacccctcccctctcacgggctctcccctccccagtgtggccgcgaccctaccctctgcaaggcgatggcccgcgccccgagcgcaggctagcgtgcctgggtgcccggccatgggctgtatcggctctcggagcccggcgggtcaggcatttctggggaccaacagctggccgaggctcagggatagagacggctgctccagctaaaggtgaatgttggagacacagtcgcgatgctgcccaagtcccggcgagccctaactatccaggagatcgctgcgctggccaggtcctccctgcatggtatttcccaggtggtgaaggaccacgtgaccaagcctaccgccatggcccagggccgagtggctcacctcattgagtggaagggctggagcaagccgagtgactcacctgctgccctggaatcagccttttcctcctattcagacctcagcgagggcgaacaagaggctcgctttgcagcaggagtggctgagcagtttgccatcgcggaagccaagctccgagcatggtcttcggtggatggcgaggactccactgatgactcctatgatgaggactttgctgggggaatggacacagacatggctgggcagctgcccctggggccgcacctccaggacctgttcaccggccaccggttctcccggcctgtgcgccagggctccgtggagcctgagagcgactgctcacagaccgtgtccccagacaccctgtgctctagtctgtgcagcctggaggatgggttgttgggctccccggcccggctggcctcccagctgctgggcgatgagctgcttctcgccaaactgccccccagccgggaaagtgccttccgcagcctgggcccactggaggcccaggactcactctacaactcgcccctcacagagtcctgcctttcccccgcggaggaggagccagccccctgcaaggactgccagccactctgcccaccactaacgggcagctgggaacggcagcggcaagcctctgacctggcctcttctggggtggtgtccttagatgaggatgaggcagagccagaggaacagtgacccacatcatgcctggcagtggcatgcatcccccggctgctgccaggggcagagcctctgtgcccaagtgtgggctcaaggctcccagcagagctccacagcctagagggctcctgggagcgctcgcttctccgttgtgtgttttgcatgaaagtgtttggagaggaggcaggggctgggctgggggcgcatgtcctgcccccactcccggggcttgccgggggttgcccggggcctctggggcatggctacagctgtggcagacagtgatgttcatgttcttaaaatgccacacacacatttcctcctcggataatgtgaaccactaagggggttgtgactgggctgtgtgagggtggggtgggagggggcccagcaaccccccaccctccccatgcctctctcttctctgcttttcttctcacttccgagtccatgtgcagtgcttgatagaatcacccccacctggaggggctggctcctgccctcccggagcctatgggttgagccgtccctcaagggcccctgcccagctgggctcgtgctgtgcttcattcacctctccatcgtctctaaatcttcctcttttttcctaaagacagaaggtttttggtctgttttttcagtcggatcttctcttctctgggaggctttggaatgatgaaagcatgtaccctccacccttttcctggccccctaatggggcctgggccctttcccaacccctcctaggatgtgcgggcagtgtgctggcgcctcacagccagccgggctgcccattcacgcagagctctctgagcgggaggtggaagaaaggatggctctggttgccacagagctgggacttcatgttcttctagagagggccacaagagggccacaggggtggccgggagttgtcagctgatgcctgctgagaggcaggaattgtgccagtgagtgacagtcatgagggagtgtctcttcttggggaggaaagaaggtagagcctttctgtctgaatgaaaggccaaggctacagtacagggccccgccccagccagggtgttaatgcccacgtagtggaggcctctggcagatcctgcattccaaggtcactggactgtacgtttttatggttgtgggaagggtgggtggctttagaattaagggccttgtaggctttggcaggtaagagggcccaaggtaagaacgagagccaacgggcacaagcattctatatataagtggctcattaggtgtttattttgttctatttaagaatttgttttattaaattaatataaaaatctttgtaaatctcaaaaaaaaaaaaaaaaagaaaaaaaaaaaaaaaa

SEQ ID NO: 2221 - protein, 281 aa, Homo sapiens
MLPKSRRALTIQEIAALARSSLHGISQVVKDHVTKPTAMAQGRVAHLIEWKGWSKPSDSPAALESAFSSYSDLSEGEQEARFAAGVAEQFAIAEAKLRAWSSVDGEDSTDDSYDEDFAGGMDTDMAGQLPLGPHLQDLFTGHRFSRPVRQGSVEPESDCSQTVSPDTLCSSLCSLEDGLLGSPARLASQLLGDELLLAKLPPSRESAFRSLGPLEAQDSLYNSPLTESCLSPAEEEPAPCKDCQPLCPPLTGSWERQRQASDLASSGVVSLDEDEAEPEEQ

SEQ ID NO: 2222 - DNA, 2984 bp, Homo sapiens
gttttacgctgccgccggcatccgctcggacgcggccacgttgtcttgcgcgctttgcccgcctggccctgggactctgaccctcggctaccctttcctgccccactagcgtggccgcgagcctcggtgagccggccgtattcccgctctcgcttagggggcacaggcgcaggcatcggcccggccactccaagccttcggtgcgcgggcgcgtctgggatacgggcccgggaggcgccgccctccgtccgcccggtgcctctcaggaacagcgaaccggagagagcgccggagagttgggctcagtgcggagctcggcgccggggcccatgcccgtgcgcccccgcaggccggcgccatggcctccgggagtgtggccgagtgcctgcagcaggagaccacctgccccgtgtgcctgcagtacttcgcagagcccatgatgctcgactgcggccataacatctgttgcgcgtgcctcgcccgctgctggggcacggcagagactaacgtgtcgtgcccgcagtgccgggagaccttcccgcagaggcacatgcggcccaaccggcacctggccaacgtgacccaactggtaaagcagctgcgcaccgagcggccgtcggggcccggcggcgagatgggcgtgtgcgagaagcaccgcgagcccctgaagctgtactgcgaggaggaccagatgcccatctgcgtggtgtgcgaccgctcccgcgagcaccgcggccacagcgtgctgccgctcgaggaggcggtggagggcttcaaggagcaaatccagaaccagctcgaccatttaaaaagagtgaaagatttaaagaagagacgtcgggcccagggggaacaggcacgagctgaactcttgagcctaacccagatggagagggagaagattgtttgggagtttgagcagctgtatcactccttaaaggagcatgagtatcgcctcctggcccgccttgaggagctagacttggccatctacaatagcatcaatggtgccatcacccagttctcttgcaacatctcccacctcagcagcctgatcgctcagctagaagagaagcagcagcagcccaccagggagctcctgcaggacattggggacacattgagcagggctgaaagaatcaggattcctgaaccttggatcacacctccagatttgcaagagaaaatccacatttttgcccaaaaatgtctattcttgacggagagtctaaagcagttcacagaaaaaatgcagtcagatatggagaaaatccaagaattaagagaggctcagttatactcagtggacgtgactctggacccagacacggcctaccccagcctgatcctctctgataatctgcggcaagtgcggtacagttacctccaacaggacctgcctgacaaccccgagaggttcaatctgtttccctgtgtcttgggctctccatgcttcatcgccgggagacattattgggaggtagaggtgggagataaagccaagtggaccataggtgtctgtgaagactcagtgtgcagaaaaggtggagtaacctcagccccccagaatggattctgggcagtgtctttgtggtatgggaaagaatattgggctcttacctccccaatgactgccctacccctgcggaccccgctccagcgggtggggattttcttggactatgatgctggtgaggtctccttctacaacgtgacagagaggtgtcacaccttcactttctctcatgctaccttttgtgggcctgtccggccctacttcagtctgagttactcgggagggaaaagtgcagctcctctgatcatctgccccatgagtgggatagatgggttttctggccatgttgggaatcatggtcattccatggagacctccccttgaggaggtgaattcaggccaaaagggctgttggctgtaatcctacgccaggcacaaggcatcttgttgccttgccacgtcctgtcacagctgggtatccttaccatgttccacgcccttgcagtgggagacaggatgtccatgttctctaccatccttttccttcccatgcagattgtgaaatgtaatgagatgtatcaagacatcctagaaataaaaaccagatgtccacctccagtgtttcatactttctggttttacacatcgctggagggataaagagtatggataatctttggatttggagagccgttcaagatacttccagcttcttggctcagcctggcttcctctggttcagccccacataatgattatggctatttgctgtcatttctgggctagggctcctttctaacaacctagactggaataaggccctgtcagcatggctccctttatcccagttttccgtctgggaacagtacctctgcccctgattcccaatgtgccatagttttattaactccattaaagaagcctgtatgtgttttggttagttacagttattttacaataatggtgggtaatggccccacctctgttatgagataatgttctaatcaatgtctctgcctttgtatcttttctgagggctttgtctgttctcttcattctaatgaaaggtgtattctagtgctgggtgcatatcatccaggataatattctgcccaactccatcctctgttactagatcccttaccagtcacatttgtggactggtggccagtcgtataccatccctggaaggattctgggacaatattccagggattcattgacttcttggctccttttctccatttcctttgggggaagggggaattgaccatgcttaagtgcatcctatcaaggggcagctccgtccccatggccattggatcatgagacactcgaagtcagaaggctggggcagatcacttcaagcaagcccccatgatggttctcagtcctgcttctctgtgggtacgtgcccctctgtttaaaaataaactgaatatggatgtttaaaaaaaaaaaaaaaaaa

SEQ ID NO: 2223 - protein, 513 aa, Homo sapiens
MASGSVAECLQQETTCPVCLQYFAEPMMLDCGHNICCACLARCWGTAETNVSCPQCRETFPQRHMRPNRHLANVTQLVKQLRTERPSGPGGEMGVCEKHREPLKLYCEEDQMPICVVCDRSREHRGHSVLPLEEAVEGFKEQIQNQLDHLKRVKDLKKRRRAQGEQARAELLSLTQMEREKIVWEFEQLYHSLKEHEYRLLARLEELDLAIYNSINGAITQFSCNISHLSSLIAQLEEKQQQPTRELLQDIGDTLSRAERIRIPEPWITPPDLQEKIHIFAQKCLFLTESLKQFTEKMQSDMEKIQELREAQLYSVDVTLDPDTAYPSLILSDNLRQVRYSYLQQDLPDNPERFNLFPCVLGSPCFIAGRHYWEVEVGDKAKWTIGVCEDSVCRKGGVTSAPQNGFWAVSLWYGKEYWALTSPMTALPLRTPLQRVGIFLDYDAGEVSFYNVTERCHTFTFSHATFCGPVRPYFSLSYSGGKSAAPLIICPMSGIDGFSGHVGNHGHSMETSP

SEQ ID NO: 2224 - DNA, 2704 bp, Homo sapiens
gttttacgctgccgccggcatccgctcggacgcggccacgttgtcttgcgcgctttgcccgcctggccctgggactctgaccctcggctaccctttcctgccccactagcgtggccgcgagcctcggtgagccggccgtattcccgctctcgcttagggggcacaggcgcaggcatcggcccggccactccaagccttcggtgcgcgggcgcgtctgggatacgggcccgggaggcgccgccctccgtccgcccggtgcctctcaggaacagcgaaccggagagagcgccggagagttgggctcagtgcggagctcggcgccggggcccatgcccgtgcgcccccgcaggccggcgccatggcctccgggagtgtggccgagtgcctgcagcaggagaccacctgccccgtgtgcctgcagtacttcgcagagcccatgatgctcgactgcggccataacatctgttgcgcgtgcctcgcccgctgctggggcacggcagagactaacgtgtcgtgcccgcagtgccgggagaccttcccgcagaggcacatgcggcccaaccggcacctggccaacgtgacccaactggtaaagcagctgcgcaccgagcggccgtcggggcccggcggcgagatgggcgtgtgcgagaagcaccgcgagcccctgaagctgtactgcgaggaggaccagatgcccatctgcgtggtgtgcgaccgctcccgcgagcaccgcggccacagcgtgctgccgctcgaggaggcggtggagggcttcaaggagcaaatccagaaccagctcgaccatttaaaaagagtgaaagatttaaagaagagacgtcgggcccagggggaacaggcacgagctgaactcttgagcctaacccagatggagagggagaagattgtttgggagtttgagcagctgtatcactccttaaaggagcatgagtatcgcctcctggcccgccttgaggagctagacttggccatctacaatagcatcaatggtgccatcacccagttctcttgcaacatctcccacctcagcagcctgatcgctcagctagaagagaagcagcagcagcccaccagggagctcctgcaggacattggggacacattgagcagggctgaaagaatcaggattcctgaaccttggatcacacctccagatttgcaagagaaaatccacatttttgcccaaaaatgtctattcttgacggagagtctaaagcagttcacagaaaaaatgcagtcagatatggagaaaatccaagaattaagagaggctcagttatactcagtggacgtgactctggacccagacacggcctaccccagcctgatcctctctgataatctgcggcaagtgcggtacagttacctccaacaggacctgcctgacaaccccgagaggtctccttctacaacgtgacagagaggtgtcacaccttcactttctctcatgctaccttttgtgggcctgtccggccctacttcagtctgagttactcgggagggaaaagtgcagctcctctgatcatctgccccatgagtgggatagatgggttttctggccatgttgggaatcatggtcattccatggagacctccccttgaggaggtgaattcaggccaaaagggctgttggctgtaatcctacgccaggcacaaggcatcttgttgccttgccacgtcctgtcacagctgggtatccttaccatgttccacgcccttgcagtgggagacaggatgtccatgttctctaccatccttttccttcccatgcagattgtgaaatgtaatgagatgtatcaagacatcctagaaataaaaaccagatgtccacctccagtgtttcatactttctggttttacacatcgctggagggataaagagtatggataatctttggatttggagagccgttcaagatacttccagcttcttggctcagcctggcttcctctggttcagccccacataatgattatggctatttgctgtcatttctgggctagggctcctttctaacaacctagactggaataaggccctgtcagcatggctccctttatcccagttttccgtctgggaacagtacctctgcccctgattcccaatgtgccatagttttattaactccattaaagaagcctgtatgtgttttggttagttacagttattttacaataatggtgggtaatggccccacctctgttatgagataatgttctaatcaatgtctctgcctttgtatcttttctgagggctttgtctgttctcttcattctaatgaaaggtgtattctagtgctgggtgcatatcatccaggataatattctgcccaactccatcctctgttactagatcccttaccagtcacatttgtggactggtggccagtcgtataccatccctggaaggattctgggacaatattccagggattcattgacttcttggctccttttctccatttcctttgggggaagggggaattgaccatgcttaagtgcatcctatcaaggggcagctccgtccccatggccattggatcatgagacactcgaagtcagaaggctggggcagatcacttcaagcaagcccccatgatggttctcagtcctgcttctctgtgggtacgtgcccctctgtttaaaaataaactgaatatggatgtttaaaaaaaaaaaaaaaaaa

SEQ ID NO: 2225 - protein, 358 aa, Homo sapiens
MASGSVAECLQQETTCPVCLQYFAEPMMLDCGHNICCACLARCWGTAETNVSCPQCRETFPQRHMRPNRHLANVTQLVKQLRTERPSGPGGEMGVCEKHREPLKLYCEEDQMPICVVCDRSREHRGHSVLPLEEAVEGFKEQIQNQLDHLKRVKDLKKRRRAQGEQARAELLSLTQMEREKIVWEFEQLYHSLKEHEYRLLARLEELDLAIYNSINGAITQFSCNISHLSSLIAQLEEKQQQPTRELLQDIGDTLSRAERIRIPEPWITPPDLQEKIHIFAQKCLFLTESLKQFTEKMQSDMEKIQELREAQLYSVDVTLDPDTAYPSLILSDNLRQVRYSYLQQDLPDNPERSPSTT

SEQ ID NO: 2226 - DNA, 584 bp, Homo sapiens
  misc_feature (262)..(262): n is a, c, g, or t
  misc_feature (574)..(574): n is a, c, g, or t
atcaaagtttttttgtgtcaatgccaaagcaacgaagaattcccctttttccttcactattgacagcttcagtttctgtacttactgtgtcatcctatccattcccttccctgagcctggactgctcttccaagggagactaggagtgaagggaggagtcctcccaaagttaccctttaagcttgataattagctccatagccatgctaaagcatgactgtagatccccaagtccctgacacattttcttctaagaaaactnttagccaagtaaagacgtaagccctgaagatggcaaaaggtgtcataatctcccaaagtcatctgtatagatgcttcatttaaccctttttcttttgcagacaaagggttaaaaatctcttctttctacctatatctttaaagagggattgacaagcccaaatttccttttatgaaaagacccaaggtttctggccaacaattcacttttttcagtctcttaggtcctcttgcatgcctgagaatattgagtattcggaatctcctaccagcctttggtaaatgaccctaccaggtggaatagtttgagctntatctgctct

SEQ ID NO: 2227 - DNA, 1585 bp, Homo sapiens
acagcagttacactgcggcgggcgtctgttctagtgtttgagccgtcgtgcttcaccggtctacctcgctagcatgtcgggccgcggcaagactggcggcaaggcccgcgccaaggccaagtcgcgctcgtcgcgcgccggcctccagttcccagtgggccgtgtacaccggctgctgcggaagggccactacgccgagcgcgttggcgccggcgcgccagtgtacctggcggcagtgctggagtacctcaccgctgagatcctggagctggcgggcaatgcggcccgcgacaacaagaagacgcgaatcatcccccgccacctgcagctggccatccgcaacgacgaggagctcaacaagctgctgggcggcgtgacgatcgcccagggaggcgtcctgcccaacatccaggccgtgctgctgcccaagaagaccagcgccaccgtggggccgaaggcgccctcgggcggcaagaaggccacccaggcctcccaggagtactaagagggcccgcgccgcggccggccgccccagctccccatgccaccacaaaggcccttttaagggccaccaccgccctcatggaaagagctgagccgcttcagactgcggggcaagcgggccgcggctcccttcccctcccctcccctcgcccgccttcgccgcccggcctcgagtccccgcccgcccccgctcccgtcccgcaccgcctgccgcgtcggcctcgggcctgccctgtccgccgtccgccctccggtagggttcgggccttccggatgcggcttgggcgctcttcggggacctccgtggcgcggaagacccgagcctgccggggggaggccggcggcgccgcacctgcccgcctcggcgttcgtgactcagccgccccatcccgagtcgctaaggggctgcggggaggccgcagcaccttctggaagacttggccttccgctctgacgcagggccgaggtgggcagtccaggccgagagccggcggccctgaaggtgagtgaggccctcggcagctgcagccggggtgtctggtacccccccggcgtggtgcttagcccaggactttcagacggccgctggccgggaggctttggtgggagagacgcgatcgccgatttcggtctggcgccccttctgcggccgggacccaggcctttcacatcagctctccctccatcttcattcataggtctgcgctggggccgggacgaagcacttggtaacaggcacatcttcctcccgagtgactgcctcctaggaggacatttaggggagggcagaggcctgcagtttggcttcacggctggctatgtggacagcaagagtcgttttgcggaacgcgactggcagccaggcctgtcgggcccccgacgccgccccatttcccttccagcaaactcaactcggcaatccaagcacctagataccagcacaagtcggttaatccctgtctggactgagcctccgttggcttctgaactggaattctgcagctaacccttccacgactagaaccttaggcattggggagttttagatggactaattttattaaaggattgtttttttttt

SEQ ID NO: 2228 - protein, 143 aa, Homo sapiens
MSGRGKTGGKARAKAKSRSSRAGLQFPVGRVHRLLRKGHYAERVGAGAPVYLAAVLEYLTAEILELAGNAARDNKKTRIIPRHLQLAIRNDEELNKLLGGVTIAQGGVLPNIQAVLLPKKTSATVGPKAPSGGKKATQASQEY

SEQ ID NO: 2229 - DNA, 1324 bp, Homo sapiens
cggcacgagcgccgccgaggattcagcagcctcccccttgagccccctcgcttcccgacgttccgttcccccctgcccgccttctcccgccaccgccgccgccgccttccgcaggccgtttccaccgaggaaaaggaatcgtatcgtatgtccgctatccagaacctccactctttcgacccctttgctgatgcaagtaagggtgatgacctgcttcctgctggcactgaggattatatccatataagaattcaacagagaaacggcaggaagacccttactactgtccaagggatcgctgatgattacgataaaaagaaactagtgaaggcgtttaagaaaaagtttgcctgcaatggtactgtaattgagcatccggaatatggagaagtaattcagctacagggtgaccaacgcaagaacatatgccagttcctcgtagagattggactggctaaggacgatcagctgaaggttcatgggttttaagtgcttgtggctcactgaagcttaagtgaggatttccttgcaatgagtagaatttcccttctctcccttgtcacaggtttaaaaacctcacagcttgtataatgtaaccatttggggtccgcttttaacttggactagtgtaactccttcatgcaataaactgaaaagagccatgctgtctagtcttgaagtccctcatttaaacagaggtcaagcaataggcgcctggcagtgtcaagcctgaaaccaagcaataccgtcatgtttcagccaagcccagagccctaagattacaaacaactatggccggaacctcctcagctctccctctgcagagttccctaccctaagagaatgttaccacctgaacagtcctcggtgaatctgagaggagaggatggggtaaggcagaagcaccagctgtactactagaagggagcttttggtggtagatcccctggtgtctccaacctgactaggtggacagagctcaaagaggccctcttaccgctagcgaggtgataggacatctggcttgccacaaaggtctgttcgaccagacatatcctagctaagggatgtccaaacatcagaatgtgaggccaaccttctatcagagttaaacttttgacaagggaacaaatctcaaactgatccatcagtcatgtagctagctgtagagcttgcaacttaatagcagcagctgcccaatgccatgtgaagtaacaaactggtttttggtttttttttccccttcagttttaatgttatgtgtaatgtatttaaacccttatttaaataaaacttgttttcagaaaaaaaaaaaaaaaaaaaa

SEQ ID NO: 2230 - protein, 113 aa, Homo sapiens
MSAIQNLHSFDPFADASKGDDLLPAGTEDYIHIRIQQRNGRKTLTTVQGIADDYDKKKLVKAFKKKFACNGTVIEHPEYGEVIQLQGDQRKNICQFLVEIGLAKDDQLKVHGF

SEQ ID NO: 2231 - DNA, 472 bp, Homo sapiens
  misc_feature (302)..(302): n is a, c, g, or t
  misc_feature (389)..(389): n is a, c, g, or t
  misc_feature (419)..(419): n is a, c, g, or t
  misc_feature (441)..(441): n is a, c, g, or t
  misc_feature (466)..(466): n is a, c, g, or t
ttttttttcttattaacctctttcatcccatttcagcagctgttcctattgttggtcagaagtctctaacctccaagccagattgaaagtcctccccttcctatctcattatagtcattctccacatactctttgagcatgaatagttcaggatgcctttttcccaattcagttttaaaatagtaattccgtttggagatggaacagacattgaggcttgtaattgtttacctgagatcttagtacccttccttcctctccccgtttccctactatagttgatccagcatccagatgtgggntaactgattccaatttctgaagctgtgacaattctctgcatacctggggagctctttaatgaggggagtctataaaagctgtggggngagaactaggcttcctcaggctgttaaaanctggtacctttttttatggggntctctgggggttatttctttttttnccactt

SEQ ID NO: 2232 - DNA, 1637 bp, Homo sapiens
gaggcgaaccggagcgcggggccgcggtcgccccgaccagagccgggagaccgcagcacccgcagccgcccgcgagcgcgccgaagacagcgcgcaggcgagagcgcgcgggcgggggcgcgcaggccctgcccgccccttccgtccccacccccctccgccctttcctctccccaccttcctctcgcctcccgcgcccccgcaccgggcgcccaccctgtcctcctcctgcgggagcgttgtccgtgttggcggccgcagcgggccgggccggtccggcgggccgggggatggcgctgctggacctggccttggagggaatggccgtcttcgggttcgtcctcttcttggtgctgtggctgatgcatttcatggctatcatctacacccgattacacctcaacaagaaggcaactgacaaacagccttatagcaagctcccaggtgtctctcttctgaaaccactgaaaggggtagatcctaacttaatcaacaacctggaaacattctttgaattggattatcccaaatatgaagtgctcctttgtgtacaagatcatgatgatccagccattgatgtatgtaagaagcttcttggaaaatatccaaatgttgatgctagattgtttataggtggtaaaaaagttggcattaatcctaaaattaataatttaatgccaggatatgaagttgcaaagtatgatcttatatggatttgtgatagtggaataagagtaattccagatacgcttactgacatggtgaatcaaatgacagaaaaagtaggcttggttcacgggctgccttacgtagcagacagacagggctttgctgccaccttagagcaggtatattttggaacttcacatccaagatactatatctctgccaatgtaactggtttcaaatgtgtgacaggaatgtcttgtttaatgagaaaagatgtgttggatcaagcaggaggacttatagcttttgctcagtacattgccgaagattactttatggccaaagcgatagctgaccgaggttggaggtttgcaatgtccactcaagttgcaatgcaaaactctggctcatattcaatttctcagtttcaatccagaatgatcaggtggaccaaactacgaattaacatgcttcctgctacaataatttgtgagccaatttcagaatgctttgttgccagtttaattattggatgggcagcccaccatgtgttcagatgggatattatggtatttttcatgtgtcattgcctggcatggtttatatttgactacattcaactcaggggtgtccagggtggcacactgtgtttttcaaaacttgattatgcagtcgcctggttcatccgcgaatccatgacaatatacatttttttgtctgcattatgggacccaactataagctggagaactggtcgctacagattacgctgtgggggtacagcagaggaaatcctagatgtataactacagctttgtgactgtatataaaggaaaaaagagaagtattataaattatgtttatataaatgcttttaaaaatctaccttctgtagttttatcacatgtatgttttggtatctgttctttaatttatttttgcatggcacttgcatctgtgaaaaaaaa

SEQ ID NO: 2233 - protein, 394 aa, Homo sapiens
MALLDLALEGMAVFGFVLFLVLWLMHFMAIIYTRLHLNKKATDKQPYSKLPGVSLLKPLKGVDPNLINNLETFFELDYPKYEVLLCVQDHDDPAIDVCKKLLGKYPNVDARLFIGGKKVGINPKINNLMPGYEVAKYDLIWICDSGIRVIPDTLTDMVNQMTEKVGLVHGLPYVADRQGFAATLEQVYFGTSHPRYYISANVTGFKCVTGMSCLMRKDVLDQAGGLIAFAQYIAEDYFMAKAIADRGWRFAMSTQVAMQNSGSYSISQFQSRMIRWTKLRINMLPATIICEPISECFVASLIIGWAAHHVFRWDIMVFFMCHCLAWFIFDYIQLRGVQGGTLCFSKLDYAVAWFIRESMTIYIFLSALWDPTISWRTGRYRLRCGGTAEEILDV

SEQ ID NO: 2234 - DNA, 3624 bp, Homo sapiens
gcaggttgggagggaaagtcgggggaggacgcggaagaggagctgtgggaagggggaggagggagggaggaaaagaggaggagacggaggagaactgagcagagcagagcatcgagccaaaggggagatgagtttgtctgtcctctgctgaggctacggccgggcctagggaactgggagcttgggtggaagcgacacccgtggaagtgggaggaggtggcgccgggactttaaccccttgtgggctctgcggcaggggatttaaccctttgtggatctggcccctcggaggcagcgtcatcggtagttttaaccccttcggggctgggtttcacgcactggacttaccctcatcaccttgctcaccaactcctttattggggtgctccgcttggaggtttgaggcccacctccgcccattacgtactgttcctgccgctgcacccccttggacccgctagctggccgcactgtgggcgcttaaccctttactgacttgagctccccagattgcagttggagtttgctgatagaaggactagctaaaggcgtcactgcaggaattacaaactgaagaggactctgttggactgttttttttttctttttcttttttttaagaaaaacccatttttttccttaaggacttactagccaaaatttcttaaacttcgaggactctactagccatggccgagccattcttgtcagaatatcaacaccagcctcaaactagcaactgtacaggtgctgctgctgtccaggaagagctgaaccctgagcgccccccaggcgcggaggagcgggtgcccgaggaggacagtaggtggcaatcgagagcgttcccccagttgggtggccgtccggggccggagggggaagggagcctggaatcccaaccacctcccttgcagacccaggcctgtccagaatctagctgcctgagagagggcgagaagggccagaatggggacgactcgtccgctggcggcgacttcccgccgccggcagaagtggaaccgacgcccgaggccgagctgctcgcccagccttgtcatgactccgaggccagtaagttgggggctcctgccgcagggggcgaagaggagtggggacagcagcagagacagctggggaagaaaaaacataggagacgcccgtccaagaagaagcggcattggaaaccgtactacaagctgacctgggaagagaagaaaaagttcgacgagaaacagagccttcgagcttcaaggatccgagccgagatgttcgccaagggccagccggtcgcgccctataacaccacgcagttcctcatggatgatcacgaccaggaggagccggatctcaaaaccggcctgtactccaagcgggccgccgccaaatccgacgacaccagcgatgacgacttcatggaagaagggggtgaggaggatgggggcagcgatgggatgggaggggacggcagcgagtttctgcagcgggacttctcggagacgtacgagcggtaccacacggagagcctgcagaacatgagcaagcaggagctcatcaaggagtacctggaactggagaagtgcctctcgcgcatggaggacgagaacaaccggctgcggctggagagcaagcggctgggtggcgacgacgcgcgtgtgcgggagctggagctggagctggaccggctgcgcgccgagaacctccagctgctgaccgagaacgaactgcaccggcagcaggagcgagcgccgctttccaagtttggagactagactgaaacttttttgggggagggggcaaaggggactttttacagtgatggaatgtaacattatatacatgtgtatataagacagtggacctttttatgacacataatcagaagagaaatccccctggctttggttggtttcgtaaatttagctatatgtagcttgcgtgctttctcctgttcttttaattatgtgaaactgaagagttgcttttcttgttttcctttttagaagtttttttccttaatgtgaaagtaatttgaccaagttataatgcatttttgtttttaacaaatcccctccttaaacggagctataaggtggccaaatctgagaacaattaaattcattttagttataataaatttaatatttgtaaatgtaacatagtttcagtgtgatttctagagctaattcaaaatagtattgatatattttatgtgactgcatttttggggaggggtaccgaaatcgttaaatttgtcagtttgcaaaaatatcaatctttaatgggagaattttcaatttgccaattttttccttgaatgggtttaagtatgctacaatatacagttcaggcaaaatttaagatgtaattatcttcaatacttaagtgtgcttgctttctagtgccttggttttctttcttgatgctggaaaaataaacaaaccggtattgagtgtttaggcgagtggaaagtggctacaatccaaaattttaaatttaactctgcctcggccattcaaaagtctaataacaaaaaatgtaaacctaatttggcagtttgttaggttagacaactgacagcctcatttcattcctacaagttggttttcagtaatctcttccttccccccagtaaggctggaagaggctcttggcaaacttcttagcgcaagcaatggttagattaatttgtgaggcagctctttaagacgttcagaggtaagaaatactggatttataaagcaaatggctgtttgggggattccaaggatttacctaattgtccaattctacgtgctctctataccaaaacaaaaaaaaagctatccacctttccatgtgggtcaaactaaaattagaaatgtcccctcactgcagatcaaatgtaaagcttccagttaaggagctaaatgaggtcctcagctgaatgaggaaccctgtacatccccttgcacagccctattctaaatcgcttaaactatgctgatagctgcttaggttcttgagtagttctgctcttaaacgtagggaggccctgagaactaaattttgccccaaaataaaaacagaaattatgagattgcctcctgtcattttggttaacccagtccttcacctgccctgtgtcagtgtcttctgagggcaattgcgttgctcaaatcactagcacagaggttccttaatttggggccttagaaaccattgtgggccttggggtccatgaaccccatgaaattatttgtagacttgtatgtacatttttctggggagaaggttcaagagattcataagattgtcaaactccttgaaggttcagaacctctgcagggaagggggaagaaaaccctcccattaggaagcatgcttttgcagttaaatggcgatggtggaggtgatagggacttcaagagtaaaatgcaccttgtattgcataagaagcatacacaaatcaataaatcaagggagattataccagtaggactgaatcagggccttcaaagctggactgagttggtcctgttctggcacatatggtccactggagacaatgtatgattgagcttttctttggtctaaaaattatattaaacatttattttgaaaaaaaaaaaaaaaaaaaaaaaaaaa

SEQ ID NO: 2235 - protein, 359 aa, Homo sapiens
MAEPFLSEYQHQPQTSNCTGAAAVQEELNPERPPGAEERVPEEDSRWQSRAFPQLGGRPGPEGEGSLESQPPPLQTQACPESSCLREGEKGQNGDDSSAGGDFPPPAEVEPTPEAELLAQPCHDSEASKLGAPAAGGEEEWGQQQRQLGKKKHRRRPSKKKRHWKPYYKLTWEEKKKFDEKQSLRASRIRAEMFAKGQPVAPYNTTQFLMDDHDQEEPDLKTGLYSKRAAAKSDDTSDDDFMEEGGEEDGGSDGMGGDGSEFLQRDFSETYERYHTESLQNMSKQELIKEYLELEKCLSRMEDENNRLRLESKRLGGDDARVRELELELDRLRAENLQLLTENELHRQQERAPLSKFGD

SEQ ID NO: 2236 - DNA, 2786 bp, Homo sapiens
gaattcaggtaaaatattctgcctgaccagggctacatgataagccacgtacttgatcactttgtagggtcgcagcacccttcttactactattttaggtaattcaggtttctgacggggaagccagtggagctgagcgggctgcaagaggggtgggttctggatgagaagttgggacgcgtgacgagggagtagagagtgaaccttggcttaaaaggaaggaaaataactgtgaagaaaagatgacccaacttgaaataaaacctgaagaccttatctcccacttgagagagagaagaagctgaaagccatcagcttgcactctgggctcacagacagagagggtgaggggttgagcccagatctatgacttcagacccctgtctcggcccctaggcctgatcattcattcaaactctcaataaacacggattaccagaccctgcgcagggaacacatctgggaaaacagctgcaacctcggataccagcacgggacaagctatctcagggcaatgaggaacaactaaagagaatcccaggaaccaggtaaccaatcgccagaagccctccgccctcatggtccattgggtcaaggccccactgccgcctcgtatcgccagcctccagtcctgcctccacgacgcgcccttccccaaggctggccgggtctggatgtcgccatcccctattcggagctacagacctcgcagctgaactcttaaaaagaacctcgcttcttcctcacggtgctccagctccacacaccgtactgagcctcgccagccaccgtacgcgaggtcgcggcgcgtccgtgacgtcactgatgtgcgcttctcccgcactaagggaaacatggctctagcgcggccggtgcggctcttttccctcgtgactcggttgctcctggcgccgcgacggggcctcacggtccgcagtcccgacgaacccctgccggtggtgcgcatcccagtggctctacagcggcagttggaacagcggcagagcaggcggcggaacctcccgaggccggtgctggttcgacccggaccgctgctggtttcggcgcggcggccggagttgaaccagccggcgcgcctcacactgggccgttgggagcgcgcgccgctagcctctcaaggctggaagagtcgacgcgcgcgtcgggaccacttctccatcgagcgcgcgcaacaggaggcgccagcggtgcgaaagctctcgtctaagggcagctttgctgacctgggcctggagccccgtgtgctgcacgcactacaggaggctgcgcctgaagtcgttcagcccacaaccgtgcagtctagcaccatcccctcactacttcgcggccgccatgtcgtttgcgccgcagaaaccggcagtggcaagactctcagctacctcctgccgctgcttcaacggctcttgggccagccaagcctggactcccttcctatccccgcgccccgaggcctggtccttgttccttcccgagaattggcccaacaggtgcgggctgtggcccaacccttgggccgctccttgggcctgctggtgcgggacctggagggaggccacggcatgcgtaggatcaggctgcagctgtccagacagccttcagcagatgtgcttgtggccactccaggggctctgtggaaggccctgaaaagtcgactgatcagtctggagcaactctccttcttggtgttggatgaggcagacacactgctggatgaaagcttcctggaactggtggactacatcttagagaagagccacatagcagaaggcccagctgacttggaagaccccttcaatcccaaagctcagttagtgctggtaggagccacatttcccgaaggtgtaggccagttgctgaataaagtcgccagcccagatgctgtcaccaccatcaccagctccaagctccactgtatcatgcctcatgtgaaacagacatttctgagactgaagggagcagataaggtggccgagctggtgcacatcctcaagcatcgtgacagagcagaaaggactggtccctcaggaactgttctggtgttctgtaatagctccagcactgtgaactggctgggatatattctggatgaccacaaaatccaacacctaaggttgcaggggcaaatgccagccttgatgagggtaggaatcttccagtccttccagaagagctcccgagacatacttctctgcacagacatagcctctcggggcctggacagcactggtgtggagctggttgtcaattatgatttccccccaacgctgcaagattacatccacagagcagggagagtgggccgtgtggggagcgaggtgccaggcaccgtcatcagttttgtgacccatccctgggatgtgagcctggttcagaagattgagctggcggctcgccgaaggagaagtcttccaggactagcatcctcggtgaaagagcctttgccccaagcaacctgattttgacaaatctgattaaaatgtgatgctagaacagggatctttcccagtatcttgagtgggtgaccacacttgtcagtgggaggctctgggctgccctgtcggctccttgagggcgggatgaactgctttgtgacttggaaaggtacgctgctggccagcattggagaagaagctgctgagcatggctttctgtagtctttagcaagacacaagtggattttgactttgtatcatgtcatgatttctaacaataaatgatgtttttatgtgcctcccctaagaataattagcaccggggcggaattc

SEQ ID NO: 2237 - protein, 540 aa, Homo sapiens
MALARPVRLFSLVTRLLLAPRRGLTVRSPDEPLPVVRIPVALQRQLEQRQSRRRNLPRPVLVRPGPLLVSARRPELNQPARLTLGRWERAPLASQGWKSRRARRDHFSIERAQQEAPAVRKLSSKGSFADLGLEPRVLHALQEAAPEVVQPTTVQSSTIPSLLRGRHVVCAAETGSGKTLSYLLPLLQRLLGQPSLDSLPIPAPRGLVLVPSRELAQQVRAVAQPLGRSLGLLVRDLEGGHGMRRIRLQLSRQPSADVLVATPGALWKALKSRLISLEQLSFLVLDEADTLLDESFLELVDYILEKSHIAEGPADLEDPFNPKAQLVLVGATFPEGVGQLLNKVASPDAVTTITSSKLHCIMPHVKQTFLRLKGADKVAELVHILKHRDRAERTGPSGTVLVFCNSSSTVNWLGYILDDHKIQHLRLQGQMPALMRVGIFQSFQKSSRDILLCTDIASRGLDSTGVELVVNYDFPPTLQDYIHRAGRVGRVGSEVPGTVISFVTHPWDVSLVQKIELAARRRRSLPGLASSVKEPLPQAT

SEQ ID NO: 2238 - DNA, 2323 bp, Homo sapiens
cccgcctcctggtaggagggggtttccgcttccggcagcagcggctgcagcctcgctctggtccctgcggctggcggccgagccgtgtgtctcctcctccatcgccgccatattgtctgtgtgagcagaggggagagcggccgccgccgctgccgcttccaccacagtttgaagaaaacaggtctgaaacaaggtcttacccccagctgcttctgaacacagtgactgccagatctccaaacatcaagtccagctttgtccgccaacctgtctgacatgtcgggacccgtgccaagcagggccagagtttacacagatgttaatacacacagacctcgagaatactgggattacgagtcacatgtggtggaatggggaaatcaagatgactaccagctggttcgaaaattaggccgaggtaaatacagtgaagtatttgaagccatcaacatcacaaataatgaaaaagttgttgttaaaattctcaagccagtaaaaaagaagaaaattaagcgtgaaataaagattttggagaatttgagaggaggtcccaacatcatcacactggcagacattgtaaaagaccctgtgtcacgaacccccgccttggtttttgaacacgtaaacaacacagacttcaagcaattgtaccagacgttaacagactatgatattcgattttacatgtatgagattctgaaggccctggattattgtcacagcatgggaattatgcacagagatgtcaagccccataatgtcatgattgatcatgagcacagaaagctacgactaatagactggggtttggctgagttttatcatcctggccaagaatataatgtccgagttgcttcccgatacttcaaaggtcctgagctacttgtagactatcagatgtacgattatagtttggatatgtggagtttgggttgtatgctggcaagtatgatctttcggaaggagccatttttccatggacatgacaattatgatcagttggtgaggatagccaaggttctggggacagaagatttatatgactatattgacaaatacaacattgaattagatccacgtttcaatgatatcttgggcagacactctcgaaagcgatgggaacgctttgtccacagtgaaaatcagcaccttgtcagccctgaggccttggatttcctggacaaactgctgcgatatgaccaccagtcacggcttactgcaagagaggcaatggagcacccctatttctacactgttgtgaaggaccaggctcgaatgggttcatctagcatgccagggggcagtacgcccgtcagcagcgccaatatgatgtcagggatttcttcagtgccaaccccttcaccccttggacctctggcaggctcaccagtgattgctgctgccaacccccttgggatgcctgttccagctgccgctggcgctcagcagtaacggccctatctgtctcctgatgcctgagcagaggtgggggagtccaccctctccttgatgcagcttgcgcctggcggggaggggtgaaacacttcagaagcaccgtgtctgaaccgttgcttgtggatttatagtagttcagtcataaaaaaaaaattataataggctgattttcttttttctttttttttttaactcgaacttttcataactcaggggattccctgaaaaattacctgcaggtggaatatttcatggacaaatttttttttctcccctcccaaatttagttcctcatcacaaaagaacaaagataaaccagcctcaatcccggctgctgcatttaggtggagacttcttcccattcccaccattgttcctccaccgtcccacactttagggggttggtatctcgtgctcttctccagagattacaaaaatgtagcttctcaggggaggcaggaagaaaggaaggaaggaaagaaggaagggaggacccaatctataggagcagtggactgcttgctggtcgcttacatcactttactccataagcgcttcagtggggttatcctagtggctcttgtggaagtgtgtcttagttacatcaagatgttgaaaatctacccaaaatgcagacagatactaaaaacttctgttcagtaagaatcatgtcttactgatctaaccctaaatccaactcatttatacttttatttttagttcagtttaaaatgttgataccttccctcccaggctccttaccttggtcttttccctgttcatctcccaacatgctgtgctccatagctggtaggagagggaaggcaaaatctttcttagttttctttgtcttggccattttgaattc

SEQ ID NO: 2239 - protein, 391 aa, Homo sapiens
MSGPVPSRARVYTDVNTHRPREYWDYESHVVEWGNQDDYQLVRKLGRGKYSEVFEAINITNNEKVVVKILKPVKKKKIKREIKILENLRGGPNIITLADIVKDPVSRTPALVFEHVNNTDFKQLYQTLTDYDIRFYMYEILKALDYCHSMGIMHRDVKPHNVMIDHEHRKLRLIDWGLAEFYHPGQEYNVRVASRYFKGPELLVDYQMYDYSLDMWSLGCMLASMIFRKEPFFHGHDNYDQLVRIAKVLGTEDLYDYIDKYNIELDPRFNDILGRHSRKRWERFVHSENQHLVSPEALDFLDKLLRYDHQSRLTAREAMEHPYFYTVVKDQARMGSSSMPGGSTPVSSANMMSGISSVPTPSPLGPLAGSPVIAAANPLGMPVPAAAGAQQ

SEQ ID NO: 2240 - DNA, 1493 bp, Homo sapiens
cggccgccggcccagtgaggctgggttcgaggagctggagcgggaaactggagcttaaattctggcggcgagatggacattctgaaatcagagatccttcggaagcggcagctggtggaggacaggaacctgctggtggaaaataaaaaatatttcaagcgtagtgagctcgccaaaaaagaagaggaagcatattttgaaagatgtggctacaagatacagccaaaagaggaggaccagaaaccattaacttcatcgaatccagtgttagaacttgaactggcagaggaaaaattacctatgacgctttctaggcaagaggtcatcagaagattgagagaaagaggagaaccaatcagactatttggagagactgattatgatgcttttcaacgtttaaggaaaatagagatcctcacaccagaagttaacaagggattgaggaatgatttgaaagcagccttggataagattgatcagcagtacctcaatgaaatcgtcggcggtcaggagcctggagaggaagacacacagaatgatctgaaagttcatgaggaaaacaccacaattgaagagttagaggcgcttggagagtccttagggaaaggcgatgatcataaagacatggacatcatcaccaaattcctgaagtttcttcttggcgtttgggctaaagaattgaatgccagagaagattatgtgaaacgcagtgtgcagggtaaactgaacagtgcgacccagaaacagaccgagtcctacctaagaccactttttagaaagctacggaaaaggaatcttcctgctgatattaaagaatcaataacggatattattaaattcatgttgcagagagaatacgtgaaggcaaatgatgcttatcttcagatggccattggaaatgcgccttggcccatcggtgtcactatggttggtatccatgccagaactggcagagaaaagattttttccaagcatgttgcacatgttttaaatgacgaaactcagcggaaatatattcagggattgaagaggttaatgaccatttgccagaaacactttcctacagacccatccaaatgtgtggagtacaatgcactgtgagatctgtgtatggtgtgttaataacaataagaaacttagggaagcaggctgtggacttctggaattaccaacaggaatgaggaaagaagaaaactggagtttccagtctctgagttctacctgatgtaactcttgattggttttaagaactttgttggccttcatttcatatctgactgcaagctgatttttctttcttgctttcattttaattagtccaaaattaagttttaaagatttttcctcacaatttaaatccatagacaacagaagggggtttaaaatgacctttttttcagttgacccgaaagttgtggttagatgattaaaaagaaacatttgaggatggacttaattatttcagtaaaatattataatttgcaaaaaaaaaa

SEQ ID NO: 2241 - protein, 342 aa, Homo sapiens
MDILKSEILRKRQLVEDRNLLVENKKYFKRSELAKKEEEAYFERCGYKIQPKEEDQKPLTSSNPVLELELAEEKLPMTLSRQEVIRRLRERGEPIRLFGETDYDAFQRLRKIEILTPEVNKGLRNDLKAALDKIDQQYLNEIVGGQEPGEEDTQNDLKVHEENTTIEELEALGESLGKGDDHKDMDIITKFLKFLLGVWAKELNAREDYVKRSVQGKLNSATQKQTESYLRPLFRKLRKRNLPADIKESITDIIKFMLQREYVKANDAYLQMAIGNAPWPIGVTMVGIHARTGREKIFSKHVAHVLNDETQRKYIQGLKRLMTICQKHFPTDPSKCVEYNAL

SEQ ID NO: 2242 - DNA, 1478 bp, Homo sapiens
cagattttgcaagagccaggctcgcccaccttgtagaaggagcgccttgagtcccctctcaccctcggttgcaaagagccgaccgcttgatctggacaccccctcgcccagattgcatgatctcccgggaccctcttgagttgcacgtttctgcaccgaggacctcaaatccccgtcgctcctaggatttgcagcgttctggatactggagggttgcaggctacactcgcccgcccctgggcagacactcgtccaaaccactggagtgtgctggtgactggcaggccagcccttcgcctctccatgaacccgtgagcctgggggcaggtgccaggcgatggcgcggcctgtgagcgacaggaccccggcccctctgctgctgggcggcccggccgggacaccccctggcgggggagcgctgcttgggttgcggagccttctgcaggggaccagcaagcccaaagagccggccagctgtctcctgaaggaaaaggagcgcaaggcggccctgcctgcagccacaacccctgggccaggcctggagactgcgggcccggcggatgccccggctggggcagtggtgggcggagggtccccgcgggggcgcccggggccggtgcccgccccgggtctgttggcgccactgctgtgggagcgcacgctgccgttcggcgatgtggagtacgtagacctggacgccttcctgctggagcacgggctcccgcccagcccgccgccccccggtggcccgtcgccggagccgtcgcccgcgcggacgcccgcaccctccccagggccgggttcgtgcggctcggcttccccccgctcctctcctgggcacgcccccgcccgggctgccctcgggaccgccagcggccaccgcgcaggcctgacctctcgggacacacccagccctgtggacccagacaccgtggaggtgttgatgacctttgaacccgacccagctgatcttgccctatcaagcattcctggccacgagacctttgaccctcgaagacatcgcttctcagaagaggaacttaagccccagccaatcatgaagaaggcaagaaaaatccaggtgccggaggagcagaaggatgagaaatactggagccggcggtacaagaacaacgaggcagccaagcggtcccgtgacgcccggcggctcaaggagaaccagatatcggtgcgggcggccttcctggagaaggagaacgccctgctgcggcaggaagttgtggccgtgcgccaggagctgtcccactaccgcgccgtgctgtcccgataccaggcccagcacggggccctgtgaggctgccccacatccccacctggcggagctctcctccgccttgctgagacttacgccctgttcccttcctgccctgtggcccacgggccggccagctgggtgccccagggacgtgataatgcagataaatacatttatatttttaagaaaaaaaaaaaaaaaa

SEQ ID NO: 2243 - protein, 325 aa, Homo sapiens
MARPVSDRTPAPLLLGGPAGTPPGGGALLGLRSLLQGTSKPKEPASCLLKEKERKAALPAATTPGPGLETAGPADAPAGAVVGGGSPRGRPGPVPAPGLLAPLLWERTLPFGDVEYVDLDAFLLEHGLPPSPPPPGGPSPEPSPARTPAPSPGPGSCGSASPRSSPGHAPARAALGTASGHRAGLTSRDTPSPVDPDTVEVLMTFEPDPADLALSSIPGHETFDPRRHRFSEEELKPQPIMKKARKIQVPEEQKDEKYWSRRYKNNEAAKRSRDARRLKENQISVRAAFLEKENALLRQEVVAVRQELSHYRAVLSRYQAQHGAL

SEQ ID NO: 2244 - DNA, 3012 bp, Homo sapiens
cgactgactagccgggcgataacggcagagagcatagagcgcaggaacaagcgcaacgtccaagagggaagggccagcacgtcgggggcctctctggccctacccaggccgtgttctcgatagctttccggaagaaagggatctgggagcgagatgcgtgtagctagcacgatgcgtcgcgcggtgacgctctggcccgacgccgacggcctctcagtggctcccggaggacccggcgggcccagtgttggagagctgaaggtcaggccaggacagtgagacctgactccttgctcctaccagcctactatggcttaagacccagggccagggtcccgttgatgtaacagagcagaggaccagcagatgaatggacaccttgaagcagaggagcagcaggaccagaggccagaccaggagctgaccgggagctggggccacgggcctaggagcaccctggtcagggctaaggccatggccccgcccccaccgccactggctgccagcaccccgctcctccatggcgagtttggctcctacccagcccgaggcccacgctttgccctcacccttacatcgcaggccctgcacatacagcggctgcgccccaaacctgaagccaggccccggggtggcctggtcccgttggccgaggtctcaggctgctgcaccctgcgaagccgcagcccctcagactcagcggcctacttctgcatctacacctaccctcggggccggcgcggggcccggcgcagagccactcgcaccttccgggcagatggggccgccacctacgaagagaaccgtgccgaggcccagcgctgggccactgccctcacctgtctgctccgaggactgccactgcccggggatggggagatcacccctgacctgctacctcggccgccccggttgcttctattggtcaatccctttgggggtcggggcctggcctggcagtggtgtaagaaccacgtgcttcccatgatctctgaagctgggctgtccttcaacctcatccagacagaacgacagaaccacgcccgggagctggtccaggggctgagcctgagtgagtgggatggcatcgtcacggtctcgggagacgggctgctccatgaggtgctgaacgggctcctagatcgccctgactgggaggaagctgtgaagatgcctgtgggcatcctcccctgcggctcgggcaacgcgctggccggagcagtgaaccagcacgggggatttgagccagccctgggcctcgacctgttgctcaactgctcactgttgctgtgccggggtggtggccacccactggacctgctctccgtgacgctggcctcgggctcccgctgtttctccttcctgtctgtggcctggggcttcgtgtcagatgtggatatccagagcgagcgcttcagggccttgggcagtgcccgcttcacactgggcacggtgctgggcctcgccacactgcacacctaccgcggacgcctctcctacctccccgccactgtggaacctgcctcgcccacccctgcccatagcctgcctcgtgccaagtcggagctgaccctaaccccagacccagccccgcccatggcccactcacccctgcatcgttctgtgtctgacctgcctcttcccctgccccagcctgccctggcctctcctggctcgccagaacccctgcccatcctgtccctcaacggtgggggcccagagctggctggggactggggtggggctggggatgctccgctgtccccggacccactgctgtcttcacctcctggctctcccaaggcagctctacactcacccgtctccgaaggggcccccgtaattcccccatcctctgggctcccacttcccacccctgatgcccgggtaggggcctccacctgcggcccgcccgaccacctgctgcctccgctgggcaccccgctgcccccagactgggtgacgctggagggggactttgtgctcatgttggccatctcgcccagccacctaggcgctgacctggtggcagctccgcatgcgcgcttcgacgacggcctggtgcacctgtgctgggtgcgtagcggcatctcgcgggctgcgctgctgcgccttttcttggccatggagcgtggtagccacttcagcctgggctgtccgcagctgggctacgccgcggcccgtgccttccgcctagagccgctcacaccacgcggcgtgctcacagtggacggggagcaggtggagtatgggccgctacaggcacagatgcaccctggcatcggtacactgctcactgggcctcctggctgcccggggcgggagccctgaaactaaacaagcttggtacccgccgggggcggggcctacattccaatggggcggagcctgagctagggggtgtggcctggctgctagagttgtggtggcaggggccctggccccgtctcaggattgcgctcgctttcatgggaccagacgtgatgctggaaggtgggcgtcgtcacggttaaagagaaatgggctcgtcccgagggtagtgcctgatcaatgagggcggggcctggcgtctgatctggggccgcccttacggggcagggctcagtcctgacgcttgccacctgctcctacccggccaggatggctgagggcggagtctattttacgcgtcgcccaatgacaggacctggaatgtactggctggggtaggcctcagtgagtcggccggtcagggcccgcagcctcgccccatccactccggtgcctccatttagctggccaatcagcccaggaggggcaggttccccggggccggcgctaggatttgcactaatgttcctctccccgcgggtgggggcggggaaattcatatcccctgttcgtctcatgcgcgtcctccgtccccaatctaaaaagcaattgaaaaggtctatgcaataaaggcagtcgcttcattcctctcaaaaaaaaaaaaaaaaaaaaaaaaaaaaaaaaaaaaaaaaaaaaaaaaaa

SEQ ID NO: 2245 - protein, 654 aa, Homo sapiens
MNGHLEAEEQQDQRPDQELTGSWGHGPRSTLVRAKAMAPPPPPLAASTPLLHGEFGSYPARGPRFALTLTSQALHIQRLRPKPEARPRGGLVPLAEVSGCCTLRSRSPSDSAAYFCIYTYPRGRRGARRRATRTFRADGAATYEENRAEAQRWATALTCLLRGLPLPGDGEITPDLLPRPPRLLLLVNPFGGRGLAWQWCKNHVLPMISEAGLSFNLIQTERQNHARELVQGLSLSEWDGIVTVSGDGLLHEVLNGLLDRPDWEEAVKMPVGILPCGSGNALAGAVNQHGGFEPALGLDLLLNCSLLLCRGGGHPLDLLSVTLASGSRCFSFLSVAWGFVSDVDIQSERFRALGSARFTLGTVLGLATLHTYRGRLSYLPATVEPASPTPAHSLPRAKSELTLTPDPAPPMAHSPLHRSVSDLPLPLPQPALASPGSPEPLPILSLNGGGPELAGDWGGAGDAPLSPDPLLSSPPGSPKAALHSPVSEGAPVIPPSSGLPLPTPDARVGASTCGPPDHLLPPLGTPLPPDWVTLEGDFVLMLAISPSHLGADLVAAPHARFDDGLVHLCWVRSGISRAALLRLFLAMERGSHFSLGCPQLGYAAARAFRLEPLTPRGVLTVDGEQVEYGPLQAQMHPGIGTLLTGPPGCPGREP

SEQ ID NO: 2246 - DNA, 3433 bp, Homo sapiens
cccagctcggtgctgccgccatcttcttggaggacaggaggagaggcgaaggctccccctccccgtgatcgctccgcactcccgccaccacctgccctcccgcgaccgcctctctcctcctcagtgggcacttgtctccttctaacaaacggccttccccccactccagttacccaccgcaaggcgaagattctcattacctgttccactcttataagcataagaaaaccgagctcataagacgaagcttcacaaaagatgtctaagcaacagccaactcagtttataaatccagaaacacctggctatgttggatttgcaaacctccccaatcaagttcaccgaaaatcagtgaaaaaaggttttgagttcacactgatggtggtcggtgaatcaggtctaggaaaatcgactctcataaacagcctattcctaactgatctgtacccagaaagagtcatacctggagcagcagaaaaaattgaaagaactgtccagattgaggcttcaactgttgaaattgaagagcgaggggtcaagctacgcctgacagtggtagatacccctggctatggtgacgctatcaactgcagagattgttttaagacaattatctcctatattgatgagcaatttgagaggtacctgcatgacgagagcggcttgaacaggcggcacatcattgataatagggtgcattgttgcttttactttatttcaccttttggacatggacttaagcccttagatgtggcgtttatgaaggcaatacacaacaaggtgaatattgtgcctgtcattgcaaaagctgacactctcaccctgaaggaacgggagcggctgaagaaaaggattctggatgaaattgaagaacataacatcaaaatctatcacttacctgatgcagaatcagatgaagatgaagattttaaagagcagactagacttctcaaggctagcatcccattctctgtggttggatccaatcagttgattgaagccaaaggaaagaaggtcagaggccgcctctacccctggggtgttgtggaagtggagaacccagagcacaatgactttctgaagctgagaaccatgctcatcacccacatgcaggatctccaggaggtgacccaggaccttcattatgaaaacttccgttctgagagactcaagagaggcggcaggaaagtggagaatgaggacatgaataaagaccagatcttgctggaaaaagaagctgagctccgccgcatgcaagagatgattgcaaggatgcaggcgcagatgcagatgcagatgcagggcggggatggcgatggcggggctctcgggcaccacgtgtaaggtgatgtgcacatatcaagaagtcagagaaaacactttcctggataaaaaagaaaacattccagatgcatgatccagctgtgtgttttcaatccttgggagggtgccatccacattttaacagtacctgtgcctgagaatttaatttttaaaagactttgatgtgtttttgtatgaagtacttttaacgtatgtatttcattgctgtgtcacactctgtgttttgtgaggtgaatgtcttccttttctttctccctaaccactaatgttagaattgatttccaagaatcggcatgtatacttaatactgaatttctttgatttaactgacttaacaactgactaaccattgatgagcactcctgatttttatctagaacattcagatttaccataatgttccttagtggtagaggtgtgtgcctagtgatgtagaaagatacactgacttggtgcaaggccatctgcttaccacatcacaccacttggagatctttgcttccttgcttttatgtttgtacacaacacctaaaaccagttttgctgctataattctatactgttgattcgtctgcgattttatctgttaaccaaataaaacataatagaatttcctaatgagatatatctttatacttaaacagcttttttagaggtgagttttaaagaagtctcttaattctgatgctaggttgtttttaaaaccactatgcaaagaactcaccacaagccaccttttgtagtgttctccactaatactggttatcctgtgctacagagaaaatcaaagcagtcataagctccagttttccgtattgcaaataagactcttacctacaaaatgagattccagtgaactaatttggtttttactcaaccaaattaaaaatttttttaaggaaaattagcagttggtctattcagaatcaaacctttttatattttatactgcactttagtgtattttctgtcactgtaggtatagaagatctgcctcccctgtggaaattggggtctgttggtgggcttgcccctgaagcctggcttgggttgaaaagtgttcccgccctaaggccttggtgccctgaacctctgatgcctaccgggttctcctgatttgagtttcctttaaatactccctttttgagtaattttctgatgggaggaaagtagcagtcatcatctttttgtgtgcaggctgtctcatttatttttagccattgtcgtttcattcattttgtgtaatataaaccgtgtgtcatgtcaaagtgaaagacatttcaaatctgtagcataggctagtgggcaggtccgcacagtcgaagccacacctggtctgttttctgtgcactgtagccttagtgtcacctttcttcttgtgtctccttatggtacactccagcggttgccttttttatcatttctactgaagttgggaaattcaaccccagaaattgacagatgaaaggagacaatggttgtgtagggagatggagaaaatgcttaatctgaggatgagacagggttttttcatttttgtgggggctagaaaaaacataaaatgaggcagttaaataataatagttaatgaaggtgtgctacagaaaataatctggtgttcttgctaactttgcccttcactgttgcttaattgtgaacagccaaaagctatatgttatggcttattgtgtgaaggtaactaagaagtggtgttccatgacttcagagtacatccatgcggagtccattatttgagtttgacatttaataactttgctggaaaatctgtaaaaaagaaaaacaagtttgctagtgactaagccccgcatatgtgagtgaaagtacttcaggcacgctgcctcctggtaacagctatgcagggagggaggacccacactgctacacttctgatcccctttggttttactacccaaatctaaatagatacttttgataatagataactgctcttttactaagacatagtctctacctatagaaatgtattttgaaaacacttattttacacagcaattttgtatccatttaaactaaccttttatcaataaagcactattgtttagatatt

SEQ ID NO: 2247 - protein, 361 aa, Homo sapiens
MSKQQPTQFINPETPGYVGFANLPNQVHRKSVKKGFEFTLMVVGESGLGKSTLINSLFLTDLYPERVIPGAAEKIERTVQIEASTVEIEERGVKLRLTVVDTPGYGDAINCRDCFKTIISYIDEQFERYLHDESGLNRRHIIDNRVHCCFYFISPFGHGLKPLDVAFMKAIHNKVNIVPVIAKADTLTLKERERLKKRILDEIEEHNIKIYHLPDAESDEDEDFKEQTRLLKASIPFSVVGSNQLIEAKGKKVRGRLYPWGVVEVENPEHNDFLKLRTMLITHMQDLQEVTQDLHYENFRSERLKRGGRKVENEDMNKDQILLEKEAELRRMQEMIARMQAQMQMQMQGGDGDGGALGHHV

SEQ ID NO: 2248 - DNA, 2801 bp, Homo sapiens
ctaggagctggcggtccgagctgtggcttgaaagaccgacgcgatgaagcccagacctgcagggttcgtggataataaactcaagcagcgagtcatccagtatagactatggtcgaagaaaaagaaatgcttttaggattcaggtagaaaaagtatttagcataattagtagtgagaaggaacttaagaatttaacagaattagaagatgaacatttggcaaaaagggcaagacaaggtgaagaggataatgagtatactgaaagctattctgatgatgattcaagtatggaagactacccagatccacagtcagcaaatcacatgaacagttccctgctgtctttatatcggaaaggaaatcctgattctgtttcaaatactcctgagatggagcaaagagaaaccacctcttcaacaccacgaataagttccaaaacaggctccattcccttgaagacccctgccaaagattctgaaggaggatggtttattgacaaaaccccaagtgtaaagaaagacagttttttcttggacctgtcatgtgagaaaagtaatcctaagaagccaataactgagatacaggattcaaaagattcttctcttttggagagtgatatgaaacggaaaggcaagctaaagaataaaggaagcaaaaggaagaaagaagatcttcaggaagtagatggagaaattgaagctgtcctacaaaagaaagctaaagccagggggttagaattccagatctccaacgtgaagtttgaagatgtgggaggcaatgatatgacattaaaagaggtctgcaagatgctcatacacatgcgtcacccggaggtgtaccaccacctgggcgtcgtgccccctcgtggagttctccttcatggaccaccaggctgtgggaagacattacttgcacatgcaattgctggggaacttgacctgccaattttgaaagtggctgctccagagattgtgtctggagtatccggagagtctgagcagaagctgagagaactatttgagcaagctgtgtcaaatgcaccatgtatcattttcattgatgaaattgatgctattacccccaaaagagaagtggcttcaaaagatatggaacgaagaattgtagcccaactcctaacctgcatggatgatctgaataatgtggctgctacagcccgggtcctagttattggagctactaatcgaccagactcgttagaccctgctttgagacgtgcgggaaggttcgaccgagaaatatgcctaggtatcccagatgaagcatccagggaaagaatacttcaaacattgtgcagaaaactgaggcttcctcaagcttttgatttctgtcacttagcacacctaactccaggctttgttggtgctgatctcatggcactgtgccgagaggcagcaatgtgtgcagtcaatagagtcttaatgaagctacaggaacagcagaagaaaaatcctgaaatggaagatttgccatctaaaggagtccaggaggaaaggctgggaactgagcccacttctgaaacacaggatgaattacaaaggctgctggggttgctaagagaccaagatcccctctcagaggagcagatgcaaggactgtgcattgaactgaatgatttcattgttgctctatcctcagtccaaccctctgccaaaagggaaggctttgtcactgtccctaatgtgacatgggcagatattggtgccctggaagacattagagaggagctcaccatggcaatattggcaccagtacgcaacccagaccagttcaaagctcttggattggtgactccagctggggtcctccttgctggtcctcctggctgtgggaagactctgctggcgaaggctgttgcaaatgagtccggactaaattttatatctgtcaagggccccgaattactaaacatgtatgttggtgagagtgaacgtgctgtgcgacaagtttttcaacgagccaagaactcagcaccctgtgtgatattctttgatgaagtggatgctttatgtcctcgaagatcagaccgagagacaggggcaagtgtccgagtggtgaatcagctacttacagagatggatggtctggaagcacgccagcaggtttttattatggcagccactaacaggccagatataattgaccctgcaatcctgcgcccgggccgcctggacaaaacactgtttgtgggtttaccgccccctgcagatcgccttgccatcttaaaaactatcacaaaaaatggtaccaaaccaccactggatgcagatgtaaatttggaagcaattgctggtgaccttcgctgtgattgctatacgggcgcagatctctctgctttggtacgagaagcttctatctgtgccctgagacaggaaatggcaagacagaagagtggaaatgaaaaaggtgaactcaaggttagtcataagcattttgaagaagctttcaagaaagtaagatcatctatatcaaaaaaggatcaaatcatgtatgaacgtttgcaggagtccctcagccggtgatgtctccagcagccggcttagaggagctagcccatcaagccggcagagaatcccccacacgctctgaaggacccactttcagctggacacaggcgcggcctcatgtaaacattttattttcaaatgaatgaggccaagctgaagctgaagctgaagattcttcccatctggccagccttgtgtgaaaatgccttcttcctctttaagaaaaaggacaatttttaaactgctgaaataaaatgactgttacatttttcaaat

SEQ ID NO: 2249 - protein, 750 aa, Homo sapiens
MEDYPDPQSANHMNSSLLSLYRKGNPDSVSNTPEMEQRETTSSTPRISSKTGSIPLKTPAKDSEGGWFIDKTPSVKKDSFFLDLSCEKSNPKKPITEIQDSKDSSLLESDMKRKGKLKNKGSKRKKEDLQEVDGEIEAVLQKKAKARGLEFQISNVKFEDVGGNDMTLKEVCKMLIHMRHPEVYHHLGVVPPRGVLLHGPPGCGKTLLAHAIAGELDLPILKVAAPEIVSGVSGESEQKLRELFEQAVSNAPCIIFIDEIDAITPKREVASKDMERRIVAQLLTCMDDLNNVAATARVLVIGATNRPDSLDPALRRAGRFDREICLGIPDEASRERILQTLCRKLRLPQAFDFCHLAHLTPGFVGADLMALCREAAMCAVNRVLMKLQEQQKKNPEMEDLPSKGVQEERLGTEPTSETQDELQRLLGLLRDQDPLSEEQMQGLCIELNDFIVALSSVQPSAKREGFVTVPNVTWADIGALEDIREELTMAILAPVRNPDQFKALGLVTPAGVLLAGPPGCGKTLLAKAVANESGLNFISVKGPELLNMYVGESERAVRQVFQRAKNSAPCVIFFDEVDALCPRRSDRETGASVRVVNQLLTEMDGLEARQQVFIMAATNRPDIIDPAILRPGRLDKTLFVGLPPPADRLAILKTITKNGTKPPLDADVNLEAIAGDLRCDCYTGADLSALVREASICALRQEMARQKSGNEKGELKVSHKHFEEAFKKVRSSISKKDQIMYERLQESLSR

SEQ ID NO: 2250 - DNA, 547 bp, Homo sapiens
gtcatctttattcaagtatttcacagcagttatattacaaattacagtaaatgttcaaattccagaattcaaaaattaaataatttacttcaactaatgtcaaatgaagtcaaatgcaaaacatcaatttaacacaattctaaattaaaactacaaacccaaaatagaccatagttgatgaagtctacttaaactacaaagtagacatacatgactgaaaccaaattggactcccaaagtctaagtaaccagatgtacagaatacaaaagatgcaggtacaagcccaaattcaagcttacaatgtgattacaaataataattataataacaatggcattcagctacgggacctgacactgaagatacctactgaatagcaccatagctgaaccaacttaatcaaaaaagggaagaaattacccactccctaaaaataaaatccagtaaacctacaaatacattggcttatgagaaaaatcaagtcatgaaacaacattaaaaaaaaaaaatcacaggtgagattcaagctcgaaaacacaattaact

SEQ ID NO: 2251 - DNA, 1396 bp, Homo sapiens
gcgggggaagctggcgggctgaggcgccccgctcttctcctctgccccgggcccgcgaggccacgcgtcgccgctcgagagatgatgcaggacgtgtccagctcgccagtctcgccggccgacgacagcctgagcaacagcgaggaagagccagaccggcagcagccgccgagcggcaagcgcgggggacgcaagcggcgcagcagcaggcgcagcgcgggcggcggcgcggggcccggcggagccgcgggtgggggcgtcggaggcggcgacgagccgggcagcccggcccagggcaagcgcggcaagaagtctgcgggctgtggcggcggcggcggcgcgggcggcggcggcggcagcagcagcggcggcgggagtccgcagtcttacgaggagctgcagacgcagcgggtcatggccaacgtgcgggagcgccagcgcacccagtcgctgaacgaggcgttcgccgcgctgcggaagatcatccccacgctgccctcggacaagctgagcaagattcagaccctcaagctggcggccaggtacatcgacttcctctaccaggtcctccagagcgacgagctggactccaagatggcaagctgcagctatgtggctcacgagcggctcagctacgccttctcggtctggaggatggagggggcctggtccatgtccgcgtcccactagcaggcggagccccccaccccctcagcagggccggagacctagatgtcattgtttccagagaaggagaaaatggacagtctagagactctggagctggataactaaaaataaaaatatatgccaaagattttcttggaaattagaagagcaaaatccaaattcaaagaaacagggcgtggggcgcacttttaaaagagaaagcgagacaggcccgtggacagtgattcccagacgggcagcggcaccatcctcacacctctgcattctgatagaagtctgaacagttgtttgtgttttttttttttttttttttgacgaagaatgtttttatttttatttttttcatgcatgcattctcaagaggtcgtgccaatcagccactgaaaggaaaggcatcactatggactttctctattttaaaatggtaacaatcagaggaactataagaacacctttagaaataaaaatactgggatcaaactggcctgcaaaaccatagtcagttaattctttttttcatccttcctctgaggggaaaaacaaaaaaaaacttaaaatacaaaaaacaacattctatttatttattgaggacccatggtaaaatgcaaatagatccggtgtctaaatgcattcatatttttatgattgttttgtaaatatctttgtatatttttctgcaataaataaatataaaaaatttagagaa

SEQ ID NO: 2252 - protein, 202 aa, Homo sapiens
MMQDVSSSPVSPADDSLSNSEEEPDRQQPPSGKRGGRKRRSSRRSAGGGAGPGGAAGGGVGGGDEPGSPAQGKRGKKSAGCGGGGGAGGGGGSSSGGGSPQSYEELQTQRVMANVRERQRTQSLNEAFAALRKIIPTLPSDKLSKIQTLKLAARYIDFLYQVLQSDELDSKMASCSYVAHERLSYAFSVWRMEGAWSMSASH

SEQ ID NO: 2253 - DNA, 2423 bp, Homo sapiens
ccggcccggtcgacccgccgccgccgagcatggacgaccccgactgcgactccacctgggaggaggacgaggaggatgcggaggacgcggaggacgaggactgcgaggaggccgaggccgccggcgcgagggacgcggacgcaggggacgaggacgaggagtcggaggagccgcgggggccgtgcccagctcgttccagtccagaatgacagggtccagaaactggcgagccacgagggacatgtgtaggtatcggcacaactatccggatctggtggaacgagactgcaatggggacacgccaaacctgagtttctacagaaatgagatccgcttcctgcccaacggctgtttcattgaggacattcttcagaactggacagacaactatgacctccttgaggacaatcactcctacatccagtggctgtttcctctgcgagaaccaggagtgaactggcatgccaagcccctcacgctcagggaggtcgaggtgtttaaaagctcccaggagatccaggagcggcttgtccgggcctacgcagctcatgctgggcttctacgggatccggctggaggaccgaggcacgggcacggtgggccgagcacagaactaccagaagcgcttccagaacctgaactgcgcagccacaacaacctccgcatcacacgcatcctcaagtcgctgggtgagctgggcctcgagcacttccaggcgccgctggtccgcttcttcctggaggagagcctggtgcggcgggagctgccgggggtgcggcagagtgccctggactacttcatgttcgccgtcggctgccgacaccagcgccgccagctggtgcacttcgcctgggagcacttccggccccgctgcaagttcgtctgggggccccaagacaagctgcggaggttcaagcccagctctctgccgcatccgctcgagggctccaggaaggtggaggaggaaggaagccccggggaccccgaccacgaggccagcacccagggtcggacctgtgggccagagcatagcaagggtgggggcagggtggacgaggggccccagccacggagcgtggagccccaggatgcgggacccctggagaggagccagggggatgaggcagggggccacggggaagataggccggagcccttaagccccaaagagagcaagaagaggaagctggagctgagccggcgggagcagccgcccacagagccaggccctcagagtgcctcagaggtggagaagatcgctctgaatttggaggggtgtgccctcagccagggcagcctcaggacggggacccaggaagtgggcggtcaggaccctggggaggcagtgcagccctgccgccaacccctgggagccagggtggccgacaaggtgaggaagcggaggaaggtggatgagggtgctggggacagtgctgcggtggccagtggtggtgcccagaccttggcccttgccgggtcccctgccccatcggggcaccccaaggctggacacagtgagaacggggttgaggaggacacagaaggtcgaacggggcccaaagaaggtacccctgggagcccatcggagaccccaggccccagcccagcaggacctgcaggggacgagccggccgagagcccatcggagaccccaggcccccgcccagcaggacctgcaggggacgagccagccgagagcccatcggagaccccaggcccccgcccggcaggacctgcaggggacgagccagccaagaccccatcggagaccccaggccccagcccggcaggacctacaagggatgagccagccgagagcccatcggagaccccaggcccccgcccggcaggacctgcaggggacgagccagccgagagcccatcggagaccccaggcccccgcccggcaggacctgcaggggacgagccagccgagagcccatcggagaccccaggccccagcccggcaggacctacaagggatgagccagccaaggcgggggaggcagcagagttgcaggacgcagaggtggagtcttctgccaagtctgggaagccttaaggaaaggagtgcccgtcggcgtcttggtcctcctgtccctgctgcaggggctggggcctccggagctgctgcgggctcccctcaggctctgcttcgtgacccgtgacccatgacccacagtgctggcctcctgtggggccactatagcagccaccagaagccgcgaggccctcagggaagcccaaggcctgcagaagcctcctggcctggctgtgtcttccccacccagctctcccctgcgcccctgtctttgtaaattgacccttctggagtggggggcggcgggcagggctgcttttcttagtctgatgccaagcaaggccttttctgaataaattcatttgactttgaaaaaaaaaaa

SEQ ID NO: 2254 - protein, 618 aa, Homo sapiens
MTGSRNWRATRDMCRYRHNYPDLVERDCNGDTPNLSFYRNEIRFLPNGCFIEDILQNWTDNYDLLEDNHSYIQWLFPLREPGVNWHAKPLTLREVEVFKSSQEIQERLVRAYAAHAGLLRDPAGGPRHGHGGPSTELPEALPEPELRSHNNLRITRILKSLGELGLEHFQAPLVRFFLEESLVRRELPGVRQSALDYFMFAVGCRHQRRQLVHFAWEHFRPRCKFVWGPQDKLRRFKPSSLPHPLEGSRKVEEEGSPGDPDHEASTQGRTCGPEHSKGGGRVDEGPQPRSVEPQDAGPLERSQGDEAGGHGEDRPEPLSPKESKKRKLELSRREQPPTEPGPQSASEVEKIALNLEGCALSQGSLRTGTQEVGGQDPGEAVQPCRQPLGARVADKVRKRRKVDEGAGDSAAVASGGAQTLALAGSPAPSGHPKAGHSENGVEEDTEGRTGPKEGTPGSPSETPGPSPAGPAGDEPAESPSETPGPRPAGPAGDEPAESPSETPGPRPAGPAGDEPAKTPSETPGPSPAGPTRDEPAESPSETPGPRPAGPAGDEPAESPSETPGPRPAGPAGDEPAESPSETPGPSPAGPTRDEPAKAGEAAELQDAEVESSAKSGKP

SEQ ID NO: 2255 - DNA, 1999 bp, Homo sapiens
gagggaggggccgccggggaagaggaggaggaaggaaagaaagaaagcgagggagggaaagaggaggaaggaagatgcgagaaggcagaggaggagggagggagggaaggagcgcggagcccggcccggaagctaggtgagtgtggcatccgagctgagggacgcgagcctgagacgccgctgctgctccggctgagtatctagcttgtctccccgatgggattcccgtccaagctatctcgagcctgcagcgccacagtccccggccctcgcccaggttcactgcaaccgttcagaggtccccaggagctgctgctggcgagcccgctactgcagggacctatggagccattccgtagtgccatcccgagcaacgcactgctgcagcttccctgagcctttccagcaagtttgttcaagattggctgtcaagaatcatggactgttattatatgccttgttttctgtcaagacaccatgattcctggtaaccgaatgctgatggtcgttttattatgccaagtcctgctaggaggcgcgagccatgctagtttgatacctgagacggggaagaaaaaagtcgccgagattcagggccacgcgggaggacgccgctcagggcagagccatgagctcctgcgggacttcgaggcgacacttctgcagatgtttgggctgcgccgccgcccgcagcctagcaagagtgccgtcattccggactacatgcgggatctttaccggcttcagtctggggaggaggaggaagagcagatccacagcactggtcttgagtatcctgagcgcccggccagccgggccaacaccgtgaggagcttccaccacgaagaacatctggagaacatcccagggaccagtgaaaactctgcttttcgtttcctctttaacctcagcagcatccctgagaacgaggcgatctcctctgcagagcttcggctcttccgggagcaggtggaccagggccctgattgggaaaggggcttccaccgtataaacatttatgaggttatgaagcccccagcagaagtggtgcctgggcacctcatcacacgactactggacacgagactggtccaccacaatgtgacacggtgggaaacttttgatgtgagccctgcggtccttcgctggacccgggagaagcagccaaactatgggctagccattgaggtgactcacctccatcagactcggacccaccagggccagcatgtcaggattagccgatcgttacctcaagggagtgggaattgggcccagctccggcccctcctggtcacctttggccatgatggccggggccatgccttgacccgacgccggagggccaagcgtagccctaagcatcactcacagcgggccaggaagaagaataagaactgccggcgccactcgctctatgtggacttcagcgatgtgggctggaatgactggattgtggccccaccaggctaccaggccttctactgccatggggactgcccctttccactggctgaccacctcaactcaaccaaccatgccattgtgcagaccctggtcaattctgtcaattccagtatccccaaagcctgttgtgtgcccactgaactgagtgccatctccatgctgtacctggatgagtatgataaggtggtactgaaaaattatcaggagatggtagtagagggatgtgggtgccgctgagatcaggcagtccttgaggatagacagatatacacaccacacacacacaccacatacaccacacacacacgttcccatccactcacccacacactacacagactgcttccttatagctggacttttatttaaaaaaaaaaaaaaaaaaatggaaaaaatccctaaacattcaccttgaccttatttatgactttacgtgcaaatgttttgaccatattgatcatatattttgacaaaatatatttataactacgtattaaaagaaaaaaataaaatgagtcattattttaaaggt

SEQ ID NO: 2256 - protein, 408 aa, Homo sapiens
MIPGNRMLMVVLLCQVLLGGASHASLIPETGKKKVAEIQGHAGGRRSGQSHELLRDFEATLLQMFGLRRRPQPSKSAVIPDYMRDLYRLQSGEEEEEQIHSTGLEYPERPASRANTVRSFHHEEHLENIPGTSENSAFRFLFNLSSIPENEAISSAELRLFREQVDQGPDWERGFHRINIYEVMKPPAEVVPGHLITRLLDTRLVHHNVTRWETFDVSPAVLRWTREKQPNYGLAIEVTHLHQTRTHQGQHVRISRSLPQGSGNWAQLRPLLVTFGHDGRGHALTRRRRAKRSPKHHSQRARKKNKNCRRHSLYVDFSDVGWNDWIVAPPGYQAFYCHGDCPFPLADHLNSTNHAIVQTLVNSVNSSIPKACCVPTELSAISMLYLDEYDKVVLKNYQEMVVEGCGCR

SEQ ID NO: 2257 - DNA, 1790 bp, Homo sapiens
gagggaggggccgccggggaagaggaggaggaaggaaagaaagaaagcgagggagggaaagaggaggaaggaagatgcgagaaggcagaggaggagggagggagggaaggagcgcggagcccggcccggaagctaggagccattccgtagtgccatcccgagcaacgcactgctgcagcttccctgagcctttccagcaagtttgttcaagattggctgtcaagaatcatggactgttattatatgccttgttttctgtcaagacaccatgattcctggtaaccgaatgctgatggtcgttttattatgccaagtcctgctaggaggcgcgagccatgctagtttgatacctgagacggggaagaaaaaagtcgccgagattcagggccacgcgggaggacgccgctcagggcagagccatgagctcctgcgggacttcgaggcgacacttctgcagatgtttgggctgcgccgccgcccgcagcctagcaagagtgccgtcattccggactacatgcgggatctttaccggcttcagtctggggaggaggaggaagagcagatccacagcactggtcttgagtatcctgagcgcccggccagccgggccaacaccgtgaggagcttccaccacgaagaacatctggagaacatcccagggaccagtgaaaactctgcttttcgtttcctctttaacctcagcagcatccctgagaacgaggcgatctcctctgcagagcttcggctcttccgggagcaggtggaccagggccctgattgggaaaggggcttccaccgtataaacatttatgaggttatgaagcccccagcagaagtggtgcctgggcacctcatcacacgactactggacacgagactggtccaccacaatgtgacacggtgggaaacttttgatgtgagccctgcggtccttcgctggacccgggagaagcagccaaactatgggctagccattgaggtgactcacctccatcagactcggacccaccagggccagcatgtcaggattagccgatcgttacctcaagggagtgggaattgggcccagctccggcccctcctggtcacctttggccatgatggccggggccatgccttgacccgacgccggagggccaagcgtagccctaagcatcactcacagcgggccaggaagaagaataagaactgccggcgccactcgctctatgtggacttcagcgatgtgggctggaatgactggattgtggccccaccaggctaccaggccttctactgccatggggactgcccctttccactggctgaccacctcaactcaaccaaccatgccattgtgcagaccctggtcaattctgtcaattccagtatccccaaagcctgttgtgtgcccactgaactgagtgccatctccatgctgtacctggatgagtatgataaggtggtactgaaaaattatcaggagatggtagtagagggatgtgggtgccgctgagatcaggcagtccttgaggatagacagatatacacaccacacacacacaccacatacaccacacacacacgttcccatccactcacccacacactacacagactgcttccttatagctggacttttatttaaaaaaaaaaaaaaaaaaatggaaaaaatccctaaacattcaccttgaccttatttatgactttacgtgcaaatgttttgaccatattgatcatatattttgacaaaatatatttataactacgtattaaaagaaaaaaataaaatgagtcattattttaaaggt

SEQ ID NO: 2258 - DNA, 1779 bp, Homo sapiens
gaaggaagtggcgggggaaggagtgtggtggtggtttaaaaaataagggaagccgaggcgagagagacgcagacgcagaggtcgagcgcaggccgaaagctgttcaccgttttctcgactccggggagccattccgtagtgccatcccgagcaacgcactgctgcagcttccctgagcctttccagcaagtttgttcaagattggctgtcaagaatcatggactgttattatatgccttgttttctgtcaagacaccatgattcctggtaaccgaatgctgatggtcgttttattatgccaagtcctgctaggaggcgcgagccatgctagtttgatacctgagacggggaagaaaaaagtcgccgagattcagggccacgcgggaggacgccgctcagggcagagccatgagctcctgcgggacttcgaggcgacacttctgcagatgtttgggctgcgccgccgcccgcagcctagcaagagtgccgtcattccggactacatgcgggatctttaccggcttcagtctggggaggaggaggaagagcagatccacagcactggtcttgagtatcctgagcgcccggccagccgggccaacaccgtgaggagcttccaccacgaagaacatctggagaacatcccagggaccagtgaaaactctgcttttcgtttcctctttaacctcagcagcatccctgagaacgaggcgatctcctctgcagagcttcggctcttccgggagcaggtggaccagggccctgattgggaaaggggcttccaccgtataaacatttatgaggttatgaagcccccagcagaagtggtgcctgggcacctcatcacacgactactggacacgagactggtccaccacaatgtgacacggtgggaaacttttgatgtgagccctgcggtccttcgctggacccgggagaagcagccaaactatgggctagccattgaggtgactcacctccatcagactcggacccaccagggccagcatgtcaggattagccgatcgttacctcaagggagtgggaattgggcccagctccggcccctcctggtcacctttggccatgatggccggggccatgccttgacccgacgccggagggccaagcgtagccctaagcatcactcacagcgggccaggaagaagaataagaactgccggcgccactcgctctatgtggacttcagcgatgtgggctggaatgactggattgtggccccaccaggctaccaggccttctactgccatggggactgcccctttccactggctgaccacctcaactcaaccaaccatgccattgtgcagaccctggtcaattctgtcaattccagtatccccaaagcctgttgtgtgcccactgaactgagtgccatctccatgctgtacctggatgagtatgataaggtggtactgaaaaattatcaggagatggtagtagagggatgtgggtgccgctgagatcaggcagtccttgaggatagacagatatacacaccacacacacacaccacatacaccacacacacacgttcccatccactcacccacacactacacagactgcttccttatagctggacttttatttaaaaaaaaaaaaaaaaaaatggaaaaaatccctaaacattcaccttgaccttatttatgactttacgtgcaaatgttttgaccatattgatcatatattttgacaaaatatatttataactacgtattaaaagaaaaaaataaaatgagtcattattttaaaggt

SEQ ID NO: 2259 - DNA, 1171 bp, Homo sapiens
ggggggcagcaggtggtggggccatggctgcccttctccgagctgtgcgtaggtttcggggaaaagctgtgtgggaagggcctctccatgggctgtggtgctgcagtgggcaggaggatcctaagaggtgggtgggcagcagttcacccatctcgaaggagaaactaccaaacgcagagactgagaaattctggatgttttaccgttttgatgccatcagaaccttcgggttcctgtcacgactgaagttggcacagactgccctgacagtggtagctttgccaccaggctattacttgtactcccagggcctcctcactctcaacaccgtgtgcctcatgagtgggatatcgggctttgccctgaccatgctgtgctggatgagctatttcttacggagactggttggtatcctgtatctgaatgagtctggcaccatgctgcgggtggcccatctgaacttctggggctggcggcaggacacatactgtcccatggcagatgtgattcccctgacagaaaccaaggaccggcctcaggagatgtttgtgcgtatccagcggtacagtgggaaacagaccttctacgtcaccctgcgctatggacgcatcctggacagagagcgtttcacacaggtgtttggggtacatcagatgctcaagtgaacaactgggacctggacctctgggtaaccctgggtcgcctggattaacaggaaggctgagggtgtgggcaaggctgaagaaaggggactgggtacttggagactttgcctgggcccctgggaacatgtgttttgtggtgaataaattcacaaggcaagagctggtgtacaggtttaggaaaaaggctctaagcaagttcttacagcacttgtttgtgacattcagtcagataatggccagaagtttttgttaagagccagttcttagaagaacctatgccaaggtcacccatagagtccattggtgtgaaagagaaaggcaaagaggtgtggcgggggagcataagatttggagtcagaagtctcagttctgtcatttgtcctggagcaggttattgagtctctttgaatcttggttttcacatctgtaaaatggaaagtcctgcttgtttcatgggatgggtgtgggaataaacaataaatgtcaaaaaaaaaaaaaaaaaaaac

SEQ ID NO: 2260 - protein, 213 aa, Homo sapiens
MAALLRAVRRFRGKAVWEGPLHGLWCCSGQEDPKRWVGSSSPISKEKLPNAETEKFWMFYRFDAIRTFGFLSRLKLAQTALTVVALPPGYYLYSQGLLTLNTVCLMSGISGFALTMLCWMSYFLRRLVGILYLNESGTMLRVAHLNFWGWRQDTYCPMADVIPLTETKDRPQEMFVRIQRYSGKQTFYVTLRYGRILDRERFTQVFGVHQMLK

SEQ ID NO: 2261 - DNA, 2284 bp, Homo sapiens
aaaggagactggccgctggggctcaggaccgggattatccgagctctgcagaagtgcaccgctattgctttgggagggtaaaaaaaaaaaatcacacggtttccagtgaaaaagtgacagagggtggtggcctttggaaccgtcgtgaagtcttctgcctggaacccgaaacttgcatgctatggaacacccgctctttggctgcctgcgcagccctcacgccacggcgcaaggcttgcacccgttctcccaatcctctctcgccctccatggaagatctgaccatatgtcttaccccgagctctctacttcttcctcatcttgcataatcgcgggataccccaacgaagagggcatgtttgccagccagcatcacagggggcaccaccaccaccaccaccaccaccatcaccaccatcagcagcagcagcaccaggctctgcaaaccaactggcacctcccgcagatgtcttccccaccgagtgcggctcggcacagcctctgcctccagcccgactctggagggcccccagagttggggagcagcccgcccgtcctgtgctccaactcttccagcttgggctccagcaccccgactggggccgcgtgcgcgccgggggactacggccgccaggcactgtcacctgcggaggcggagaagcgaagcggcggcaagaggaaaagcgacagctcagactcccaggaaggaaattacaagtcagaagtcaacagcaaacccaggaaagaaaggacagcatttaccaaagagcaaatcagagaacttgaagcagaatttgcccatcataattatctcaccagactgaggcgatacgagatagcagtgaatctggatctcactgaaagacaggtgaaagtctggttccaaaacaggcggatgaagtggaagagggtaaagggtggacagcaaggagctgcggctcgggaaaaggaactggtgaatgtgaaaaagggaacacttctcccatcagagctgtcgggaattggtgcagccaccctccagcaaacaggggactctatagcaaatgaagacagtcacgacagtgaccacagctcagagcatgcgcacttatgatataaacagaggaccagctccattctcaggaaagaaatgttgtgatggcaagccttacccaaatatcgtttacacagagagatgactatggcagtgatgtttaatattattaaatccaggcatttcgaatctgtttttcatgatttatagagggtttacacaaagtgccacttattaaagagcttccacagtgaagatggagaaggtgaacttgctttgaatattccagatgtgtttggtcgtgcgtatggcagtgagcaggtatgtgtttgcttttgcttgcactgaaaattaaattgctatcaagagcaaactatgaacggttttttattcaagatgtctccagagtgaagatgccgaggatgaacttgcattgaacattccagatgtgtgagatcatgtgtattacagtgggcaggtatttgcttttgcttgcactgaaaattaaattgctatcaagaataaaccatgaaacattttatcctgaacagccacagtgcctgaattcactcaagtggataaaaagtgtattttaactctgtatatattacccttaagtcattttcctgtcttcactaatttagcaatgcattcatattagctgatgaaaataggcactcacaatgacaaccagagccagtttcttgtcttttttatacattttgtcatcccagagacaatcagtatgtgcttacctgtgttcaagtagagaaaaatacagtagagtctgataggacatattcttgtaccacagacaaaacaaatcttatgttgcatttactatcaactgctgctaatacgttattataaaacttacctagctcctgaattcttcctatcttatagcttaaaaaaattaggatcataggcaaatcagttaccttgcagaaagagctttgtatgacagacattgtcttattttatttctgtaaaatattagctgtatgaatatgatttaattaacaagaaaacatttcttcctgattgacaacagtgttagacaaggtgcaaagcgaaactggttgctcaagttgatagaaaacaaaattctgaatatcttcaaattaaattcggtaaaaacacattattttttcatatgtgatgtattcatgcagaacaactatctttgtattttgtttttaaaatgtgtttaataaatgatcctttgtaaataaaaaaaaaaaaaaaaaa

SEQ ID NO: 2262 - protein, 303 aa, Homo sapiens
MEHPLFGCLRSPHATAQGLHPFSQSSLALHGRSDHMSYPELSTSSSSCIIAGYPNEEGMFASQHHRGHHHHHHHHHHHHQQQQHQALQTNWHLPQMSSPPSAARHSLCLQPDSGGPPELGSSPPVLCSNSSSLGSSTPTGAACAPGDYGRQALSPAEAEKRSGGKRKSDSSDSQEGNYKSEVNSKPRKERTAFTKEQIRELEAEFAHHNYLTRLRRYEIAVNLDLTERQVKVWFQNRRMKWKRVKGGQQGAAAREKELVNVKKGTLLPSELSGIGAATLQQTGDSIANEDSHDSDHSSEHAHL

SEQ ID NO: 2263 - DNA, 9301 bp, Homo sapiens
ctccagcccaggcaacagagcgtgactccgtctcaaaaaaaaaaaaaaaagtgaaaggaaaatgaggggagaattctcattgataataagggtgaaaaggtttttttggcagagtaatagagttttggaaaccattgcaaagctgtcaagtgtggtgtagtttttggttaaggaaatcagaggtgtcagcagacataaaagacaggggaaaacatgggaagtgtcctacctatagtgtagaaaaagcacaactatctatgtcagaggtcgacagactgtggtccataggtcaaatctggcccacgatctgtttttgtaaataacgttttattggaacatagccacactcatttatttatatattgtccatatcttcttttgtggtaccaatagcagagttgagtagtcgtgacagagatgtgttgtgtcagctcacaaagctggaaatactctttacaaaaacatttgccaacccctgatctatgtgtttgagtgttggatgttcaacctctaatttgcctccaatgtctatatgatgatagagaatgaataaacgtcttggctctgccctttgggctggattacccatgctctgtgtacctgcagcataacacagacccctgaatatttatatcagtcagtgatggcaaggtctattgttctggagtgtactgtgtggtaactgtggtagtgccagctttacacggattagataatgctcgggcttgttttgccattttttttattgggttgtcttttacaaaagatttatttatatattctgattattaatcctttgttgttggtagatattacagatgtcatttcccagtttcttgcttattttaattttttttttttttttttgagatgaagtcttgctctgtcgcccaggctggagtgcagtcgtgccatctcggctcattgtaacctccgtctcccaggttcaagtgattctcttgcctcagcctcccaagtggctgggactgcaggcatgtgccaccacgcctggctgatttttgtgtttttagtggggatggggtttcatcatgttggccaggctggtctcaaactcctgacctcaagtgatccacccgtcttggcctcctagagtgctgggattacaggtgtgagccactgcgcctggcctgttgcttattttaaaacatctgttttaaggtgtcatttgttaaaaagttctgaattttagtatcaactttatcaatcttttcctttaagatttgcagttattctttgttttgaggcagggtctcgctctgtcaccgaggctggagtgcagtggcgcgatctcggctcactgcagcctcaacctcctgggctcaagcaaccctcccacctcccatgccagttgagaccacaggcatgcgccaccatgccctgctattttttgcattttttgtagaggcggggtttcgccatgttgcccaggctagtctggaactcctgagctcaagcagtccacaaagtgctgggattacaggtgtgagctactgtgcccagcctgcaattattctttatattctggaatacctactgttgttttcaatggttagatctttaatgtatctggaatggattcttatgtgtagtgtaaggtcgggtccagtttcattttttttccctatgtataaccagtgatcccagcatcatttattgaatggggcttgctttcaaattgtgagctctttttggtggagtctgtctgaggtccttatgaagcactgctgcttgctgattgtgtgaccttggacaaataaaacctcattgcgcctcagtctttaaggataatagtaatctcatagggttttgtgaggattaaatgagtcaatatacataacgtgtaaaacagtgcttggcacctagaacatgctcaataaatattagctgtactttagcactactgttcatttctgattcctcagcacctggtacagagcaggggctcattttgctcaattaaattgccaaattaatttggttttcaggtcaatcagaatggtgagagttgggctgagtgttgcaggagatgcttccaaggagctacttagttttaggggctgccttagattatctgctaggatagaactcttctcacgccatcacttttgcagagaacttctgtagcagaggttgcaaactggcaacctgtggttggatttgacctgtataagtattttgtttggtttacacaatatttttaatgtcttaaaaatgtacacagacctctgagtttctgacttaaccttgaaaaattggaagatctgtcaacagcaagcccatattcatttatagcggtaaccagctgaaacttttaggtcctgggaggaatggagaggggtcccactgactaacttttctgagagtggtcagagagttcttaagcagaattttgatttggctgctgggctgctaccttgaaatccaagccctaaaaatgccagcttctttggacttagaagatgacctggataaatgataaaaattaagaaagagattttgaagttttcttattgtcctcttggcatatgcttctggaataatattcaccatggttttggatgaccttccaaacttagaagacatctatacttccttgtgttcatcaacaatggaagactcagagatggattttgactctggactagaagatgatgacacaaaaagtgatagtattttggaggattccacaatttttgtggccttcaaaggaaatatagatgataaagacttcaaatggaaattagatgcaatattgaaaaacgtgcccaatttgttacacatggagtccagcaagctaaaagtacagaaggtgagccctggaacagcgtgcgtgtgacattcaacatcccccgggaagcagcggagcggctacggatccttgctcagagcaacaaccagcagcttcgggatttagggattctctccgttcagattgaaggggaaggtgctattaacctggctttggctcagaaccgaagccaagatgtgagaatgaatggacccatgggagctggaaattcagttaggatggaggcgggatttcctatggcaagtggtccaggaataataaggatgaacaaccctgccactgttatgatacccccgggtggaaatgtgtcatcttccatgatggcaccaggccccaatccagagctgcagcccaggactcctcgccctgcttctcagtcagatgcaatggatccactcctctctgggctccatatacagcagcaaagtcatccctcaggatctttagctcccccacatcacccaatgcagcctgtctctgtgaacagacaaatgaacccagctaattttccccagctgcagcagcagcagcaacaacaacaacagcagcagcagcagcagcagcagcaacaacagcaacagcagcaacaacagttgcaggcaagacccccacagcaacatcagcagcaacagccacagggaattcgaccccagtttactgccccaactcaggtgcctgttcctccaggctggaaccagctgccttctggagcccttcaacctcctccagcccagggttctctgggcacaatgactgcaaaccaagggtggaagaaggctcccttgcccggcccaatgcaacagcaactccaggcaagaccatccttagccacggtacagacgccttcccaccctccccctccatatccctttggcagccagcaagcctcacaagcccacacaaactttcctcagatgagcaacccaggccagttcacagctcctcagatgaagagtttgcagggagggccctctagggtcccaactcccttgcagcagccccacctcaccaacaagtctcctgcctcctcaccctcctccttccagcagggatcccctgcatcctccccaacggttaaccaaactcagcagcagatgggaccaaggccacctcaaaataacccacttccccagggatttcagcagcctgtcagctctccgggtcggaatcctatggttcaacagggaaatgtgccacctaacttcatggtgatgcagcagcaaccaccaaaccaggggccacagagtttacatccaggcctaggaggaatgcctaaacgcctcccacctggcttctcagcaggacaggccaatccgaactttatgcaaggtcaggtgccttcgaccacagcaaccacccctgggaattcaggagcccctcagctgcaagcaaatcaaaatgtccagcatgcaggtggtcaaggagctggtcctcctcaaaaccagatgcaggtgtcccacgggccgccaaatatgatgcagcccagcctcatgggaattcatggcaacatgaacaatcagcaggctggtacttctggggttcctcaagtgaacctcagcaacatgcaaggccagccccagcagggcccaccatctcagctgatgggcatgcaccagcaaatcgtgccctcccagggccagatggtccagcaacaaggaaccttgaaccctcagaaccctatgatcctttcaagggcccagcttatgccacagggccagatgatggtgaaccccccgagccaaaatcttgggccctcgccccaaaggatgaccccacccaagcagatgctttcccagcagggcccacaaatgatggcgccacataaccagatgatggggcctcaggggcaggttttgctccaacagaacccaatgatagagcagattatgaccaatcaaatgcaggggaataagcagcagtttaacactcagaaccagtccaatgtcatgccgggaccagcccagataatgaggggaccaactccgaacatgcaaggaaatatggtgcagtttacgggacagatgtcaggacagatgctgccccagcaagggcctgtgaacaacagtccatctcaggttatgggcattcagggacaggtcctgcggccaccagggcccagcccacacatggcccagcagcatggtgatcctgctactacagcaaataacgatgtcagtttatctcagatgatgcctgatgttagcattcaacaaaccaacatggtcccccctcatgtgcaggccatgcagggaaacagtgcctcgggaaaccacttctcaggccatgggatgtctttcaatgcacctttcagtggagctcccaatggaaatcagatgtcctgtggtcaaaatccaggcttcccagtcaataaggatgtcacgctaacgagcccattgttggtcaacttattgcagagtgacatatctgcaggccattttggggtaaacaataagcaaaataataccaacgcaaataaaccgaagaagaagaaaccccctcggaagaagaaaaatagtcagcaagatctaaacaccccagatactcgcccagctggtctggaagaggctgatcagccaccgttgcctggagaacaaggaattaacttggataactcaggccctaaactgccagaattttcaaaccggccaccaggttatccttctcaaccagttgaacagaggccacttcagcagatgcctcctcaactcatgcagcatgtggcacccccaccacagccaccacagcagcagccacagccacaactgcctcagcagcagcagccaccacctcccagtcagccacagtctcagcagcagcagcagcagcagcaacaaatgatgatgatgctcatgatgcagcaggatcccaaatcagttaggcttccagtctctcaaaatgtccatcctccaaggggccccctgaaccccgactcccagagaatgcccatgcaacagagtggcagtgtgcctgtcatggtcagtctgcaaggacctgcctccgtgccaccatcacctgataaacaaagaatgccaatgcctgtgaatactcccttgggaagcaattcaaggaaaatggtctatcaggagagcccgcagaatccttccagctcgccactggcggagatggcctcactccctgaagcaagtggcagtgaagcaccatctgtcccaggaggcccaaacaacatgccttcacatgtagtacttccccagaatcagttaatgatgacagggccaaaacctggaccatcgcccctttcagcaactcaaggtgcaactccccagcaaccccctgtaaattccctgcccagctctcacggccaccacttcccaaatgtggctgcgccaacccagacatctaggcccaaaacaccaaacagagccagccccagaccctattatcctcagacacccaacaaccgccctcccagcacagaaccttcagaaatcagtctgtcaccagaaagactcaatgcctccatagcaggactcttccctccacagattaatattcctttacctcctaggccaaatttaaacaggggctttgatcaacaaggcctaaatccaacaactttgaaggccatcgggcaagcaccttcaaatcttaccatgaatccttccaattttgctaccccacaaactcacaaattagattctgtggtagtgaattctggaaagcagtctaattctggagcaacaaaacgggcaagtccaagcaacagtcgcaggtctagtcctgggtccagtaggaaaaccactccaagccctgggaggcaaaattcaaaagcccctaaacttactctggcctctcagacaaatgcagccctattgcagaatgtggagttgccgagaaatgtattggtcagtcccactcctctggccaatccccctgtacctgggagctttcctaacaacagtgggctgaatcctcagaattctactgtgtctgtggctgcagttgggggtgttgttgaggataacaaggagagcttgaatgtgcctcaggacagtgattgccagaattcccagagtaggaaggaacaggtaaacattgaactaaaagcagtccctgcccaagaagttaaaatggttgtccctgaagatcagtccaaaaaggatgggcagccttcggatcctaacaaacttcccagtgtcgaagagaacaaaaatttggtgtctcctgctatgagggaagcaccaacatcgttaagtcaacttcttgacaactctggagctcccaatgtgacaattaaaccccctgggcttacagatctggaagtaacacctccagtagtttctggggaggacctcaaaaaagcatctgtcattcccacactgcaggatctgtcttcttctaaagaaccttctaattccctaaacttacctcacagtaatgagctgtgttcatcccttgtgcatcccgaattgagtgaggtcagttctaacgttgcaccaagcatccctccagtaatgtcaagacctgttagctcttcctccatttccactcccttgcccccaaatcaaataactgtatttgtcacttccaatcccatcacaacttcagctaacacatcagcagctttgccaactcacttgcagtctgcattgatgtcaacagttgtcacaatgcccaatgcgggtagcaaggttatggtttctgagggacagtcagctgctcagtctaatgcccggcctcagttcattacacctgtctttatcaattcatcctcaataattcaggttatgaaaggatcacagccaagcacaattcctgcagccccactgacaaccaactctggcctgatgcctccctctgttgcagttgttggccctttacacatacctcagaacataaaattttcttctgctcctgtaccgcctaatgccctctccagtagtcctgctccaaacatccagacaggtcgacctttggtccttagctcacgagccacccctgttcagcttccttcccctccttgtacgtcttctccagttgtcccttctcatccccctgtgcagcaagtgaaagaattgaatccagatgaggctagccctcaggtgaacacctcagcagatcagaacactcttccctcttcacagtcaaccacaatggtttctccccttttgaccaatagtccagggtcctctggcaaccggcgaagcccagtctcgtctagtaagggcaaaggaaaagtggacaaaattggccaaattttgttgaccaaggcatgtaagaaagttacaggctctcttgagaaaggggaagaacaatatggtgcagatggagagactgaaggccaagggctagacaccacagctccggggctcatgggaacagagcagttatccacagagctggacagtaaaaccccaacgcccccagcacccactctgctaaaaatgacctctagccctgtgggcccgggcactgcctcagcaggacccagcttacctggcggtgctctccccaccagtgtacgctcgatagtaaccactctggtaccctccgagctcatctccgccgtaccgaccacaaaaagcaatcatggtggcatagcatctgagtcacttgcgggtggcctagtggaggagaaggtgggatcccatccagaacttctacccagcatagccccgtcgcagaatttagtctcaaaggaaacttcaaccacagcactgcaggcctctgttgccagaccagagctggaggtaaatgctgccatagtctctggacaaagcagtgagcccaaagagatagttgaaaagtccaaaatcccaggccgaagaaactcccgaactgaagagccaactgtggcctctgaaagtgtggaaaatggacatcgtaaacgatcttctcgacctgcttcagcctccagctctactaaagacataaccagtgcggtgcaatccaagcgaagaaaatccaagtaaacaagcaggactgcgacttgatacttggaaatgtgtgtgacttttacaaagagcaattttgagctgtgacttttttaaatcaatttctgtacagttagtaattttaataatgtggcccttttcctagtccctgcaacctgtttcataaagtgcaatggggaaagcaggactgttgagcccttttggtgttgcgagttgaagttcaaggtttctaaaatgttgtcttgtattgaaaggagctaatgccattataaatgttactagttttcacatttcctaagcagcctagagtacagggtgagcatttttagatctcctaatgatgtattgtgccgtggaagtactgtgtgtgaatagcagtagtgggggcaaaagcaatcttctcatttggaaatgttgtaaataattttattatatagtgttttggatgtatttgttgtagaaatggaccagtgaataaagagaatctaaggatttgtacaatgtgaaataacgtgttaaataaatgtcattgtcatagaacataaaaaaaaaaaaaaaa

SEQ ID NO: 2264 - protein, 2001 aa, Homo sapiens
MEIRCNIEKRAQFVTHGVQQAKSTEGEPWNSVRVTFNIPREAAERLRILAQSNNQQLRDLGILSVQIEGEGAINLALAQNRSQDVRMNGPMGAGNSVRMEAGFPMASGPGIIRMNNPATVMIPPGGNVSSSMMAPGPNPELQPRTPRPASQSDAMDPLLSGLHIQQQSHPSGSLAPPHHPMQPVSVNRQMNPANFPQLQQQQQQQQQQQQQQQQQQQQQQQQQLQARPPQQHQQQQPQGIRPQFTAPTQVPVPPGWNQLPSGALQPPPAQGSLGTMTANQGWKKAPLPGPMQQQLQARPSLATVQTPSHPPPPYPFGSQQASQAHTNFPQMSNPGQFTAPQMKSLQGGPSRVPTPLQQPHLTNKSPASSPSSFQQGSPASSPTVNQTQQQMGPRPPQNNPLPQGFQQPVSSPGRNPMVQQGNVPPNFMVMQQQPPNQGPQSLHPGLGGMPKRLPPGFSAGQANPNFMQGQVPSTTATTPGNSGAPQLQANQNVQHAGGQGAGPPQNQMQVSHGPPNMMQPSLMGIHGNMNNQQAGTSGVPQVNLSNMQGQPQQGPPSQLMGMHQQIVPSQGQMVQQQGTLNPQNPMILSRAQLMPQGQMMVNPPSQNLGPSPQRMTPPKQMLSQQGPQMMAPHNQMMGPQGQVLLQQNPMIEQIMTNQMQGNKQQFNTQNQSNVMPGPAQIMRGPTPNMQGNMVQFTGQMSGQMLPQQGPVNNSPSQVMGIQGQVLRPPGPSPHMAQQHGDPATTANNDVSLSQMMPDVSIQQTNMVPPHVQAMQGNSASGNHFSGHGMSFNAPFSGAPNGNQMSCGQNPGFPVNKDVTLTSPLLVNLLQSDISAGHFGVNNKQNNTNANKPKKKKPPRKKKNSQQDLNTPDTRPAGLEEADQPPLPGEQGINLDNSGPKLPEFSNRPPGYPSQPVEQRPLQQMPPQLMQHVAPPPQPPQQQPQPQLPQQQQPPPPSQPQSQQQQQQQQQMMMMLMMQQDPKSVRLPVSQNVHPPRGPLNPDSQRMPMQQSGSVPVMVSLQGPASVPPSPDKQRMPMPVNTPLGSNSRKMVYQESPQNPSSSPLAEMASLPEASGSEAPSVPGGPNNMPSHVVLPQNQLMMTGPKPGPSPLSATQGATPQQPPVNSLPSSHGHHFPNVAAPTQTSRPKTPNRASPRPYYPQTPNNRPPSTEPSEISLSPERLNASIAGLFPPQINIPLPPRPNLNRGFDQQGLNPTTLKAIGQAPSNLTMNPSNFATPQTHKLDSVVVNSGKQSNSGATKRASPSNSRRSSPGSSRKTTPSPGRQNSKAPKLTLASQTNAALLQNVELPRNVLVSPTPLANPPVPGSFPNNSGLNPQNSTVSVAAVGGVVEDNKESLNVPQDSDCQNSQSRKEQVNIELKAVPAQEVKMVVPEDQSKKDGQPSDPNKLPSVEENKNLVSPAMREAPTSLSQLLDNSGAPNVTIKPPGLTDLEVTPPVVSGEDLKKASVIPTLQDLSSSKEPSNSLNLPHSNELCSSLVHPELSEVSSNVAPSIPPVMSRPVSSSSISTPLPPNQITVFVTSNPITTSANTSAALPTHLQSALMSTVVTMPNAGSKVMVSEGQSAAQSNARPQFITPVFINSSSIIQVMKGSQPSTIPAAPLTTNSGLMPPSVAVVGPLHIPQNIKFSSAPVPPNALSSSPAPNIQTGRPLVLSSRATPVQLPSPPCTSSPVVPSHPPVQQVKELNPDEASPQVNTSADQNTLPSSQSTTMVSPLLTNSPGSSGNRRSPVSSSKGKGKVDKIGQILLTKACKKVTGSLEKGEEQYGADGETEGQGLDTTAPGLMGTEQLSTELDSKTPTPPAPTLLKMTSSPVGPGTASAGPSLPGGALPTSVRSIVTTLVPSELISAVPTTKSNHGGIASESLAGGLVEEKVGSHPELLPSIAPSQNLVSKETSTTALQASVARPELEVNAAIVSGQSSEPKEIVEKSKIPGRRNSRTEEPTVASESVENGHRKRSSRPASASSSTKDITSAVQSKRRKSK

SEQ ID NO: 2265 - DNA, 5048 bp, Homo sapiens
agcggctatgagaagggaacggggccagactcagcccgacagcgggattagagccctccagaatacccatcatatagcccctgaggtggcatggtgatgtctccatgagggaaccccttcccactcatcctgtcacgtatatcatagtgttcttgactgggccattcatctaagatgggatttaccctgtgaaacagggagaagacttatggaccccaagcatcatttcgagttgtagttgagtttttaaaagacatacatgcaaagttcctttgctttggaccctctgcattattaaagctgctgtattgctaacccagaactgctccagtgtcttgactgatcatcatggcttcagtttggaagagactgcagcgtgtgggaaaacatgcatccaagttccagtttgtggcctcctaccaggagctcatggttgagtgtacgaagaaatggcaaccagataaactggtggtagtttggaccagaagaagccgaaggaagtcttctaaggcacatagctggcaacctggaataaaaaatccctatcgtggtgttgttgtgtggcctgttcctgaaaacattgaaatcactgtaacactttttaaggatcctcatgcggaagaatttgaagacaaagagtggacatttgtcatagaaaatgaatccccttctggtcgaaggagagctcttgctactagcagcatcaatatgaaacagtatgcaagccctatgccaactcagactgatgtcaagttaaaattcaagccattatctaaaaaagttgtatctgccgctcttcagttttcattatcttgcatttttctgagggaaggaaaagccacagatgaagacatgcaaagtttggctagtttgatgagtatgaagcaggctgacattggcaatttagatgacttcgaagaagataatgaagatgatgatgagaacagagtgaaccaagaagaaaaggcagctaaaattacaggaattgtaaaccagttgaatgctctgagcagcttagatgaagatcaagatgactgcataaagcaagcaaatatgcgttcagctaaatcagccagttcctctgaagagcttatcaacaaacttaactttttggttgaagcagaaaaggacttggccaccgtgaattcaaatccatttgatgatcctgatgctgcagaattaaatccatttggagatcctgactcagaagaacctatcactgaaacagcttcacctagaaaaacagaagactctttttataataacagctataatccctttaaagaggtgcagactccacagtatttgaacccattcgatgagccagaagcatttgtgaccataaaggattctcctccccagtctacaaaaggaaaaaatataagacctgtggatatgagcaagtacctctatgctgatagttctaaaactgaagaagaagaattggatgaatcaaatcctttttatgaacctaaatcaactcctcctccaaataatttggtaaatcctgttcaagaactagaaactgaaaggcgagtgaaaagaaaggccccggctccaccagtcctctcaccaaaaacaggagtattaaatgaaaacacagtttctgcaggaaaagatctctctacttctcctaagccaagccctataccaagtcctgttttggggcgaaagccaaatgctagtcagtctttgcttgtatggtgtaaagaagttacaaagaactaccgaggagtaaaaatcaccaattttactacatcgtggagaaatggtttatctttttgtgcaatattacaccactttagaccagatttaattgactacaagtctctgaatcctcaagatattaaagagaacaacaaaaaggcatacgatggatttgccagcataggaatttcccgattattggaaccttctgatatggtattattagcaattcctgataaactgactgttatgacttatctctatcaaataagggcacatttcagtggccaagaactaaatgtcgttcagatagaggaaaacagcagtaaaagcacatataaagttggaaactatgaaacagatacaaacagttctgttgatcaagaaaaattctatgcagagcttagtgatctgaagcgggagcctgaactacaacagcctatcagcggagcagtagacttcttatcacaggatgactctgtatttgtaaatgatagcggggttggagagtcagaaagtgagcatcaaactcctgatgatcaccttagtccaagcacagcctccccttactgtcgcaggactaaaagtgacacagaaccccagaagtctcagcagagctctggaaggacttcaggatctgatgaccctggaatatgttccaatacagattcaacccaagcacaggttttgttaggcaaaaagagactattgaaagctgagactttagaattgagtgacttatatgttagtgataagaagaaggatatgtctccaccctttatttgtgaggagacagatgaacaaaagcttcaaactctagacatcggtagtaacttggagaaagaaaaattagagaattccagatccttagaatgcagatcagatccagaatctcctatcaaaaaaacaagtttatctcctacttctaaacttggatactcatatagtagagatctagaccttgctaagaaaaaacatgcttccctgaggcagacggagtctgatccagatgctgatagaaccactttaaatcatgcagatcattcatcaaaaatagtccagcatcgattgttatctagacaagaagaacttaaggaaagagcaagagttctgcttgagcaagcaagaagagatgcagccttaaaggcggggaataagcacaataccaacacagccaccccattctgcaacaggcagctaagtgatcagcaagatgaagagcgacgtcggcagctgagagagagagctcgtcagctaatagcagaagctcgatctggagtgaagatgtcagaacttcccagctatggtgaaatggctgcagaaaagttgaaagaaaggtcaaaggcatctggagatgaaaatgataatattgagatagatactaacgaggagatccctgaaggctttgttgtaggaggtggagatgaacttactaacttagaaaatgaccttgatactcccgaacaaaacagtaagttggtggacttgaagctgaagaagctcctagaagttcagccacaggtggcaaattcaccctccagtgctgcccagaaagctgtaactgagagctcagagcaggacatgaaaagtggcacagaagatctccggactgaacgattacaaaaaacaacagaacgttttagaaatcctgttgtgttcagcaaagattctacagtcagaaaaactcaacttcagtctttcagccaatatattgagaatagaccagagatgaaaaggcagagatcaatacaggaagatacaaagaaaggaaatgaggagaaggcagcgataactgaaactcagaggaagccatcagaagatgaagtgcttaataaagggttcaaagacaccagtcagtatgtagtaggagaattggcagcactagagaatgagcaaaagcaaattgacacccgtgccgcgctggtggagaagcgccttcgctatctcatggacacaggaaggaacacagaagaagaagaagctatgatgcaggaatggtttatgttagttaataagaaaaatgccttaataaggagaatgaatcagctctctcttctggaaaaagaacatgatttagaacgacggtatgagctgctgaaccgggaattgagggcaatgctagccattgaagactggcagaagaccgaggcccagaagcgacgcgaacagcttctgctagatgagctggtggccctggtgaacaagcgcgatgcgctcgtcagggacctggacgcgcaggagaagcaggccgaagaagaagatgagcatttggagcgaactctggagcaaaacaaaggcaagatggccaagaaagaggagaaatgtgttcttcagtagccatcagatcagaaagaatctctcccaacattttagagtcttgcttcccaaaccagaaaaagtcagactcattgttgatttaaaacttttaacattttgtttggctggattgtactactttacctctactttaccaccaccacccttttcctccctcctttccaaataatatacagaactccaaaatagcttcatttaaggatttttttgtgagttaacaatttccttgaaatcctgtgagatagatttgcacagacaccttgtgagtgattggtattggaggtgttcaagaaactgttcgaaaaagaacaaaaacacttccctcgttattttctctcattttttgatgagaggaaaatttgaaacattattcttgttgttgttggtaatagcataatgacagtgggaggggtacaaggggataagaaaaatgtcatgatttttttccggtcctgccacatgtaacacttactctgttacctaaattttatagttagatcatatccaatctacttattaaactgtgttctatttaccagtggagattttctgcagtggttgcgtttcactgtaaggataatggagttcctctcctctgctttcctcagaggatggtcctttaacatagccagaaacaagccctgtggtttgaaggtgagctgtgaggatgggactaattgatatgcaccagtttacaaagacagtcttaacatccgagaatacaccatctttttctctggataattatttcttacatcatgcttgattcctacattttgttgggtctcaacattggctcacgaatgctgttaatatttattctgtattgataaaaagtcagtcttgccactacaagtaaatcccccatttaatattttcttctttagcatagcactgtcattttttgtgaaaatggttatgtttatttattacaatactgagtcatatataaattttcaataaaagcagaaactttcttaccttaaaaaaaaaaaaaaaaaaaa

SEQ ID NO: 2266 - protein, 1231 aa, Homo sapiens
MASVWKRLQRVGKHASKFQFVASYQELMVECTKKWQPDKLVVVWTRRSRRKSSKAHSWQPGIKNPYRGVVVWPVPENIEITVTLFKDPHAEEFEDKEWTFVIENESPSGRRRALATSSINMKQYASPMPTQTDVKLKFKPLSKKVVSAALQFSLSCIFLREGKATDEDMQSLASLMSMKQADIGNLDDFEEDNEDDDENRVNQEEKAAKITGIVNQLNALSSLDEDQDDCIKQANMRSAKSASSSEELINKLNFLVEAEKDLATVNSNPFDDPDAAELNPFGDPDSEEPITETASPRKTEDSFYNNSYNPFKEVQTPQYLNPFDEPEAFVTIKDSPPQSTKGKNIRPVDMSKYLYADSSKTEEEELDESNPFYEPKSTPPPNNLVNPVQELETERRVKRKAPAPPVLSPKTGVLNENTVSAGKDLSTSPKPSPIPSPVLGRKPNASQSLLVWCKEVTKNYRGVKITNFTTSWRNGLSFCAILHHFRPDLIDYKSLNPQDIKENNKKAYDGFASIGISRLLEPSDMVLLAIPDKLTVMTYLYQIRAHFSGQELNVVQIEENSSKSTYKVGNYETDTNSSVDQEKFYAELSDLKREPELQQPISGAVDFLSQDDSVFVNDSGVGESESEHQTPDDHLSPSTASPYCRRTKSDTEPQKSQQSSGRTSGSDDPGICSNTDSTQAQVLLGKKRLLKAETLELSDLYVSDKKKDMSPPFICEETDEQKLQTLDIGSNLEKEKLENSRSLECRSDPESPIKKTSLSPTSKLGYSYSRDLDLAKKKHASLRQTESDPDADRTTLNHADHSSKIVQHRLLSRQEELKERARVLLEQARRDAALKAGNKHNTNTATPFCNRQLSDQQDEERRRQLRERARQLIAEARSGVKMSELPSYGEMAAEKLKERSKASGDENDNIEIDTNEEIPEGFVVGGGDELTNLENDLDTPEQNSKLVDLKLKKLLEVQPQVANSPSSAAQKAVTESSEQDMKSGTEDLRTERLQKTTERFRNPVVFSKDSTVRKTQLQSFSQYIENRPEMKRQRSIQEDTKKGNEEKAAITETQRKPSEDEVLNKGFKDTSQYVVGELAALENEQKQIDTRAALVEKRLRYLMDTGRNTEEEEAMMQEWFMLVNKKNALIRRMNQLSLLEKEHDLERRYELLNRELRAMLAIEDWQKTEAQKRREQLLLDELVALVNKRDALVRDLDAQEKQAEEEDEHLERTLEQNKGKMAKKEEKCVLQ

SEQ ID NO: 2267 - DNA, 1690 bp, Homo sapiens
gggggcgacggccgctgtgacgctgcggcggcggcgggcgggcggcggcgcgtgagacgcgcgatccccggtgtcttgggagcagtgccccggcccccgccgctcccgccgccgccatgtcgggccggtcggtccgggcggagacccgcagccgggccaaggacgacatcaagaaggtgatggcggccatcgagaaagtgcggaaatgggagaagaagtgggtgactgtgggtgacacgtccctgaggatatttaagtgggttcctgtgacagacagcaaggagaaagaaaagtcaaaatcgaacagttcagcagcccgagaacctaatggctttccttctgatgcctcagccaattcctctctccttcttgaattccaggacgaaaacagcaaccagagttccgtgtctgacgtctatcagcttaaggtggacagcagcaccaactcaagccccagcccccagcagagtgagtccctgagcccagcacacacctccgacttccgcacggatgactcccagcccccaacgctgggccaggagatcctggaggagccctccctgccctcctcggaagttgctgatgaacctcctaccctcaccaaggaagaaccagttccactagagacacaggtcgttgaggaagaggaagactcaggtgccccgcccctgaagcgcttctgtgtggaccaacccacagtgccgcagacggcgtcagaaagctagcaccatcccggccctccgcctcctggccctgcctctatttattgcattctggttctggccgcgccgcgttgctggggtaagggcaagcactggggtcaagagcctgcacacatgagccttccgggctggaaggctggcgtaggacttggggctgtagcatcatcttcctgaccctggcacctgtgtctacttgctcccgagaagaggagcgctcatgtcttttttgcaccccaagttggctggagcatcggccaccccaagattcatctgtgacctccaggcagcagtctctgctccagaatctctggacggagctgctggcagcttctgcgagaagagagagatgtggaaggcaccttctagaagagagcgtgcctcaggttacttgaacttgaacggagactgtagactcccggactttcccctaggactgggggccctgtaggctgctgttggaggactgggtagagacattggagggaagggaagggcttttctccacacaagggcagagagtccgtctagatttcttgctgtcctgccagctctgcccatgcctgaggtggtcctacctctcacgggcaccctagctgctgacagccctttgtggccgccgtccccatcccctgccctcagcacacacatctgcacacacgcagctttgttctcacctctacctgtcattccagcatccctgcctcttgtcacaaactgccccagcaagaatttgaggttctgacaacagtacccatcccccacagtaccccttcagctcagtttctagaaagctcccttttctttgaaatctgcatgttgaattgaactttgtgattttattttttgtttcaaaaaagtttaagaaaatggaaatgggcaacagtgagtgaagacatattttagcactgaatagaatatttttaaaattaaactgtttgaaatatgaaaaaaaaaaaaaaaaaaaaaaa

SEQ ID NO: 2268 - protein, 202 aa, Homo sapiens
MSGRSVRAETRSRAKDDIKKVMAAIEKVRKWEKKWVTVGDTSLRIFKWVPVTDSKEKEKSKSNSSAAREPNGFPSDASANSSLLLEFQDENSNQSSVSDVYQLKVDSSTNSSPSPQQSESLSPAHTSDFRTDDSQPPTLGQEILEEPSLPSSEVADEPPTLTKEEPVPLETQVVEEEEDSGAPPLKRFCVDQPTVPQTRSES

SEQ ID NO: 2269 - DNA, 1187 bp, Homo sapiens
gggggcgacggccgctgtgacgctgcggcggcggcgggcgggcggcggcgcgtgagacgcgcgatccccggtgtcttgggagcagtgccccggcccccgccgctcccgccgccgccatgtcgggccggtcggtccgggcggagacccgcagccgggccaaggacgacatcaagaaggtgatggcggccatcgagaaagtgcggaaatgggagaagaagtgggtgactgtgggtgacacgtccctgaggatatttaagtgggttcctgtgacagacagcaaggagaaagaaaagtcaaaatcgaacagttcagcagcccgagaacctaatggctttccttctgatgcctcagccaattcctctctccttcttgaattccaggacgaaaacagcaaccagagttccgtgtctgacgtctatcagcttaaggtggacagcagcaccaactcaagccccagcccccagcagagtgagtccctgagcccagcacacacctccgacttccgcacggatgactcccagcccccaacgctgggccaggagatcctggaggagccctccctgccctcctcggaagttgctgatgaacctcctaccctcaccttctagaagagagcgtgcctcaggttacttgaacttgaacggagactgtagactcccggactttcccctaggactgggggccctgtaggctgctgttggaggactgggtagagacattggagggaagggaagggcttttctccacacaagggcagagagtccgtctagatttcttcctgtcctgccagctctgcccatgcctgaggtggtcctacctctcacgggcaccctagctgctgacagccctttgtggccgccgtccccatcccctgccctcagcacacacatctgcacacacgcagctttgttctcacctctacctgtcattccagcatccctgcctcttgtcacaaactgccccagcaagaatttgaggttctgacaacagtacccatcccccacagtaccccttcagctcagtttctagaaagctcccttttctttgaaatctgcatgttgaattgaactttgtgattttattttttgtttcaaaaaagtttaagaaaatggaaatgggcaacagtgagtgaagacatattttagcactgaatagaatatttttaaaattaaactatttgaaatatg

SEQ ID NO: 2270 - protein, 163 aa, Homo sapiens
MSGRSVRAETRSRAKDDIKKVMAAIEKVRKWEKKWVTVGDTSLRIFKWVPVTDSKEKEKSKSNSSAAREPNGFPSDASANSSLLLEFQDENSNQSSVSDVYQLKVDSSTNSSPSPQQSESLSPAHTSDFRTDDSQPPTLGQEILEEPSLPSSEVADEPPTLTF

SEQ ID NO: 2271 - DNA, 5350 bp, Homo sapiens
tttattgaacatttattctgttcaaaacattcccaaaggcaacagaagatacaaataaatctctgcccatgaaaaggtgtggggggcattagaaggcgttctcttcggtgtaatgaagtaatgagagaagaaaaagtagtttgaagctatggagtaagggactttgagtatcccaggctcaaaaagttgggacttgaacagtacgggggtgctgctgaaaacgtttgagggaggtaatgacatgatcgaagctatacttgagaaaggtgaatctgataaagtatgagtgaaaaagagactgaaggtctagaaattagattgaggctaatgacaaaatccacataaataggaggacttgaacgaaggggcacttagaagaggacaggagatagtaaaaggcattcaatgatgagagcacacactacaggggagcatgagggaggttggaaaagataatgaaaggattaccgagcttcactgacgatgtgtttgaaatgagcaggaatcttgtagtgatcctaatccgtggttttctggagcatttcacagcctaggaacatacaaggggggcatctccctggaatgtaaattgactaagaggaattcaataatggtcaaatgaatgcagaattttagagtcttgcttagtattctcaccacatttcgtttagtctactcatactctttttctcttactgctgacactagatggaaaaactcttaattaaaagtatttcacaaaatgtgctcgttttcagtcattccgtttccactccagcctgttgtgttgtttttttgaaataataatttaaagtaattttccttttgcaggatggcatagtcaatccaacaataagaaaagatttgaaaactggaccgaaattctactgctgtccaattgaaggctgccccagaggccctgagagaccgttttctcagttttctctcgtaaaacagcactttatgaaaatgcatgctgagaagaagcacaaatgtagtaagtgcagcaattcgtacggtacagaatgggacctgaaaagacatgcagaggactgtggcaagaccttccggtgcacatgcggctgtccctacgccagtagaacagcactgcagtctcacatctaccgaactgggcacgagatacctgcagaacacagggacccacctagtaagaaaaggaaaatggaaaactgtgcacaaaaccagaagttatccaacaagaccattgaatcattgaacaaccaaccaatccctagaccagacactcaagaactagaagcttcagaaataaagctagaaccatcttttgaagactcttgtggctctaacactgacaagcagactcttacaacaccaccgagatatcctcagaagttgcttttaccaaagcccaaagtggctttggttaaactacccgtgatgcagttttctgtcatgcctgtctttgtgcctacagccgactcctcagcccagcctgtggtgttaggtgttgatcagggctctgccacaggggctgtgcacttaatgcccttgtcagtaggaaccctgatcctcggcctagattcagaggcttgctctcttaaggagagcctacctcttttcaaaattgctaatcctattgctggtgagccaataagtactggtgttcaagtgaactttggtaaaagtccatctaatcctttacaagaactagggaacacgtgtcaaaagaatagcatttcttcaatcaacgtgcagacagatctgtcttatgcctcacaaaactttataccttctgcacagtgggccactgctgattcctctgtgtcgtcttgttctcaaactgatttgtcgtttgattctcaagtgtctcttcccattagtgttcacactcagacatttttgcccagctctaaggtaacttcatctatagctgctcagactgatgcatttatggacacctgtttccagtcaggtggggtctccagagaaactcaaaccagtgggatagaaagtccaacggatgaccatgtacagatggaccaagctggaatgtgcggagacatttttgagagtgttcattcatcatataatgttgctacaggtaacattataagcaacagtttagtagcagagacagtaactcatagtttgttacctcagaatgagcctaagactttaaatcaagatattgagaaatctgcaccaattataaatttcagtgcacagaatagtatgcttccttcacagaacatgacagataatcagacccaaaccatagatttattaagtgatttggaaaacatcttgtcaagtaatctgcctgcccagacattggatcatcgtagtcttttgtctgacacaaatcctggacctgacacccagctcccatctggcccagcccagaaccccggaatcgattttgatatcgaagagttcttttcggcctcaaatatccagactcaaactgaagagagtgaacttagcaccatgaccaccgagccagtcttggagtcactggacatagagactcaaacggacttcttactcgcagatacctctgctcagtcctatgggtgtaggggaaattctaacttcttaggccttgagatgtttgacacacagacacagacagacttaaactttttcttagacagtagccctcatctgcctctgggaagtattctgaaacactccagcttttccgtgagtactgattcatctgacacagagacccaaactgaaggagtctccactgctaaaaatatacctgctctagaaagcaaagttcagttgaacagtacagaaacacagaccatgagttctgggtttgaaaccctggggagcttgttcttcaccagcaacgaaactcagacagcaatggatgactttcttctggctgatctggcctggaacacgatggagtctcagttcagctctgtagaaacccagacttctgcggaaccacacacagtctccaacttctaaaactaacggtggagtccatgtgtgaaatggcatctaccatttcctctggattaaaactacggactggggacaacagtattaattcgattgaatgtggctgatgatgcagttgcttagcttctttgtgtttctttgccttttgtacttgtaaacagaaatttgcgtataaatgtgagtgtattataaagtttgagatgttgatctaaattgtttttgtgttgcctacatttgccttttcacagctagtcttttcatgttaaaaaaaaaatgtatttcatatctataaaacctatatagccatttagctgaagcccagcttaccaggttcaagggtacaaacttctcaaatcttcaaaacattttagtcaaagtgtaatatacttaaactgcacctaaaatatctttggcactgcttgttagaaattcctgattcctgttactaatcactaaagaaaccggatgctgccaccgtaggatttaagcagtagtgcttccatgctcttaagactcctgctgcctggaccttcgtcagctttgacacctcttttctgatttaaagacaccaaggaaaactacaactgtctttagctttgaagcagttttcatgtaatcattgccacctcttcgctacatgaactactattgataccagcatacaagtgtatagcactttacacacaagaggtttattgatgtaaaattatcggctagggaagcagcagcgggccaggtgtggtggcttacccctgtaatcccagcactttgggaggccaaagcaggacgatcacttgagcccaggagttcaacaccagcttgggcaacataagaagaccgtgtctctggaattttttttttttttaattagccaggcacagtggcatgcgcctgtgatcccagctacttggaaggctgaggtgagaggatcactcgaggagattggggctgccatgagccatggtcttggcactgtactccaacctgggtaacagggcaagaccctatctcaaaaaaaaaaaaaaaagtcgccagcaacaagcacgtagtgtagtgttcctgctaaatgagcataggttatccaaaccttgggaacagggagttatggaaacgtgcctatgacttcatcttggggtgtgtcctatgaagatcctttctggtctccacagtaggccagagttgggggctctggagctgtttccccaagtgcatccacaagctggatctgagttttgtcactctaaaattaaacaagaaaaaaagtgggaaaagggcatcccccattaggtttcaatactttgcacttctactaagcttgatagggcaggagtgcaatctacaattattttaaagtgaatttccttccattcaccattctttatcttttctttgaataagaaaaagtatctagcaaggatattacttgtgccttgaggctagcaattataggatagattcatctaaaatatggtattctgcattttggttttttttcttaagtgaataataccagtcttcaaagaaaacaaggtgaagacctattgcttcaataatcaagaatgctttgtgtgttttgaggtaggagcatgatcaagtatgctttggggattttctgtatttaggagatcctggattcttaattgttggctaagttccagtcaagtaggaatcagtgcagcctgtaagttctccacattgacacacacacacacacacacacacacacacacacacgacatgctcctttctgtggcacatgcctgtattactgaaagctaaatcctcaaaacctagtaaggggaccaatgattcattaaagtaaattgatggttttgctactaattcctatcccatacatttgacacaaaagaagtgttggtaatggataaataacatatcccgggcagatgagctcaacctagtaggtaagagtttggtttggtcacagttgcctatgagtgtgggtttcaaaagaaacataaagccttaacttagaatttcattatgttttagaatcatcactgccttaatattcaagcatctatttaagtcctaataaaggagaaatgcatgtttatggcttttttgtaaatataaatgcagtgatctatggcttaaaaaatttgtttctgtgacaatgtttgtaaatctagccaatagagtcatttacagaagaaaaatgagcatgtaataatacaagaactgtttccccctcaaaacctgaacctgaattatttgtaaaaactgaaatttaatgattaaagagaagccagaattgtacccttttttgtgaattcttgaacgtactcataaatatgacttattgtattgccttaagttttcactcattgtcttttgaaagccatatgataaaatgattttatttaat

SEQ ID NO: 2272 - protein, 667 aa, Homo sapiens
MKMHAEKKHKCSKCSNSYGTEWDLKRHAEDCGKTFRCTCGCPYASRTALQSHIYRTGHEIPAEHRDPPSKKRKMENCAQNQKLSNKTIESLNNQPIPRPDTQELEASEIKLEPSFEDSCGSNTDKQTLTTPPRYPQKLLLPKPKVALVKLPVMQFSVMPVFVPTADSSAQPVVLGVDQGSATGAVHLMPLSVGTLILGLDSEACSLKESLPLFKIANPIAGEPISTGVQVNFGKSPSNPLQELGNTCQKNSISSINVQTDLSYASQNFIPSAQWATADSSVSSCSQTDLSFDSQVSLPISVHTQTFLPSSKVTSSIAAQTDAFMDTCFQSGGVSRETQTSGIESPTDDHVQMDQAGMCGDIFESVHSSYNVATGNIISNSLVAETVTHSLLPQNEPKTLNQDIEKSAPIINFSAQNSMLPSQNMTDNQTQTIDLLSDLENILSSNLPAQTLDHRSLLSDTNPGPDTQLPSGPAQNPGIDFDIEEFFSASNIQTQTEESELSTMTTEPVLESLDIETQTDFLLADTSAQSYGCRGNSNFLGLEMFDTQTQTDLNFFLDSSPHLPLGSILKHSSFSVSTDSSDTETQTEGVSTAKNIPALESKVQLNSTETQTMSSGFETLGSLFFTSNETQTAMDDFLLADLAWNTMESQFSSVETQTSAEPHTVSNF

SEQ ID NO: 2273 - DNA, 2875 bp, Homo sapiens
gaaatgctttcggtaggcactccacggctgtgaagatggcggcggctgcgtggcttcaggtgttgcctgtcattcttctgcttctgggagctcacccgtcaccactgtcgtttttcagtgcgggaccggcaaccgtagctgctgccgaccggtccaaatggcacattccgataccgtcggggaaaaattattttagttttggaaagatcctcttcagaaataccactatcttcctgaagtttgatggagaaccttgtgacctgtctttgaatataacctggtatctgaaaagcgctgattgttacaatgaaatctataacttcaaggcagaagaagtagagttgtatttggaaaaacttaaggaaaaaagaggcttgtctgggaaatatcaaacatcatcaaaattgttccagaactgcagtgaactctttaaaacacagaccttttctggagattttatgcatcgactgcctcttttaggagaaaaacaggaggctaaggagaatggaacaaaccttacctttattggagacaaaaccgcaatgcatgaaccattgcaaacttggcaagatgcaccatacatttttattgtacatattggcatttcatcctcaaaggaatcatcaaaagaaaattcactgagtaatctttttaccatgactgttgaagtgaagggtccctatgaatacctcacacttgaagactatcccttgatgatttttttcatggtgatgtgtattgtatatgtcctgtttggtgttctgtggctggcatggtctgcctgctactggagagatctcctgagaattcagttttggattggtgctgtcatcttcctgggaatgcttgagaaagctgtcttctatgcggaatttcagaatatccgatacaaaggagaatctgtccagggtgctttgatccttgcagagctgctttcagcagtgaaacgctcactggctcgaaccctggtcatcatagtcagtctgggatatggcatcgtcaagccacgccttggagtcactcttcataaggttgtagtagcaggagccctctatcttttgttctctggcatggaaggggtcctcagagttactggggcccagactgatcttgcttccttggcctttatccccttggctttcctagacactgccttgtgctggtggatatttattagcctgactcaaacaatgaagctattaaaacttcggaggaacattgtaaaactctctttgtatcggcatttcaccaacacgcttattttggcagtggcagcatccattgtgtttatcatctggacaaccatgaagttcagaatagtgacatgtcagtcggactggcgggagctgtgggtagacgatgccatctggcgcttgctgttctccatgatcctctttgtcatcatggttctctggcgaccatctgcaaacaaccagaggtttgccttttcaccattgtctgaggaagaggaggaggatgaacaaaaggagcctatgctgaaagaaagctttgaaggaatgaaaatgagaagtaccaaacaagaacccaatggaaatagtaaagttaacaaagcacaggaagatgatttgaagtgggtagaagagaatgttccttcttctgtgacagatgtagcacttccagcccttctggattcagatgaggaacgaatgatcacacactttgaaaggtccaaaatggagtaaggaatgggaagatttgcagttaaagatggctaccatcagggaagagatcagcatctgtgtcagtcttctgtacggctccatgggattaaaggaagcaatgacatcctgatctgttccttgatctttgggcattggagttggcgagaggtgtcagaacaaagagaacatcttactgaaaacaagttcataagatgagaaaaatctacgagcttcttatttacaacactgctgccccctttcctcccagactctgacatggatgttcatgcaacttaagtgtgttgttcctgaactttctgtaatgtttcattttttaaatctgacaaactaaaaagtttaacgtcttctaaaagattgtcatcaacaccataatatgtaatctccaggagcaactgcctgtaatttttatttatttagggagttacataggtgatgggggaaattgttaactacctttcattttcctgggaagtcaaggttacatcttgcagaggttgttttgagaaaaaagggcccttctgagttaaggagccatagttctatcaatgatcaaaagaaaaaaaaaaaaaagagaaactgttgcagtatgattcagatcatttaaaaaagcaaaatcaagtgcaattttgtttacaaatggtgtatattaaagatttttctatttcagatgtactttaaagagaaatattagcttaactcttttgacatctgctattgtgacacatcccattgctggcaatgtggtgcacactccgaaacttttaactactgttttgtaagcctccaagggtggcattgcagggtccttaggcaatgttttgtttgcctttatgcagagaggtgctccaagtgctgtgattgagcaccgtgctagaggaactgtaatgcttcagaagttgtagcttatacaaaggaaacaggtcctgctggcttaatttaaacagttattgcatgaagtagcgtggaggccctggactgctgctcgttctttaggatggactgttctggtatctggtattggtttagagactgttaataagggacatcacaaggtgatgggattcatttgaagcactctatttctgttttaatgttttatccaattttgccttcccaagatttttgttctacataaaaagttcatgccactttttaatataaaaaaatttaac

SEQ ID NO: 2274 - protein, 555 aa, Homo sapiens
MAAAAWLQVLPVILLLLGAHPSPLSFFSAGPATVAAADRSKWHIPIPSGKNYFSFGKILFRNTTIFLKFDGEPCDLSLNITWYLKSADCYNEIYNFKAEEVELYLEKLKEKRGLSGKYQTSSKLFQNCSELFKTQTFSGDFMHRLPLLGEKQEAKENGTNLTFIGDKTAMHEPLQTWQDAPYIFIVHIGISSSKESSKENSLSNLFTMTVEVKGPYEYLTLEDYPLMIFFMVMCIVYVLFGVLWLAWSACYWRDLLRIQFWIGAVIFLGMLEKAVFYAEFQNIRYKGESVQGALILAELLSAVKRSLARTLVIIVSLGYGIVKPRLGVTLHKVVVAGALYLLFSGMEGVLRVTGAQTDLASLAFIPLAFLDTALCWWIFISLTQTMKLLKLRRNIVKLSLYRHFTNTLILAVAASIVFIIWTTMKFRIVTCQSDWRELWVDDAIWRLLFSMILFVIMVLWRPSANNQRFAFSPLSEEEEEDEQKEPMLKESFEGMKMRSTKQEPNGNSKVNKAQEDDLKWVEENVPSSVTDVALPALLDSDEERMITHFERSKME

SEQ ID NO: 2275 - DNA, 4613 bp, Homo sapiens
atgaagatggcggacgcgaagcagaagcggaacgagcagctgaaacgctggatcggctccgagacggacctcgagcctccggtggtgaagcgccagaagaccaaggtgaagttcgacgatggcgccgtcttcctggctgcttgctccagcggcgacacggacgaggtcctcaagctgctgcaccgcggcgccgacatcaattacgccaatgtggacggactcactgccctgcaccaggcttgcattgatgacaatgttgatatggtgaagtttctggtagaaaatggagcaaatattaatcaacctgataatgaaggctggataccactacatgcagcagcttcctgtggatatcttgatattgcagagtttttgattggtcaaggagcacatgtaggggctgtcaacagtgaaggagatacacctttagatattgcggaggaggaggcaatggaagagctacttcaaaatgaagttaatcggcaaggggttgatatagaagcagctcgaaaggaagaagaacggatcatgcttagagatgccaggcagtggctaaatagtggtcatataaatgatgtccggcatgcaaaatctggaggtacagcacttcacgttgcagctgctaaaggctatacggaagttttaaaacttttaatacaggcaggctatgatgttaatattaaagactatgatggctggacacctcttcatgctgcagctcattggggtaaagaagaagcatgtcgaattttagtggacaatctgtgtgatatggagatggtcaacaaagtgggccaaacagcctttgatgtagcagatgaagacattttaggatatttagaagagttgcaaaagaaacaaaatctgctccatagtgaaaaacgggacaagaaatctccactaattgaatcaacagcaaatatggacaataatcagtcacagaagacctttaaaaacaaagagacgttgattattgaaccagagaaaaatgcatcccgtattgaatctctggaacaagaaaaggttgatgaagaagaagaaggaaagaaggatgagtctagctgctctagtgaagaagatgaggaagatgactcggaatcagaagctgaaacagataagacaaaacccctggcttctgtaactaatgccaacacttctagtacacaagcagctcctgtagctgttacaacacctactgtgtcatcaggtcaagcaacacctacatcacctattaaaaagtttccaaccacagctacaaaaatttctcccaaagaagaagagagaaaagatgagtctcctgcaacttggaggttaggacttagaaagacgggcagctatggtgcacttgctgaaatcacagcatctaaagagggtcagaaagaaaaagatactgcaggtgttacacgttcagcttcaagtcccagactttcctcctctttggataataaagaaaaggagaaagatagtaaaggaactaggcttgcatatgttgcacctacaataccaagacgactagccagtacatctgacattgaagagaaagaaaacagagattcttcaagtttgcgaacaagtagttcatatacaaggagaaaatgggaagatgatcttaaaaaaaatagctcagttaatgaaggatcaacgtatcataaaagttgctcctttggtagaagacaagatgatttgattagttctagtgttccaagcaccacatcaacaccaacagttacctctgcagctgggcttcagaaaagcctgctttccagcacaagcactactacaaagattacaacgggttcttcctcagcaggcacacaaagcagtacctcaaatcgtttgtgggctgaggatagtactgagaaagaaaaggacagtgttcctacggcagtgaccattcctgttgctccaactgttgtaaatgctgcagcttctaccacaaccctgactacaactactgctggcactgtctcctccacaacagaggtcagggagagacgcagatcatacctcactcctgttagggatgaagagtctgaatcccaaagaaaagcaagatctagacaagcaagacaatctagaagatcaacacagggagtgacattaactgatcttcaagaagctgagaaaacaataggaagaagtcgttctacccgaaccagagaacaagaaaatgaagaaaaagaaaaagaggaaaaagagaaacaagataaagagaaacaagaagaaaagaaggagtcagaaacatctagagaagatgaatataaacaaaagtactccagaacgtatgatgagacttaccagcgttataggccagtatcaacttcaagttcaaccactccatcctcttcactttctactatgagcagttcactgtatgcttcaagtcaactaaacaggccaaatagtcttgtaggcataacttctgcttactccagaggaataacaaaagaaaatgaaagagagggagaaaaaagagaagaggagaaagaaggagaagataaatcacaacctaaatcaatcagagaacgacgacgaccaagagagaaaagaagatctacaggagtttcattttggacacaagatagtgatgaaaatgaacaagaacaacaatcagacacagaagagggatccaataagaaagaaactcagacggattccatttctagatatgaaaccagttctacatcagctggtgatcgatatgattccttgctgggtcgctctggatcatacagttacttagaagaaagaaaaccttacagcagcaggctagaaaaggatgactcaactgactttaaaaagctttatgaacaaattctagctgaaaatgaaaagctgaaggcacagctacatgatacaaatatggaactaacagatcttaaattacagttggaaaaggccacccagagacaagaaagatttgctgatagatcactgttggaaatggaaaaaagggaacgaagagctctagaaagaagaatatctgaaatggaagaagagctcaaaatgttaccagacctaaaagcagacaaccagaggctaaaggatgaaaatggggccttgatcagagttataagcaaactttccaaataaaaaaaaaaaagcagcaagtaatggaattgcacatattagtaacccagtggaccataattggcagtcactggaagtctgggaagaatccttggagactgtcattttcggatatcctgccaaatgccctcttatctagaatttttgtttcattttgtttaattttctggggtgtttttgttgttgttggtttgttttttgtttttttttttaatcaagaccattgtttcatgttaatgcagctgctgagaagatttttttttaatgactgagaaaacttgtttacagctccagcatataaggaaagtgttcaaggccagatatgcctcagatatttaaccagtaagccttagttgtacataaatacttttgtgtcaacaaaaactttcagctctcacagaagacagttactcaacattttttgatgtgccacagtttcgagtttttcgatatttaaattttttggcttttcatctaagtttgggtttgtattttttccttctaaactcttcatgtggcagagtcttctatgttttcacggctttttcattacagaaaagaacacttgctcttctgtgattattgtcatgtattaggctaatgctgtgttgtctcccacctggaactgaattgcttggtggaacatatgctttcactgtttgtgcaatatgcatttatttcttatatgaatgctttaaagtcatttgaggttagatcttttaattcctattttctgcttcattggtcactttttttttattgtagtataagatgttagattctgtaatcttcacattcattttagcaggtactgagtgatgctgtatatacaaataagtgtattgttttgatttttagaccaccacatggcatgcttgactatttcttatttcaaatgtctgctaatgcagagtaggctactccatgatagtgttaaaaaacaaaatttgctaacaatgtgatataaagactttaaaagttacacattatgtggagccctatctttacaaaagtttcctactgtaaagtgcttttattttcagttttcatttgatagtactcaaccataattaaagttgcataagataattgctttacatttcacatacctatatttatctgagtgctgtctaaaactgttgtgctagccaaagtaatgctatgaaatcatttgcagaattaacccgtgagttaatgttaaatgcactgttattgccatgtgaagaggcatcgactttgataccaccatcatgttcagaccattttatacatttcagtggcctttttttttttaaggaaaaaaaagcgcaaaaccaagtacatagtgacgatggcttttatttggacaaatagcttttatattttcattaaaccatgcaaaaaatactacatctttctggcacataactgtctccttaaccactggaacagttcagccatttgaataaattgtacattgtaaagcttatagtagctgattgtattattgattgtattgtatactatattaaatgtgaatttgt

SEQ ID NO: 2276 - protein, 1030 aa, Homo sapiens
MKMADAKQKRNEQLKRWIGSETDLEPPVVKRQKTKVKFDDGAVFLAACSSGDTDEVLKLLHRGADINYANVDGLTALHQACIDDNVDMVKFLVENGANINQPDNEGWIPLHAAASCGYLDIAEFLIGQGAHVGAVNSEGDTPLDIAEEEAMEELLQNEVNRQGVDIEAARKEEERIMLRDARQWLNSGHINDVRHAKSGGTALHVAAAKGYTEVLKLLIQAGYDVNIKDYDGWTPLHAAAHWGKEEACRILVDNLCDMEMVNKVGQTAFDVADEDILGYLEELQKKQNLLHSEKRDKKSPLIESTANMDNNQSQKTFKNKETLIIEPEKNASRIESLEQEKVDEEEEGKKDESSCSSEEDEEDDSESEAETDKTKPLASVTNANTSSTQAAPVAVTTPTVSSGQATPTSPIKKFPTTATKISPKEEERKDESPATWRLGLRKTGSYGALAEITASKEGQKEKDTAGVTRSASSPRLSSSLDNKEKEKDSKGTRLAYVAPTIPRRLASTSDIEEKENRDSSSLRTSSSYTRRKWEDDLKKNSSVNEGSTYHKSCSFGRRQDDLISSSVPSTTSTPTVTSAAGLQKSLLSSTSTTTKITTGSSSAGTQSSTSNRLWAEDSTEKEKDSVPTAVTIPVAPTVVNAAASTTTLTTTTAGTVSSTTEVRERRRSYLTPVRDEESESQRKARSRQARQSRRSTQGVTLTDLQEAEKTIGRSRSTRTREQENEEKEKEEKEKQDKEKQEEKKESETSREDEYKQKYSRTYDETYQRYRPVSTSSSTTPSSSLSTMSSSLYASSQLNRPNSLVGITSAYSRGITKENEREGEKREEEKEGEDKSQPKSIRERRRPREKRRSTGVSFWTQDSDENEQEQQSDTEEGSNKKETQTDSISRYETSSTSAGDRYDSLLGRSGSYSYLEERKPYSSRLEKDDSTDFKKLYEQILAENEKLKAQLHDTNMELTDLKLQLEKATQRQERFADRSLLEMEKRERRALERRISEMEEELKMLPDLKADNQRLKDENGALIRVISKLSK

SEQ ID NO: 2277 - DNA, 3233 bp, Homo sapiens
ccgcgcgtgctcccgcccctcgccgccgctcgctcgctcgccggccggcggcctccgctcggccccctccctcagctccggtgcgcggcggccgacgacccgcgcggcctgggcctcggcccgcgccaccggcgcccgcgcggagcggcccgggggccctcacgcaggcccatggcggcggccgcggcggcgctctcgggcgcgggcacgccacccgcgggcggcggggccgggggcggcggggccgggggcggcgggtccccgccgggcggctgggccgtggcgcgcctggagggccgcgagttcgagtatctgatgaagaagcgctcggtgaccatcggccgcaactcgtcgcagggctcggtggacgtgagcatgggccactcgagcttcatctcccggcgccacctcgagatcttcacgcccccgggcggcggcggccatggcggggccgctccggagctgccgcccgcgcagcccaggcccgacgccggcggcgacttctacctgcgctgcttgggcaagaacggggtattcgtggacggcgtgttccagaggcgcggggcgccgccgctgcagctgccgcgcgtgtgcacattcaggttcccgagcacaaacatcaagataacgttcactgccctgtccagcgagaagagagagaagcaggaggcgtctgagtctccagtgaaggccgtacagccacacatctcgcccctgaccatcaacattccagacaccatggcccacctcatcagccctctgccctcccccacgggaaccatcagcgctgcaaactcctgcccctccagcccccggggagcggggtcttcagggtacaaggtgggccgagtgatgccatctgacctcaatttaatggctgacaactcacagcctgaaaatgaaaaggaagcttcaggtggagacagcccgaaggatgattcaaagccgccttactcctacgcgcagctgatagttcaggcgattacgatggctcccgacaaacagctcaccctgaacgggatttatacacacatcactaaaaattatccctactacaggactgcggacaagggctggcagaattcaattcgccacaatctctctctgaatcgttatttcatcaaagtgccgcgttcccaggaagaaccaggcaaaggctcgttctggaggatagacccagcctctgaaagcaaattaatagaacaggcttttaggaaacgacggcctaggggcgtgccctgctttagaacccctctgggaccgctctcttctaggagtgccccagcctctcccaatcacgcgggagtgctgtctgctcactctagtggcgcccagacccctgagagcctgtcgagggaaggttcgccggcccccctggagcctgagcctggcgctgcacagcccaaactcgctgtcatccaggaagcccggtttgcccagagcgccccagggtcacctctgtccagtcagccagtcttaatcaccgtccagcggcagctaccacaggccatcaagcctgtcacctacactgtggccaccccagtgaccacctcgacctcccagccacccgtcgtgcagacggttcacgtcgtccaccagatcccagcggtgtcggtcaccagtgtggccggactggccccagcgaacacgtacactgtctctggacaagctgtggtcaccccggcagccgtgctggcccctcctaaggcagaggcccaggagaatggagaccacagggaagtcaaagtgaaagtagagcctattcccgccattggccacgccacgctcggcactgccagccggatcattcagacggcacagaccaccccggtccagacggtgaccatagtacaacaggcacctctaggtcaacaccagctaccaataaaaactgtaacacaaaacggcactcacgtggcatcagtccccactgcggtccacggccaggtgaacaatgccgcggcgagtcctttgcacatgttggcaacacacgcatccgcatcggcctccctgcccacaaagcgccacaacggtgaccagccggagcagccggagctgaagcggatcaagacagaagacggcgagggcatcgtcattgccctgagcgtggacacgccaccggcagccgtaagggaaaagggtgtccagaactagcgaccgggagagcttttctttaacgatatcaactctgtggtgccaaaaggagacgcggcctcccgccagcactcgggggtgcagggccctgtggttggacttcacctctcagcactgaaaacccaaaacccagctggccttaacactccttaaagacagaagtcacacttgaacaaaacccacacacaacaaaacctgatttgggagacggtgtctccactgagcacctgctgggctgagcttctacctacgagtgaaactctgtcctcccgcgaggaccaggcatcgctgtgtgaggacggcacggccagcgcctgctgtgagtgggtctcccaagactaggcctcaggacgcggggggagccatccccgccgccctcacaggacccaccaggcagcggagacatgtggaattagagtattttgaggtgtcctttctttacaaaataatggggtcttgggcatttcacatcactccatttctactgagactttcagaatcacacaggccctttccgtggatttcatttggggcaaagaaacaacgtagttttgtttttgttttcagcctatggaatgatttccttttgtctgtcttgttcaagttcagacgaagctactctggcatctgcacatttccgtgttacagcagctgcctgatgaattttatccacctccatttcagcatgtggctcgcgtggacaggtggacggacgctgtggccgcatggaaccttgagaacccagggacgagccagtgccgggaaggaactgccgggactcaccgagctgcacttaactgttctctttctggctattttttgttgtttgtttctttgtgttgactttgtccctggcaaaattttccactctgagtaaaacaagtctcctaagtattgtgtatgtttaaaacgacagaaccatttctacttcatttggaaaaagattcagtcttttatcacaggcccttttgaaactcagatcccaggtctctccgtggtatgtttgtatttggggtgtccctccggctctaggcggcctctgacctgctgtctactccccaccttcggtgagcggccgc

SEQ ID NO: 2278 - protein, 655 aa, Homo sapiens [sequence omitted]

SEQ ID NO: 2279 - DNA, 5770 bp, Homo sapiens
ataaagagtgctgaacagttaactacatttttgaaacatgtggtttctgtttttaagcagtcaagctcagaaggaattcatctggaacatcatcttagtgaagttgctctgcaaacagcactttcctgttcttctcgacactatgctgggagatcctttcagattttcagggccctaaagcagcctctcactgcaactacactttctgatgttctctccagacttgtagaaactgtaggggatccaggagaagatgcacagggatttgtgattgagcttcttctcacattggaatctgcaattgatactttggctgaaaccatgaagcattatgatcttctttctgccctttctcaaacctcatatcatgatcctataatgggaaacaagtatgcagctaacaggaaaagcactggacaactcaatctaagcacaagtcccattaatagtagcagttatttgggatataacagtaatgcaagaagtaactctttgagattaagtttgattggtgaccgacgaggtgaccggcggcggagtaacacactggatataatggatggacggataaaccatagcagtagtttagcaaggactagaagcctttcctctctaagagagaaaggaatgtatgacgtgcagtccactactgagcctaccaacttgatggccaccattttttggatagcagcatctttattagaatcagattatgaatatgaatacctcctggctctcaggcttctcaacaaactgcttatccatttgcctttggataaatcagagagtcgagagaagattgaaaatgtacaaagcaaattgaaatggactaattttccaggacttcagcagctcttccttaagggttttacctcagcatctacacaagaaatgaccgtgcacctcctcagtaaactcatttctgtctccaaacatacattggtggatccttcccaattgtcaggctttcctcttaacatcctttgcttattgcctcacttaatccagcattttgacagcccaactcagttttgcaaagaaacagctagtcgaatagcaaaggtttgtgcagaagaaaaatgcccaacacttgtcaatctggcacacatgatgagtttgtacagtacacacacgtattccagagactgttctaactggatcaatgtcgtgtgcagatacctgcatgactccttctcagatacaacatttaatcttgtgacttatcttgcagagctgttagagaaaggattgtccagtatgcagcaatcattactacagattatttatagtctattgagtcatattgacctgtctgcagccccagccaagcagtttaatctggagatcataaagattattggcaaatatgtacagagtccttactggaaggaagcccttaacatattaaagctggtggtgtcacgctctgcgagtcttgtcgtacccagtgatatccccaagacctatggaggagatacaggttctcctgaaatatccttcactaaaatttttaataatgtttctaaggagttgcctgggaagaccttagattttcattttgatatatctgagacaccaattattggaaacaaatatggtgatcagcacagtgcggctggaagaaatgggaaaccaaaagttattgctgtcactagaagtacttcctcaacttcttctggttctaattctaatgccttggttcctgttagttggaaaaggccacagttatcacagcgaagaacaagagaaaagctaatgaatgtgctttctctctgtggtccagaatctggcctcccaaagaacccatcagttgtattttcttctaatgaggatttggaagtcggtgaccaacagactagcctaatttctacaacagaagacataaatcaagaggaagaagtagctgtggaagataatagcagtgaacaacagtttggtgtttttaaggattttgactttttagatgttgaattggaagatgcagagggtgaaagtatggacaatttcaactggggagttcgcaggcgctcactggacagtattgacaaaggggacactccatccctccaggagtaccagtgctctagtagcacccccagcctgaacctcaccaatcaggaggatacagatgagtcctcggaagaagaagcggcacttacagcaagccagatactctcacgcacacagatgttaaacagtgattctgccactgatgaaacaataccagaccatcctgacttacttctccagtctgaagattccactggcagcatcacaacagaggaagtgcttcaaatcagggatgagaccccaactttggaggcttctctagataatgctaacagccggctgcctgaggatacaacttcagtattaaaggaggaacatgttacaacctttgaagatgaaggatcctatataattcaagaacagcaggaatctcttgtgtgtcaaggaattcttgatttagaagaaactgaaatgccagagcctctagctcctgaaagttaccccgagtcagtctgtgaagaggatgttaccttagctctgaaagagctagatgaaagatgtgaagaagaagaagcggatttctccggactgtctagtcaagatgaagaagagcaagatggttttccagaagtacagacgtcgcctctgccgtcaccatttctttctgccatcatagccgcctttcagcccgtggcatatgatgatgaagaggaagcctggcgctgccacgtcaatcagatgctgtctgacaccgacgggtcctctgcagtgtttacttttcatgtgttttctaggctgtttcagacaattcaaagaaagtttggagaaataactaatgaggcagtcagctttcttggtgatagtctgcaacgcattggtaccaaatttaaaagttccttggaagtgatgatgctgtgttcagaatgcccaacagtctttgtggatgctgaaacactgatgtcatgtggtttgctggaaacactcaagtttggtgttttggagttgcaagaacacctggatacatacaatgtgaaaagagaagccgctgagcagtggctagatgattgtaagaggacatttggtgccaaagaagacatgtataggataaacacagatgcacaacaaatggaaatactagcagaattggagctctgccgaagattatacaaattgcattttcaattgctgcttctgttccaggcctactgtaaacttatcaaccaagtaaatacgataaaaaatgaagcagaggtcatcaacatgtcagaggaacttgcccaactggaaagtatcctcaaagaagctgagtccgcttccgaaaacgaagaaattgacatttccaaagctgcacaaactactatagaaactgccattcattctttaattgaaactttgaaaaataaagaatttatatcagctgtagcacaagtcaaagctttcagatctctctggcccagtgatatctttggcagttgtgaagatgaccctgtacagacactgttacatatatatttccatcatcagacgctgggccagacaggaagctttgcagttataggctctaacctggacatgtcagaagccaactacaaactgatggaacttaatctggaaataagagagtctctacgcatggtgcaatcataccaacttctagcacaggccaaaccaatgggaaatatggtgagcactggattctgagacacttcaggcctttaggaaagaaactaaactgaagatgatgaagaatattaaccaagcaccttttatggacccttgcattcactgataactttctggcagcatctactttttagtgtaactaatgtcaaactgtatcatcaaaaacaaagatctgaaagaaaaaaacatctgatattttaacagctgccaatatctcccacaataactgcgtgaagaaggaattttttaattacttaacctacgtgaaaagaaaagggctaaaagtgatgcctacaaatacattactttctggggaaagaaaagaattccaagaatgtttgcaataatggcctccaatactgaaacaaccaaaagcaggtgaaatgaggctgaaatcaaggctgtttcattttagctgaagacctgcaaagctgcttggatttctagcagttgaaaacctaacctgcaattgatgcttaatcatccatccacatgaacatgcagtcagctatacgcatcaagactcgtttgcaaaaaccattgatttttcagtatgtgggataagggtttgggtttttttgttttttggtctgtataaggaattatgtgtgtgtgagttgggatgtatggatatgtgatagtcatattttcaaggtatggatgtttggtgataacgtctcagagcatgcctaaaagagcactgcaagattatttttgaagaaatgttattttattagatctaactcttcatagtatgtaaatgttagaacattttaataatattttaaaactgggctttcccagtatttcaaaaagaaataatatatctgttaacgttattggaatgctgctcagttctctgatcagtgcttatgttatgattgttgataactaaccaaagtagatgcctgcagagactttaaaatgtaaaataaagatgtatgctgcctgtcagctattctcattagaaaagttttaacttattttactccatatagaaactgtagagactaaaaccagttattttcttgtacatttgtgccatgcactgttgttatacaagaataggtgtacaaagctaaagaaaaattgtggtcattgatgatggaatatatgacttgcaggctttgaagtctgcagaattcaagaaaagagctgcaaatgcatttttgtatctttattcaggactcacatgctttaccctaaagaaacctggggctaggggaaatgaaaggaagcctgaagactgactaccaaaacatgcaatatacttattcactgtctaagtctgtagtataacatgaactggagtctctatccttttctaaaatcgcattttgtaagaaaagaaagaaaaaaaaaaaaaaagaatgtagtcccacaactcctgatttgaaagaaacaccttgtattttttatatacatctcttatccactgtgacttttcttttaaactgggctctgtgattccagagtttagaatgtagaaatgaaatgcttagctttaccttttcttggggggtgtggaccctgccagaaatgtaattacgtatgctcaagtgcattaattgaaggcactgtgcacaccattggactgctgaccacagttaaacatttccagtaaaatttcgtaactggtcacagctcattcataatcactgtattttttgaccctgataaagacaattattttgatggtgttctggtactgtaattggtatcctttaaattatttaaaacttttgggtgtggggcaggcagagagggatggtgtccagagatacatcacactttacatcctatcttactgtcctctgtttttcttaccctccttacatcctttttgttaaaaataaaaagcattgtagctgttggtttgtgttgtattttaacaaagaatgaatgattacagtgtgcatcatttagaaacctttcaaatgttaccttcttgaattgccctagaaaagaacaaaattagttgactacccaaccaaacctttcagttgatatttgctttttgtgtttatttatatgtaactaagtctattaatataataaaaatgaatatacctgcagc

SEQ ID NO: 2280 - protein, 1236 aa, Homo sapiens
IKSAEQLTTFLKHVVSVFKQSSSEGIHLEHHLSEVALQTALSCSSRHYAGRSFQIFRALKQPLTATTLSDVLSRLVETVGDPGEDAQGFVIELLLTLESAIDTLAETMKHYDLLSALSQTSYHDPIMGNKYAANRKSTGQLNLSTSPINSSSYLGYNSNARSNSLRLSLIGDRRGDRRRSNTLDIMDGRINHSSSLARTRSLSSLREKGMYDVQSTTEPTNLMATIFWIAASLLESDYEYEYLLALRLLNKLLIHLPLDKSESREKIENVQSKLKWTNFPGLQQLFLKGFTSASTQEMTVHLLSKLISVSKHTLVDPSQLSGFPLNILCLLPHLIQHFDSPTQFCKETASRIAKVCAEEKCPTLVNLAHMMSLYSTHTYSRDCSNWINVVCRYLHDSFSDTTFNLVTYLAELLEKGLSSMQQSLLQIIYSLLSHIDLSAAPAKQFNLEIIKIIGKYVQSPYWKEALNILKLVVSRSASLVVPSDIPKTYGGDTGSPEISFTKIFNNVSKELPGKTLDFHFDISETPIIGNKYGDQHSAAGRNGKPKVIAVTRSTSSTSSGSNSNALVPVSWKRPQLSQRRTREKLMNVLSLCGPESGLPKNPSVVFSSNEDLEVGDQQTSLISTTEDINQEEEVAVEDNSSEQQFGVFKDFDFLDVELEDAEGESMDNFNWGVRRRSLDSIDKGDTPSLQEYQCSSSTPSLNLTNQEDTDESSEEEAALTASQILSRTQMLNSDSATDETIPDHPDLLLQSEDSTGSITTEEVLQIRDETPTLEASLDNANSRLPEDTTSVLKEEHVTTFEDEGSYIIQEQQESLVCQGILDLEETEMPEPLAPESYPESVCEEDVTLALKELDERCEEEEADFSGLSSQDEEEQDGFPEVQTSPLPSPFLSAIIAAFQPVAYDDEEEAWRCHVNQMLSDTDGSSAVFTFHVFSRLFQTIQRKFGEITNEAVSFLGDSLQRIGTKFKSSLEVMMLCSECPTVFVDAETLMSCGLLETLKFGVLELQEHLDTYNVKREAAEQWLDDCKRTFGAKEDMYRINTDAQQMEILAELELCRRLYKLHFQLLLLFQAYCKLINQVNTIKNEAEVINMSEELAQLESILKEAESASENEEIDISKAAQTTIETAIHSLIETLKNKEFISAVAQVKAFRSLWPSDIFGSCEDDPVQTLLHIYFHHQTLGQTGSFAVIGSNLDMSEANYKLMELNLEIRESLRMVQSYQLLAQAKPMGNMVSTGF

SEQ ID NO: 2281 - DNA, 3241 bp, Homo sapiens
ggcgccgaagccccgctccccgcctgcgcgtctgtctcgtccgcatctccgcggcctcctgctccacgacgtgaccatggccgggctgcaggagctgcgattccctgaggagaagccgctgctccggggccaggacgccactgagctggagagctccgatgccttcctcttggctgcagacacagactggaaggaacatgacatcgagacaccctacggccttctgcatgtagtgatccggggctcccccaaggggaaccgcccagccatcctcacctaccatgatgtgggcctcaaccacaaactatgcttcaacaccttcttcaacttcgaggacatgcaggagatcaccaagcactttgtggtgtgtcacgtggatgcccctggacaacaggtgggggcgtcgcagtttcctcaggggtaccagttcccctccatggagcagctggctgccatgctccccagcgtggtgcagcatttcgggttcaagtatgtgattggcatcggagtgggcgccggagcctatgtgctggccaagtttgcactcatcttccccgacctggtggaggggctggtgctggtgaacatcgaccccaatggcaaaggctggatagactgggctgccaccaagctctccggcctaactagcactttacccgacacggtgctctcccacctcttcagccaggaggagctggtgaacaacacagagttggtgcagagctaccggcagcagattgggaacgtggtgaaccaggccaacctgcagctcttctggaacatgtacaacagccgcagagacctggacattaaccggcctggaacggtgcccaatgccaagacgctccgctgccccgtgatgctggtggttggggataatgcacccgctgaggacggggtggtggagtgcaactccaaactggacccgaccactacaaccttcctgaagatggcagactctggagggctgccccaggtcacacagccagggaagctgactgaagccttcaaatacttcctgcaaggcatgggctacatgccctcagccagcatgacccgcctggcacgctcccgcactgcatccctcaccagtgccagctcggtggatggcagccgcccacaggcctgcacccactcggagagcagcgaggggctgggccaggtcaaccacaccatggaggtgtcctgttgaagcccttgatcccgctgacgacgcccacgtcgaggccccaccgccatccttgcgccggctcatgttccctttagtttatttttgtgagggcaaaggggaggaaatggggttctgtttgaaaaaaatgaggggatcttagatgctgcagcagaacagtctccaggtgttttaaggggctcagtcctcctcatcccatctcactctccgtggtaacttagccaacttgacccctctcatcccactcccggcggcccaggcacagaagggcagggccatagggagggagattcgctacggatccaggtcattcctgggtgagcccttgggcaggcatgtttggagatgagagaggcttcgagagggtgggtgctgggccacaggggtgcggggccagctcaggcactggcgtgggagccctgggagaccccttcccccaccctccaccaagcacacctgtttctgtctcatagcacatgtgacaatcatctggacaacagccacaagggggcgctcggaccaggcagccactttcctggtgctctctgggcccagctggtgctgtagggccacgcaggcaggggcgtcaaggggtttctctgcccaaggaagacagaacatggagaaccgtcagggcaggaaccccacagactgtcccttccagcccacactctgccacctcctggccctgtcccaattctgagccaaggcctccccgaggcagaagttgcctggtcctctgtccccacagtgacctgactgggggtgagggagaaggaggagagagcccatgtgtggtgtgtgtgcccctgagaactttgtggtgactgcctttgggagcccgcaggtggccagaggcaggggtagctgagttcctggagaccccttttttgcccccaggttccccagagggcaacgccatcagtagcagtgtggtgtttcaggcagagctctggccaggctgtgccagtgtgtcccggacgcatcactaaggaagagagagtttatttagtcaactggcccaaggcagcgaggcttctacagtcccacaccccatagccgcctgggctggggcttactgggggctgaaggttctggacatgaacaagggtcaggtagaagagaaaggcttcccctacaccccagcctcctgctgtcccctgaagcccaggactgcgttgtatgctttccatccacttcaccttaccccatagcatcttgcggcccagaaaccagagccatttgtctcagaccctaaatcaataatcacaaaccccaaaacgggagagagcagtgaaaacatgcagggctgtggacgggggaagggttgtggcgggtgttctgaggctgagaggacacctatatgcgtatttcctctacacacatcaccccccttctataatcttaagccatgactagcctggtggcgtgttagtttctgcccagttctaccccctcatgtgcttcttctgaatactgaatgtgactgtttgaaagctggtagaattcatccctcttactgtagataacactgcaaatcttggaattttgttttttgctgtttccagatgtatctataaatatctatacattatatgtgtgtgtgtgtgtgtgtgtgtgtgtgtgtgtgtacatcgggtcctcccatgtgtggtgttcttctggaggttgtctctttggtcaaggtgaacttttaatgtttattattttcttctccgcacaaagtaaagagcctaattttgtgtattctggtggctgctgtcatgagatgataaaatgtaaaacaaaactctagtcaacgtagaaagagttaactgtgctgaaaaactaataaagaacctaagaagaattccagtgtggtgatgccatgcccatcatgggaggcttttggagaaacagaatgtttgggcaggggctgctggtgctgcttgggttttgggttgagggtgctaggagaggatggtctccacccatctttctatttccagtacacgtcacattattttaccggtgagatgagaatgtcacaaacattaaaagccttatgtgctc

SEQ ID NO: 2282 - protein, 371 aa, Homo sapiens
MAGLQELRFPEEKPLLRGQDATELESSDAFLLAADTDWKEHDIETPYGLLHVVIRGSPKGNRPAILTYHDVGLNHKLCFNTFFNFEDMQEITKHFVVCHVDAPGQQVGASQFPQGYQFPSMEQLAAMLPSVVQHFGFKYVIGIGVGAGAYVLAKFALIFPDLVEGLVLVNIDPNGKGWIDWAATKLSGLTSTLPDTVLSHLFSQEELVNNTELVQSYRQQIGNVVNQANLQLFWNMYNSRRDLDINRPGTVPNAKTLRCPVMLVVGDNAPAEDGVVECNSKLDPTTTTFLKMADSGGLPQVTQPGKLTEAFKYFLQGMGYMPSASMTRLARSRTASLTSASSVDGSRPQACTHSESSEGLGQVNHTMEVSC

SEQ ID NO: 2283 - DNA, 3173 bp, Homo sapiens
gcctcctgctccacgacgtgaccatggccgggctgcaggagctgcgattccctgaggagaagccgctgctccggggccaggacgccaccgagctggagagctccgatgccttcctcttggctgcagacacagactggaaggaacatgacatcgagacaccctacggccttctgcatgtagtgatccggggctcccccaaggggaaccgcccagccatcctcacctaccatgatgtgggcctcaaccacaaactatgcttcaacaccttcttcaacttcgaggacatgcaggagatcaccaagcactttgtggtgtgtcacgtggatgcccctggacaacaggtgggggcgtcgcagtttcctcaggggtaccagttcccctccatggagcagctggctgccatgctccccagcgtggtgcagcatttcgggttcaagtatgtgattggcatcggagtgggcgccggagcctatgtgctggccaagtttgcactcatcttccccgacctggtggaggggctggtgctggtgaacatcgaccccaatggcaaaggctggatagactgggctgccaccaagctctccggcctaactagcactttacccgacacggtgctctcccacctcttcagccaggaggagctggtgaacaacacagagttggtgcagagctaccggcagcagattgggaacgtggtgaaccaggccaacctgcagctcttctggaacatgtacaacagccgcagagacctggacattaaccggcctggaacggtgcccaatgccaagacgctccgctgccccgtgatgctggtggttggggataatgcacccgctgaggacggggtggtggagtgcaactccaaactggacccgaccactacgaccttcctgaagatggcagactctggagggctgccccaggtcacacagccagggaagctgactgaagccttcaaatacttcctgcaaggcatgggctacatgccctcagccagcatgacccgcctggcacgctcccgcactgcatccctcaccagtgccagctcggtggatggcagccgcccacaggcctgcacccactcagagagcagcgaggggctgggccaggtcaaccacaccatggaggtgtcctgttgaagcccttgatcccgctgacgacgcccacgtcgaggccccaccgccatccttgcgccggctcatgttccctttagtttatttttgtgagggcaaaggggaggaaatggggttctgtttgaaaaaaatgaggggatcttagatgctgcagcagaacagtctccaggtgttttaaggggctcagtcctcctcatcccatctcactctccgtggtaacttagccaacttgacccctctcatcccactcccggcggcccaggcacagaagggcagggccatagggagggagattcgctacggatccaggccattcctgggtgagcccttgggcaggcatgtttggagatgagagaggcttcgagagggtgggtgctgggccacaggggtgcggggccagctcaggcactggcgtgggagccctgggagaccccttcccccaccctccaccaagcacacctgtttctgtctcatagcacatgtgacaatcatctggacaacagccacaagggggcgctcggaccaggcagccactttcctggtgctctctgggcccagctggtgctgtagggccacgcaggcaggggcgtcaaggggtttctctgcccaaggaagacagaacatggagaaccgtcagggcaggaaccccacagactgtcccttccagcccacactctgccacctcctggccctgtcccaattctgagccaaggcctccccgaggcagaagttgcctggtcctctgtccccacagtgacctgactgggggtgagggagaaggaggagagagcccatgtgtggtgtgtgtgcccctgagaacttcgtggtgactgcctttgggagcccgcaggtggccagaggcaggggtagctgagttcctggagaccccttttttgcccccaggttccccagagggcaacgccatcagtagcagtgtggtgtttcaggcagagctctggccaggctgtgccagtgtgtcccggacgcatcactaaggaagagagagtttatttagtcaactggcccaaggcagcgaggcttctacagtcccacaccccatagccgcctgggctggggcttactgggggctgaaggttctggacatgaacaagggtcaggtagaagagaaaggcttcccctacaccccagcctcctgctgtcccctgaagcccaggactgcgttgtatgctttccatccactcaccttaccccatagcatcttgcggcccagaaaccagagccatttgtctcagaccctaaatcaataatcacaaaccccaaaacgggagagagcagtgaaaacatgcagggctgtggacgggggaagggttgtggcgggtgttctgaagctgagaggacacctatatgcgtatttcctctacacacatcaccccccttctataatcttaagccatgactagcctggtggcgtgttagtttctgcccagttctaccccctcatgtgcttcttctgaatactgaatgtgactgtttgaaagctggtagaattcatccctcttactgtagataacactgcaaatcttggaattttgttttttgctgtttccagatgtatctataaatatctatacattatatgtgtgtgtgtgtgtgtgtgtacatcgggtcctcccatgtgtggtgttcttctggaggttgtctctttggtcaaggtgaacttttaatgtttattattttcttctccgcacaaagtaaagagcctaattttgtgtattctggtggctgctgtcatgagatgataaaatgtaaaacaaaactctagtcaacgtagaaagagttaactgtgctgaaaaactaataaagaacctaagaagaattccagtgtggtgatgccatgcccatcatgggaggcttttggagaaacagaatgtttgggcaggggctgctggtgctgcttgggttttgggttgagggtgctaggagaggatggtctccacccatctttctatttccagtacacgtcacattattttaccggtgagatgagaatgtcacaaacattaaaagccttatgtgctc

SEQ ID NO: 2284 - DNA, 1337 bp, Homo sapiens
ctggcgtcccctttccggccggtccccatggaggcgctggggaagctgaagcagttcgatgcctaccccaagactttggaggacttccgggtcaagacctgcgggggcgccaccgtgaccattgtcagtggccttctcatgctgctactgttcctgtccgagctgcagtattacctcaccacggaggtgcatcctgagctctacgtggacaagtcgcggggagataaactgaagatcaacatcgatgtactttttccgcacatgccttgtgcctatctgagtattgatgccatggatgtggccggagaacagcagctggatgtggaacacaacctgttcaagcaacgactagataaagatggcatccccgtgagctcagaggctgagcggcatgagcttgggaaagtcgaggtgacggtgtttgaccctgactccctggaccctgatcgctgtgagagctgctatggtgctgaggcagaagatatcaagtgctgtaacacctgtgaagatgtgcgggaggcatatcgccgtagaggctgggccttcaagaacccagatactattgagcagtgccggcgagagggcttcagccagaagatgcaggagcagaagaatgaaggctgccaggtgtatggcttcttggaagtcaataaggtggccggaaacttccactttgcccctgggaagagcttccagcagtcccatgtgcacgtccatgacttgcagagctttggccttgacaacatcaacatgacccactacatccagcacctgtcatttggggaggactatccaggcattgtgaaccccctggaccacaccaatgtcactgcgccccaagcctccatgatgttccagtactttgtgaaggtggtgcccactgtgtacatgaaggtggacggagaggtactgaggacaaatcagttctctgtgaccagacatgagaaggttgccaatgggctgttgggcgaccaaggccttcccggagtcttcgtcctctatgagctctcgcccatgatggtgaagctgacggagaagcacaggtccttcacccacttcctgacaggtgtgtgcgccatcattgggggcatgttcacagtggctggactcatcgattcgctcatctaccactcagcacgagccatccagaagaaaattgatctagggaagacaacgtagtcaccctcggtgcttcctctgtctcctctttctccctggcctgtggttgtcccccagcctctgccaccctccacctcctcggtcagccccagccccaggttgataaatctattgattgattgtgatagtaaaaaaaaaaaaaaaaaaaaaaaaaaaaa

SEQ ID NO: 2285 - protein, 383 aa, Homo sapiens
MEALGKLKQFDAYPKTLEDFRVKTCGGATVTIVSGLLMLLLFLSELQYYLTTEVHPELYVDKSRGDKLKINIDVLFPHMPCAYLSIDAMDVAGEQQLDVEHNLFKQRLDKDGIPVSSEAERHELGKVEVTVFDPDSLDPDRCESCYGAEAEDIKCCNTCEDVREAYRRRGWAFKNPDTIEQCRREGFSQKMQEQKNEGCQVYGFLEVNKVAGNFHFAPGKSFQQSHVHVHDLQSFGLDNINMTHYIQHLSFGEDYPGIVNPLDHTNVTAPQASMMFQYFVKVVPTVYMKVDGEVLRTNQFSVTRHEKVANGLLGDQGLPGVFVLYELSPMMVKLTEKHRSFTHFLTGVCAIIGGMFTVAGLIDSLIYHSARAIQKKIDLGKTT

SEQ ID NO: 2286 - DNA, 828 bp, Homo sapiens
atgtggagagctggcagcatgtcggccgagctgggagtcgggtgcgcattgcgggcggtgaacgagcgcgtgcagcaggctgtggcgcggcggccgcgggatctcccagccatccagccccggctagtggcggtcagcaaaaccaaacctgcagacatggtgatcgaggcctatggacatgggcagcgcacttttggcgagaactacgttcaggaactgctagaaaaagcatcaaatcccaaaattctgtctttgtgtcctgagatcaaatggcacttcattggccacctacagaaacaaaatgtcaacaaattgatggctgtccccaatctcttcatgctggaaacagtggattctgtgaagttggcagacaaagtgaacagttcctggcagagaaaaggttctcctgaaaggttaaaggttatggtccagattaacaccagcggagaagagagtaaacatggccttccaccttcagagaccatagccatcgtggagcacataaacgccaagtgtcctaacctggagtttgtggggctgatgaccataggaagctttgggcatgatcttagtcaaggaccaaatccagacttccagctgttattgtccctccgggaggagctgtgtaaaaagctgaacatccctgctgaccaggttgagctgagcatgggcatgtccgcggatttccagcatgcggttgaagtaggatctacaaatgtccgaataggaagcacgatttttggagagcgggattactcaaagaaacccaccccggacaagtgcgcagcagacgtgaaggccccgctggaggtggcacaggagcactga

SEQ ID NO: 2287 - protein, 275 aa, Homo sapiens
MWRAGSMSAELGVGCALRAVNERVQQAVARRPRDLPAIQPRLVAVSKTKPADMVIEAYGHGQRTFGENYVQELLEKASNPKILSLCPEIKWHFIGHLQKQNVNKLMAVPNLFMLETVDSVKLADKVNSSWQRKGSPERLKVMVQINTSGEESKHGLPPSETIAIVEHINAKCPNLEFVGLMTIGSFGHDLSQGPNPDFQLLLSLREELCKKLNIPADQVELSMGMSADFQHAVEVGSTNVRIGSTIFGERDYSKKPTPDKCAADVKAPLEVAQEH

SEQ ID NO: 2288 - DNA, 983 bp, Homo sapiens
cgcaggggtcccccggccgccgcgatgcagaaatacgagaaactggaaaagattggggaaggcacctacggaactgtgttcaaggccaaaaaccgggagactcatgagatcgtggctctgaaacgggtgaggctggatgacgatgatgagggtgtgccgagttccgccctccgggagatctgcctactcaaggagctgaagcacaagaacatcgtcaggcttcatgacgtcctgcacagcgacaagaagctgactttggtttttgaattctgtgaccaggacctgaagaagtattttgacagttgcaatggtgacctcgatcctgagattgtaaagtcattcctcttccagctactaaaagggctgggattctgtcatagccgcaatgtgctacacagggacctgaagccccagaacctgctaataaacaggaatggggagctgaaattggctgattttggcctggctcgagcctttgggattcccgtccgctgttactcagctgaggtggtcacactgtggtaccgcccaccggatgtcctctttggggccaagctgtactccacgtccatcgacatgtggtcagccggctgcatctttgcagagctggccaatgctgggcggcctctttttcccggcaatgatgtcgatgaccagttgaagaggatcttccgactgctggggacgcccaccgaggagcagtggccctctatgaccaagctgccagactataagccctatccgatgtacccggccacaacatccctggtgaacgtcgtgcccaaactcaatgccacagggagggatctgctgcagaaccttctgaagtgtaaccctgtccagcgtatctcagcagaagaggccctgcagcacccctacttctccgacttctgtccgccctaggccccgggacccccgcctccaggctgggcctggcctatttaagccccctcttgagagggtgagacagtgggggtgcctgg

SEQ ID NO: 2289 - protein, 292 aa, Homo sapiens
MQKYEKLEKIGEGTYGTVFKAKNRETHEIVALKRVRLDDDDEGVPSSALREICLLKELKHKNIVRLHDVLHSDKKLTLVFEFCDQDLKKYFDSCNGDLDPEIVKSFLFQLLKGLGFCHSRNVLHRDLKPQNLLINRNGELKLADFGLARAFGIPVRCYSAEVVTLWYRPPDVLFGAKLYSTSIDMWSAGCIFAELANAGRPLFPGNDVDDQLKRIFRLLGTPTEEQWPSMTKLPDYKPYPMYPATTSLVNVVPKLNATGRDLLQNLLKCNPVQRISAEEALQHPYFSDFCPP

SEQ ID NO: 2290 - DNA, 1215 bp, Homo sapiens
ggggggacttgagtatcctttgttaccctcaggagatcctgaaaccagtcccccatggatactgagggctgactgtatagtcctatcctcacggaactttcattctaatgggggaagactgactataaacaaaatatatgtaataggtggtggtaagtaccgtggagaagtaacaaatggggcaaagtgagttatacagctccattcttagaaaccttggagtacttttcttagtttatactcgtggtggtttccttttgtctcctttattacatgggactctgacatgtgcccatagctagggtgacagtaggatctacccgatagtagggtggcagtaggatctacccaaaaagcgtcctgctgatacaggaccaaagcatcctgttgttctcgagcctataaaaagagctaatggtgttgcttctcttaactgtggcctcctacactgtgttttggatgattggtgatgtcttggatattctgtttctttggaactttgaatatacaacactttactagggaattagcaatggaagcagagcaaagatgtacagaggaaacaatgcgtaactctgatggaattgaagtcatgaggcagcagagagcttaaattacagctttaaaaatttttattttttagagggaatttacttgggagtaacagcagtaatagttaacggagccagaatgcttgagtcatataattgcaaagcagagttgggagcaacagatgctaaagagtagttgctgtagttcctctttgggtcgtaggagcagttgtcatattactatatagctactgcatgaagaagagttcttagtgaggcctgggtgatcagctcttcttagtattctgtgtgaccccatttgaccttttaacaaatccctaagtaaataaatagcccctcaggaaaactaagtttttctctgctgtttttttgcttgagagagctataactgtaatagacttatatttctgaacattttagtgcttgccaatatttggtaatatttatgtttcctatatttgtaatgaacattcttcttccggtacattttttgttaaattattgtttgatggataaaagttcaccttttattgtataaaattgactgagattaatttatacacattgacaatgggtaaatagaatttttcagattattaaaagctgaaggatgcccacgtaagcaaaaaaaaaaaaaaaaaaa

SEQ ID NO: 2291 - DNA, 2727 bp, Homo sapiens
cctgggccggatgtcccgatgagagagccggcgctggcggccagcgccatggcttaccacccgttccacgcgccacggcccgccgacttccccatgtccgcctttctggcggcggcgcagccctccttcttcccggcactcgcgctgccgcccggcgcgctggccaagccgctgcccgacccgggcctggcgggggcggcggccgcggcggcggcggcggcagcagcggccgaggcggggctgcacgtctcggcactgggcccgcacccgcccgccgcgcatctgcgctccctcaagagcctggagcccgaggacgaggtggaggacgaccccaaggtgacgctggaggccaaggagctgtgggaccagttccacaagctaggcacggagatggtcatcaccaagtccgggaggcggatgttcccccccttcaaggtgcgagtcagcggcctggacaagaaggccaagtatatcctgctgatggacattgtagccgctgacgattgccgctataagttccacaactcgcgctggatggtggcgggcaaggccgaccctgagatgcccaaacgcatgtacatccacccagacagcccagccacgggggagcagtggatggctaagcctgtggccttccacaagctgaagctgaccaacaacatctctgacaagcacggcttcaccatcctaaactccatgcacaagtaccagccgcgcttccacatagtgcgagccaacgacatcctgaagctgccttacagcaccttccgcacctacgtgttcccggagaccgacttcatcgccgtcactgcctaccagaatgacaagatcacacagctgaagatcgacaacaacccgtttgccaagggcttccgggacaccgggaacggccggcgggagaaaaggaagcagctgacgctgccgtctctacgcttgtacgaggagcactgcaaacccgagcgcgatggcgcggagtcagacgcctcgtcgtgcgaccctccccccgcgcgggaaccacccacctccccgggcgcagcgcccagtccgctgcgcctgcaccgggcccgagctgaggagaagtcgtgcgccgcggacagcgacccggagcctgagcggttgagcgaggagcgtgcgggggcgccgctaggccgcagcccggctccagacagcgccagccccactcgcttgaccgaacccgagcgcgcccgggagcggcgtagtcccgagaggggcaaggagccggccgagagcggcggggacggcccgttcggcctgaggagcctggagaaggagcgcgccgaagctcggaggaaggacgaggggcgcaaggaggcggccgagggcaaggagcagggcctggcgccgctggtggtgcagacagacagtgcgtcccccctgggcgccggacacctgcccggcctggccttttccagccacttgcacgggcagcagttctttgggccgctgggagccggccagccgctcttcctgcaccctggacagttcaccatgggccctggcgccttctccgccatgggcatgggtcacctactggcctcggtggcaggcggcggcaacggcggaggtggcgggcctgggaccgccgcggggctggacgcaggcgggctgggtcccgcggccagcgcagcaagcaccgccgcgcccttcccgttccacctctcccagcacatgctggcatctcagggaattccaatgcccactttcggaggcctcttcccctacccctacacctacatggcagcagcagccgcagccgcctcggctttgcccgccactagtgctgcagctgccgccgccgcagccgccggctccctctcccggagccccttcctgggcagtgcccggccccgactgcgtttcagcccctatcagatcccggtcaccatcccgcctagcactagcctcctcaccaccgggctggcctctgagggctccaaggccgctggtggaaacagccgggagcctagccccctgcccgagctggctctccgcaaagtaggggccccatcccgcggtgccctgtcgcccagtggctcggccaaggaggcggccaatgaactgcagagcatccagagactggtgagtgggctggagagccagcgagccctctccccaggccgggagtcgcccaagtgaggggctgcccagctgctcccctgccacgcaggccacccgggctgcctgcccctgctgcttgggacgtgtacagcacagaatgagtatttatttaaataaaggagaaaagtgggctgcagcagccggaatagagcctcgtctggcaagtcggggcctgggacacttccctgggcctcaacaaggatcaggctgctggaaacacagtcacttgggagctgctgggctaggtccagatccgctccagcgtcaaggtggcatccgaaggtgtctctggtcttccagcgaggtgggagaggcctcatccagggcccagcggtccctgcagaagccagaaggtgcaggggccaggggtgggagcatcggagggagtcccagagccctggaccttgggcctagaccgcgtgataaaactgggttgagggatgctggaaccagttacgactgaagtcagtgtagacctgagctgggagggaacctgttagtctccccacctcttccctgaagagacaggcacccctcccagccgtggtcaacggagggagtggcacttctgccttgagtccccagggg

SEQ ID NO: 2292 - protein, 702 aa, Homo sapiens
MAYHPFHAPRPADFPMSAFLAAAQPSFFPALALPPGALAKPLPDPGLAGAAAAAAAAAAAAEAGLHVSALGPHPPAAHLRSLKSLEPEDEVEDDPKVTLEAKELWDQFHKLGTEMVITKSGRRMFPPFKVRVSGLDKKAKYILLMDIVAADDCRYKFHNSRWMVAGKADPEMPKRMYIHPDSPATGEQWMAKPVAFHKLKLTNNISDKHGFTILNSMHKYQPRFHIVRANDILKLPYSTFRTYVFPETDFIAVTAYQNDKITQLKIDNNPFAKGFRDTGNGRREKRKQLTLPSLRLYEEHCKPERDGAESDASSCDPPPAREPPTSPGAAPSPLRLHRARAEEKSCAADSDPEPERLSEERAGAPLGRSPAPDSASPTRLTEPERARERRSPERGKEPAESGGDGPFGLRSLEKERAEARRKDEGRKEAAEGKEQGLAPLVVQTDSASPLGAGHLPGLAFSSHLHGQQFFGPLGAGQPLFLHPGQFTMGPGAFSAMGMGHLLASVAGGGNGGGGGPGTAAGLDAGGLGPAASAASTAAPFPFHLSQHMLASQGIPMPTFGGLFPYPYTYMAAAAAAASALPATSAAAAAAAAAGSLSRSPFLGSARPRLRFSPYQIPVTIPPSTSLLTTGLASEGSKAAGGNSREPSPLPELALRKVGAPSRGALSPSGSAKEAANELQSIQRLVSGLESQRALSPGRESPK

SEQ ID NO: 2293 - DNA, 889 bp, Homo sapiens
gggtcgaggtcggacggtatcgataagttttttttttttttttttttgtttacttttcatttattcacatttcatggattgttacacttcctcgatgggagcattcaaaaactaatacaagctgagattatattgtctgacaattcaagtattttagttttagaaaacaatttcctatttaaagtaaaaagcaaacaatttatccatctgattgctaagaagttttacatctccattacaattgtgtctgcatcaaacggagagtccttcgtcctcagtatgattgttactggctgagaacatacggtgacctgtgttctgagtgcctgcttggaaaagacctccctgtcatctgccatactacgggacaaatcagtatctactcaaattcccacttccagaaggagaggactcatcaggggtttaggagtttgcaaagccttcaaaatgtatcgtgcttgaattttgactcttctgaaatagaataactgacaaatgctcaaaaaaacaaacttgtttaacttttactgaaaaggctctcagtgaaaacttgttttgaactctactagtaaggtagaatattagtttttcttcccctccacaccagaaaaggcagttttctcttttttttttttttggcatgcagcatatataaaatgtgatctagaattgaaattgtaaaacagaataatcctcttaaagaaaatcagcctatgaacagtcagacttgtccttccatggaaaacataatctaaacttctttaaaaactggccatattttttcagtctgtaattcgaataatgaagatggcataacaaatttttttgcttactaggaatgcgcaagaggatgagatggatacacaggtttaaaaaaaaaaaaaaaaaa

SEQ ID NO: 2294 - protein, 98 aa, Homo sapiens
GSRSDGIDKFFFFFFLFTFHLFTFHGLLHFLDGSIQKLIQAEIILSDNSSILVLENNFLFKVKSKQFIHLIAKKFYISITIVSASNGESFVLSMIVTG

SEQ ID NO: 2295 - DNA, 2054 bp, Homo sapiens
ccgcgccggtttccagggagctgggcgcatgcgccgcgtaaggggcccggccggcggaaggaggtgctactgccggaagcgccggcgcgcttgcgcagtagctgaacgcgggcgtttctttcctccctttttttcgaattggttttgggggtagattcgagttacaaaatggccgcccggagcgtgttcggcgcggttcccccagctgtctctggctgaaccggcgctctcgcctccctgccgaacacagcgtgaggagcccccccagggatatggtgtttgagtctctgggcttgccgagcactaagtcctctgagttccgcagcgcagcaccggaagcggccgagcgcgctcagcccggcgacccctgcgggctccagacccctgcgccgctgcgccccgggtttcgccgcaaccaagacccagcgagtgcagcggcggccgccgaggaggttcgaaaacatggccaaaagaaatgccgagaaggaactgacagataggaattgggatcaagaagatgaagctgaagaggtgggaacattctccatggccagtgaggaagtcttgaagaatagagccataaagaaagcaaagcgcagaaatgttggatttgaatctgacactggaggagcctttaaaggttttaaaggtttggtggtaccttctggaggaggacgcttttctggatttggtagtggcgctggagggaagcctttggaaggactgtcgaatggaaacaacataaccagtgcccctcccttcgccagtgcaaaggcagcggcagatcccaaggtagcctttggttctcttgctgcaaatggccctaccaccttggttgataaagtttcaaatcccaaaactaatggggacagtcagcagccctcctcctctggccttgcttccagtaaagcttgtgtcggaaatgcctatcacaagcagttggccgccttgaactgctccgtgcgggattggatagtgaagcacgtgaatacaaaccccctctgtgatctgacacctatctttaaagactatgagaaatatttagcaaacattgaacagcaacacgggaacagtggcaggaattctgaaagtgaatctaacaaagtggcagctgaaacacagtctccttccctttttggctcaacaaaattacagcaagagtcaacgtttttgtttcatggcaacaaaactgaagatacacctgacaagaagatggaggtggcatctgaaaagaaaacggacccatcatcactaggagcgacaagtgcctcatttaatttcggcaagaaagttgatagctctgttttgggctcattaagctctgtccccctgactggattttctttctcccctggaaactccagtttatttggcaaagatactacccagagtaaaccagtctcttcaccatttcccactaaaccattggagggccaagcagaaggtgacagtggtgaatgcaaaggtggagatgaagaagagaatgatgagccacccaaagtagtagttaccgaagtaaaagaagaagatgctttttactccaaaaagtgtaaactgttttacaagaaagacaatgagtttaaagagaaaggcataggtactctgcatttaaaacctacagcaaatcagaagacacagcttttggtgcgggcagacaccaatttaggcaacatattgctgaacgttctgattccacccaatatgccatgtacgcgaacagggaagaataacgttcttatcgtctgtgttccaaatccaccaattgacgagaagaatgccaccatgccagtcaccatgttgattcgggtaaaaaccagcgaggatgcagacgagttgcacaaaattttactggagaaaaaggatgcctgaacacgcaaagtcggctgcagaattattgccaagttgctgctgcttccaccgccccttaaagttagtcagtttttcttctcttctttgacattctaagaacttatagataacttaaaacttttgtgaggaagattaatgtggccaataaaacctttaaatgttaagtgtcaaaaaaaaaaaaaaaa

SEQ ID NO: 2296 - protein, 468 aa, Homo sapiens [sequence omitted]

SEQ ID NO: 2297 - DNA, 1905 bp, Homo sapiens
ggggtgggatgacagcggcgacgcagccccggctgtttttgaagcggggcccgggccccaccgggctgcggcgtccgactcgagtgagactctcccctgcggccccgccggaggttcgaaaacatggccaaaagaaatgccgagaaggaactgacagataggaattgggatcaagaagatgaagctgaagagggtaaaagaagggctataaactaaagccgaagatattcagcagctttctgacgtggacatcagaagtgtggacatgagtgtgctttgagcgcactgtggaagagcagtggttgtccagcaaggtcctaggtgcctccgtggcctttcgtacagtgggcaagttgggcaggactcatcttaaaaatcatgtgtgggaacattctccatggccagtgaggaagtcttgaagaatagagccataaagaaagcaaagcgcagaaatgttggatttgaatctgacactggaggagcctttaaaggttttaaaggtttggtggtaccttctggaggaggacgcttttctggatttggtagtggcgctggagggaagcctttggaaggactgtcgaatggaaacaacataaccagtgcccctcccttcgccagtgcaaaggcagcggcagatcccaaggtagcctttggttctcttgctgcaaatggccctaccaccttggttgataaagtttcaaatcccaaaactaatggggacagtcagcagccctcctcctctggccttgcttccagtaaagcttgtgtcggaaatgcctatcacaagcagttggccgccttgaactgctccgtgcgggattggatagtgaagcacgtgaatacaaaccccctctgtgatctgacacctatctttaaagactatgagaaatatttagcaaacattgaacagcaacacgggaacagtggcaggaattctgaaagtgaatctaacaaagtggcagctgaaacacagtctccttccctttttggctcaacaaaattacagcaagagtcaacgtttttgtttcatggcaacaaaactgaagatacacctgacaagaagatggaggtggcatctgaaaagaaaacggacccatcatcactaggagcgacaagtgcctcatttaatttcggcaagaaagttgatagctctgttttgggctcattaagctctgtccccctgactggattttctttctcccctggaaactccagtttatttggcaaagatactacccagagtaaaccagtctcttcaccatttcccactaaaccattggagggccaagcagaaggtgacagtggtgaatgcaaaggtggagatgaagaagagaatgatgagccacccaaagtagtagttaccgaagtaaaagaagaagatgctttttactccaaaaagtgtaaactgttttacaagaaagacaatgagtttaaagagaaaggcataggtactctgcatttaaaacctacagcaaatcagaagacacagcttttggtgcgggcagacaccaatttaggcaacatattgctgaacgttctgattccacccaatatgccatgtacgcgaacagggaagaataacgttcttatcgtctgtgttccaaatccaccaattgacgagaagaatgccaccatgccagtcaccatgttgattcgggtaaaaaccagcgaggatgcagacgagttgcacaaaattttactggagaaaaaggatgcctgaacacgcaaagtcggctgcagaattattgccaagttgctgctgcttccaccgccccttaaagttagtcagtttttcttctcttctttgacattctaagaacttatagataacttaaaacttttgtgaggaagattaatgtggccaataaaacctttaaatgttaagtgtcaaaaaaaaaaaaaaaa

SEQ ID NO: 2298 - protein, 440 aa, Homo sapiens
MASEEVLKNRAIKKAKRRNVGFESDTGGAFKGFKGLVVPSGGGRFSGFGSGAGGKPLEGLSNGNNITSAPPFASAKAAADPKVAFGSLAANGPTTLVDKVSNPKTNGDSQQPSSSGLASSKACVGNAYHKQLAALNCSVRDWIVKHVNTNPLCDLTPIFKDYEKYLANIEQQHGNSGRNSESESNKVAAETQSPSLFGSTKLQQESTFLFHGNKTEDTPDKKMEVASEKKTDPSSLGATSASFNFGKKVDSSVLGSLSSVPLTGFSFSPGNSSLFGKDTTQSKPVSSPFPTKPLEGQAEGDSGECKGGDEEENDEPPKVVVTEVKEEDAFYSKKCKLFYKKDNEFKEKGIGTLHLKPTANQKTQLLVRADTNLGNILLNVLIPPNMPCTRTGKNNVLIVCVPNPPIDEKNATMPVTMLIRVKTSEDADELHKILLEKKDA

SEQ ID NO: 2299 - DNA, 2210 bp, Homo sapiens
ccgcgccggtttccagggagctgggcgcatgcgccgcgtaaggggcccggccggcggaaggaggtgctactgccggaagcgccggcgcgcttgcgcagtagctgaacgcgggcgtttctttcctccctttttttcgaattggttttgggggtagattcgagttacaaaatggccgcccggagcgtgttcggcgcggttcccccagctgtctctggctgaaccggcgctctcgcctccctgccgaacacagcgtgaggagcccccccagggatatggtgtttgagtctctgggcttgccgagcactaagtcctctgagttccgcagcgcagcaccggaagcggccgagcgcgctcagcccggcgacccctgcgggctccagacccctgcgccgctgcgccccgggtttcgccgcaaccaagacccagcgagtgcagcggcggccgccgaggaggttcgaaaacatggccaaaagaaatgccgagaaggaactgacagataggaattgggatcaagaagatgaagctgaagagggtaaaagaagggctataaactaaagccgaagatattcagcagctttctgacgtggacatcagaagtgtggacatgagtgtgctttgagcgcactgtggaagagcagtggttgtccagcaaggtcctaggtgcctccgtggcctttcgtacagtgggtgggaacattctccatggccagtgaggaagtcttgaagaatagagccataaagaaagcaaagcgcagaaatgttggatttgaatctgacactggaggagcctttaaaggttttaaaggtttggtggtaccttctggaggaggacgcttttctggatttggtagtggcgctggagggaagcctttggaaggactgtcgaatggaaacaacataaccagtgcccctcccttcgccagtgcaaaggcagcggcagatcccaaggtagcctttggttctcttgctgcaaatggccctaccaccttggttgataaagtttcaaatcccaaaactaatggggacagtcagcagccctcctcctctggccttgcttccagtaaagcttgtgtcggaaatgcctatcacaagcagttggccgccttgaactgctccgtgcgggattggatagtgaagcacgtgaatacaaaccccctctgtgatctgacacctatctttaaagactatgagaaatatttagcaaacattgaacagcaacacgggaacagtggcaggaattctgaaagtgaatctaacaaagtggcagctgaaacacagtctccttccctttttggctcaacaaaattacagcaagagtcaacgtttttgtttcatggcaacaaaactgaagatacacctgacaagaagatggaggtggcatctgaaaagaaaacggacccatcatcactaggagcgacaagtgcctcatttaatttcggcaagaaagttgatagctctgttttgggctcattaagctctgtccccctgactggattttctttctcccctggaaactccagtttatttggcaaagatactacccagagtaaaccagtctcttcaccatttcccactaaaccattggagggccaagcagaaggtgacagtggtgaatgcaaaggtggagatgaagaagagaatgatgagccacccaaagtagtagttaccgaagtaaaagaagaagatgctttttactccaaaaagtgtaaactgttttacaagaaagacaatgagtttaaagagaaaggcataggtactctgcatttaaaacctacagcaaatcagaagacacagcttttggtgcgggcagacaccaatttaggcaacatattgctgaacgttctgattccacccaatatgccatgtacgcgaacagggaagaataacgttcttatcgtctgtgttccaaatccaccaattgacgagaagaatgccaccatgccagtcaccatgttgattcgggtaaaaaccagcgaggatgcagacgagttgcacaaaattttactggagaaaaaggatgcctgaacacgcaaagtcggctgcagaattattgccaagttgctgctgcttccaccgccccttaaagttagtcagtttttcttctcttctttgacattctaagaacttatagataacttaaaacttttgtgaggaagattaatgtggccaataaaacctttaaatgttaagtgtcaaaaaaaaaaaaaaaa

SEQ ID NO: 2300 - DNA, 1109 bp, Homo sapiens
ggcggcgacggatcgagctcaccgcgccgagcgcgccggcaccgcctgcaccgcccttccgcccgccctccggacggccgcagcctgcggtctccgtccagacccacccccgccccaccccgcgcgcctctgccgcctcttccagagacccagcttgccgagcggccgccgctgccgtgtcgccgccgccgccgccaccgcgccaggttccggccgcggccaccctccgccgtccagggcctctccgtctcggccccgggaccccgcctccccgccagccccggccccggccccggcaccatgtcggagaaaagcgtggaggcagcggccgagttgagcgccaaggacctgaaggagaagaaggagaaggtggaggagaaggcaagccggaaagagcgaaagaaagaagtggtggaggaggaggagaacggggctgaggaggaagaagaagaaactgccgaggatggagaggaggaagatgaaggggaagaagaagatgaggaagaagaagaagaggatgatgaagggcccgcgctgaagagagctgccgaagaggaggatgaagcggatcccaaacggcagaagacagaaaatggggcatcggcgtgacgcctgccaacaggctgggttgggaggcctctctgggctggaggtgggggtgggggcagccaagtccagccactcttcacctggctccctgctctgggccctgcaccgagagctgccaccctcttctttctccccagccttctcatttccgcctctccagacactgcgccctccaccctcactctgccattgttccacctcctgacctgctccatctgagctctccagctggcccccaattgctcctctctctctttgctctctttctccctcccctaccagcctcattcttctccggtagcctctcccacctaacctctgcatcccccagcgtcatgtcctgccccatccctatcctgcctgatccctggatctccctcagatcccctcttctcagacagcgccaggccggggtggggccggggttgccgagccccacagctgcccccctcccctccctttttgtataatttaataaagaaatggtcgcgcttctgttt

SEQ ID NO: 2301 - protein, 102 aa, Homo sapiens
MSEKSVEAAAELSAKDLKEKKEKVEEKASRKERKKEVVEEEENGAEEEEEETAEDGEEEDEGEEEDEEEEEEDDEGPALKRAAEEEDEADPKRQKTENGASA

SEQ ID NO: 2302 - DNA, 1488 bp, Homo sapiens
tttatacttggggaaaaaacaaggccatatgtaaaaacccttccaatgcctaagtgtctttctcctgcaactccaaacccagactcgccactttgggtgcacaggtggttaggtcagccaactggttctgcctgtcgccttgccacggaggaggcttctaattagctggaaaagagtatttttctaatacgttgcaaggattagccaaatcttcttattgaagaaagaagaaaagtgaagagtggttacctatacctagcatagtacaatcagaacctcgtggagaccaccggggacaggcttgcggacgccggctgttcttcccgccacgatctttctgtggtagcggccagcagaagacacggcctgctccccactccctttccccactccttctttattgcacacaggacaccagtcttcaaggaaagggacttttttccagtctgccaatcatattgggaaagtgctagctgtgctcaccttcatggggctgtttccagctcgtccacaagctcatcgattttctttagtagattaccggtgtaaatacccagtgtgcttatgagtcagttagtagacgtcttcattcattggagtaactggtttaggctttccagtttggaaaaggagcagagagctgtccatctggattgatggaagaaaagagaacctcatccatgcctggagaacatctagaaaaccttcagccagcctccagtgctgtcgagagaccaccttcccccgacccggaggcacttccttggggtctttctctagggtctcttctctacaaagcacaacactaatgttcgtttccttagacctcagttcaagtgcccctatttatttcaataagaacgcacatatcccagctgttttttgtttgtcacctctatttagttgttacctgtttctctcttctttcaccccttgtccttttccacccttttaagagttacgctagcagatcttactccacgtatactttttggtttgtgaaggcatcggttaagggcacaaagacagccatggggacatttatgtaaatacgtctctaattgccacactgcagctgaacagtgtgtagtattttcccagtcagctttgccatactgacgtcaatcatttgagagaaattattcagattttatttttgtatctgtggtaacaaaacattaaccaaaagattttctgtccagaagcctccccgaccccccaagctatttgctcacattaacaaattaaagtgcctgaagcataattcattctttacctgtatactaaaaaccctgttgtattgatttttttataataagcctttttacctctgtgtaaaaaatatatatacaagtgtatgatgtacattttagttcttaacttttttttatggtttctaatatgtatgaccaatgtagccattgctttaaaatgtaccgtgtaaatataaacacatcctatcagaaaaaaaaaaaaaaaaaaaaaaaa

SEQ ID NO: 2303 - DNA, 3466 bp, Homo sapiens
ggactgtgtgtgtctggctgtagcagacgcgaggcggcgacgaggcgccggggacccgcgcgaggggcggccgggaggcggcggcggcggccgccagaagtagcagcaggaccggcggcggcgacggcagccctgaaatgcattttcctctccagcggccatgttaaccaggaaaccttcggccgccgctcccgccgcctacccgaccgattggcggcagtaagcacacaatgaatgatcacctgcatgtcggcagccacgctcacggacagatccaggttcaacagttgtttgaggataacagtaacaagcggacagtgctcacgacacaaccaaatgggcttacaacagtgggcaaaacgggcttgccagtggtgccagagcggcagctggacagcattcatagacggcaggggagctccacctctctaaagtccatggaaggcatggggaaggtgaaagccacccccatgacacctgaacaagcaatgaagcaatacatgcaaaaactcacagccttcgaacaccatgagattttcagctaccctgaaatatatttcttgggtctaaatgctaagaagcgccagggcatgacaggtgggcccaacaatggtggctatgatgatgaccagggatcatatgtgcaggtgccccacgatcacgtggcttacaggtatgaggtcctcaaggtcattgggaaggggagctttgggcaggtggtcaaggcctacgatcacaaagtccaccagcacgtggccctaaagatggtgcggaatgagaagcgcttccaccggcaagcagcggaggagatccgaatcctggaacacctgcggaagcaggacaaggataacacaatgaatgtcatccatatgctggagaatttcaccttccgcaaccacatctgcatgacgtttgagctgctgagcatgaacctctatgagctcatcaagaagaataaattccagggcttcagtctgcctttggttcgcaagtttgcccactcgattctgcagtgcttggatgctttgcacaaaaacagaataattcactgtgaccttaagcccgagaacattttgttaaagcagcagggtagaagcggtattaaagtaattgattttggctccagttgttacgagcatcagcgtgtctacacgtacatccagtcgcgtttttaccgggctccagaagtgatccttggggccaggtatggcatgcccattgatatgtggagcctgggctgcattttagcagagctcctgacgggttaccccctcttgcctggggaagatgaaggggaccagctggcctgtatgattgaactgttgggcatgccctcacagaaactgctggatgcatccaaacgagccaaaaattttgtgagctccaagggttatccccgttactgcactgtcacgactctctcagatggctctgtggtcctaaacggaggccgttcccggagggggaaactgaggggcccaccggagagcagagagtgggggaacgcgctgaaggggtgtgatgatccccttttccttgacttcttaaaacagtgtttagagtgggatcctgcagtgcgcatgaccccaggccaggctttgcggcacccctggctgaggaggcggttgccaaagcctcccaccggggagaaaacgtcagtgaaaaggataactgagagcaccggtgctatcacatctatatccaagttacctccaccttctagctcagcttccaaactgaggactaatttggcgcagatgacagatgccaatgggaatattcagcagaggacagtgttgccaaaacttgttagctgagctcacgtcccctgatgctggtaacctgaaagatacgacattgctgagccttactgggttgaaaaggagtagctcagacctgtttttatttgctcaataactctactcatttgtatcttttcagcacttaattttaatgtaagaaagttgttcattttgtttttataaaatacatgaggacaatgctttaagtttttatactttcagaaactttttgtgttctaaaagtacaatgagccttactgtatttagtgtggcagaataataacatcagtggcaggccactgattacttcatgactgccacgcatttacagattggtgtcaaagacattcactatgtttttatggttcatgttatatcctccccagggtgacagccccttaaggccctccttttccctccatgctccaggtccatgcacaggtgtagcatgtcctgcttccgtttttcataaattaatctgggtgttgggggtagtgggaggagaacggtcagaatcaaagtgacattctaagaaaaactgtaccttagagattttcctctagtgctcaaacaaatacaaaataagatccccaaggtttaaactgcccagttagcattctgacattctaaaagccggcaaagcagcttttagtggataaatgggaatggaaacgtgtgtgttcctccaaattttctagtatgatcggtgagctgttttgtaaagaagcctcatattacagagttgcttttgcacctaaatttagaattgtattccatgaactgttcctcccttttctctgcttttctcctctctgttcctcttttaataccacacgtctgttgcttgcatttagtttgtcttcttccttcagctgtgtatcccagactgttaatacagaaaagagacatttcagctgtgattatgaccattgtttcatattccaattaaaaaaagaacagcagcctagctacttaaggtggggatttcatagttccaaagaagatttagcagattagagtgagttcacacttttcaggtgccactgtaaggttctctcagcctgggaaactatcaactctttctttaaaaagaaagagggttgaaaatcctctggacgaacagaagtcactttggctgttcagtaaggccaatgttaacaacacgtttagaggaggaaaagttcaacctcaagttaaatggtttgacttattcttcgtatcattagaagaaccccagagatagcattcctctattttattttactttcttttggattgcactgattgtttttgtgggaatgacactttatctggcaaagtaactgagagtttggtaaaagaatattttcttctctgaataataattattttcacagtgaaaatttcagtattttatcactaatgtatgagcaatgatctatatcaatttcaaggcacgtgaaaaaaattttttagtatgtgcaatttaatatagaaagatttctgcctgtttggacaataggttttgggtagtacagattaggataagtaagcttatatatgcacagagattattgtattacctgtaaattgatttacaagtacttaaaagcgtggtccccagtgaggccaagaaagtttccggttaagttctttaataataatcctacagtttatcttaagaa

SEQ ID NO: 2304 - protein, 528 aa, Homo sapiens
MNDHLHVGSHAHGQIQVQQLFEDNSNKRTVLTTQPNGLTTVGKTGLPVVPERQLDSIHRRQGSSTSLKSMEGMGKVKATPMTPEQAMKQYMQKLTAFEHHEIFSYPEIYFLGLNAKKRQGMTGGPNNGGYDDDQGSYVQVPHDHVAYRYEVLKVIGKGSFGQVVKAYDHKVHQHVALKMVRNEKRFHRQAAEEIRILEHLRKQDKDNTMNVIHMLENFTFRNHICMTFELLSMNLYELIKKNKFQGFSLPLVRKFAHSILQCLDALHKNRIIHCDLKPENILLKQQGRSGIKVIDFGSSCYEHQRVYTYIQSRFYRAPEVILGARYGMPIDMWSLGCILAELLTGYPLLPGEDEGDQLACMIELLGMPSQKLLDASKRAKNFVSSKGYPRYCTVTTLSDGSVVLNGGRSRRGKLRGPPESREWGNALKGCDDPLFLDFLKQCLEWDPAVRMTPGQALRHPWLRRRLPKPPTGEKTSVKRITESTGAITSISKLPPPSSSASKLRTNLAQMTDANGNIQQRTVLPKLVS

SEQ ID NO: 2305 - DNA, 3615 bp, Homo sapiens
ggactgtgtgtgtctggctgtagcagacgcgaggcggcgacgaggcgccggggacccgcgcgaggggcggccgggaggcggcggcggcggccgccagaagtagcagcaggaccggcggcggcgacggcagccctgaaatgcattttcctctccagcggccatgttaaccaggaaaccttcggccgccgctcccgccgcctacccgaccggccgaggtggggacagcgccgttcgtcagcttcaggcttccccggggctcggtgcagggcccacccggagcggagtggggactggcccgccctcccccatcgccctgccgcctctccgggccagcaacgctgccgccgcagcccacacgattggcggcagtaagcacacaatgaatgatcacctgcatgtcggcagccacgctcacggacagatccaggttcaacagttgtttgaggataacagtaacaagcggacagtgctcacgacacaaccaaatgggcttacaacagtgggcaaaacgggcttgccagtggtgccagagcggcagctggacagcattcatagacggcaggggagctccacctctctaaagtccatggaaggcatggggaaggtgaaagccacccccatgacacctgaacaagcaatgaagcaatacatgcaaaaactcacagccttcgaacaccatgagattttcagctaccctgaaatatatttcttgggtctaaatgctaagaagcgccagggcatgacaggtgggcccaacaatggtggctatgatgatgaccagggatcatatgtgcaggtgccccacgatcacgtggcttacaggtatgaggtcctcaaggtcattgggaaggggagctttgggcaggtggtcaaggcctacgatcacaaagtccaccagcacgtggccctaaagatggtgcggaatgagaagcgcttccaccggcaagcagcggaggagatccgaatcctggaacacctgcggaagcaggacaaggataacacaatgaatgtcatccatatgctggagaatttcaccttccgcaaccacatctgcatgacgtttgagctgctgagcatgaacctctatgagctcatcaagaagaataaattccagggcttcagtctgcctttggttcgcaagtttgcccactcgattctgcagtgcttggatgctttgcacaaaaacagaataattcactgtgaccttaagcccgagaacattttgttaaagcagcagggtagaagcggtattaaagtaattgattttggctccagttgttacgagcatcagcgtgtctacacgtacatccagtcgcgtttttaccgggctccagaagtgatccttggggccaggtatggcatgcccattgatatgtggagcctgggctgcattttagcagagctcctgacgggttaccccctcttgcctggggaagatgaaggggaccagctggcctgtatgattgaactgttgggcatgccctcacagaaactgctggatgcatccaaacgagccaaaaattttgtgagctccaagggttatccccgttactgcactgtcacgactctctcagatggctctgtggtcctaaacggaggccgttcccggagggggaaactgaggggcccaccggagagcagagagtgggggaacgcgctgaaggggtgtgatgatccccttttccttgacttcttaaaacagtgtttagagtgggatcctgcagtgcgcatgaccccaggccaggctttgcggcacccctggctgaggaggcggttgccaaagcctcccaccggggagaaaacgtcagtgaaaaggataactgagagcaccggtgctatcacatctatatccaagttacctccaccttctagctcagcttccaaactgaggactaatttggcgcagatgacagatgccaatgggaatattcagcagaggacagtgttgccaaaacttgttagctgagctcacgtcccctgatgctggtaacctgaaagatacgacattgctgagccttactgggttgaaaaggagtagctcagacctgtttttatttgctcaataactctactcatttgtatcttttcagcacttaattttaatgtaagaaagttgttcattttgtttttataaaatacatgaggacaatgctttaagtttttatactttcagaaactttttgtgttctaaaagtacaatgagccttactgtatttagtgtggcagaataataacatcagtggcaggccactgattacttcatgactgccacgcatttacagattggtgtcaaagacattcactatgtttttatggttcatgttatatcctccccagggtgacagccccttaaggccctccttttccctccatgctccaggtccatgcacaggtgtagcatgtcctgcttccgtttttcataaattaatctgggtgttgggggtagtgggaggagaacggtcagaatcaaagtgacattctaagaaaaactgtaccttagagattttcctctagtgctcaaacaaatacaaaataagatccccaaggtttaaactgcccagttagcattctgacattctaaaagccggcaaagcagcttttagtggataaatgggaatggaaacgtgtgtgttcctccaaattttctagtatgatcggtgagctgttttgtaaagaagcctcatattacagagttgcttttgcacctaaatttagaattgtattccatgaactgttcctcccttttctctgcttttctcctctctgttcctcttttaataccacacgtctgttgcttgcatttagtttgtcttcttccttcagctgtgtatcccagactgttaatacagaaaagagacatttcagctgtgattatgaccattgtttcatattccaattaaaaaaagaacagcagcctagctacttaaggtggggatttcatagttccaaagaagatttagcagattagagtgagttcacacttttcaggtgccactgtaaggttctctcagcctgggaaactatcaactctttctttaaaaagaaagagggttgaaaatcctctggacgaacagaagtcactttggctgttcagtaaggccaatgttaacaacacgtttagaggaggaaaagttcaacctcaagttaaatggtttgacttattcttcgtatcattagaagaaccccagagatagcattcctctattttattttactttcttttggattgcactgattgtttttgtgggaatgacactttatctggcaaagtaactgagagtttggtaaaagaatattttcttctctgaataataattattttcacagtgaaaatttcagtattttatcactaatgtatgagcaatgatctatatcaatttcaaggcacgtgaaaaaaattttttagtatgtgcaatttaatatagaaagatttctgcctgtttggacaataggttttgggtagtacagattaggataagtaagcttatatatgcacagagattattgtattacctgtaaattgatttacaagtacttaaaagcgtggtccccagtgaggccaagaaagtttccggttaagttctttaataataatcctacagtttatcttaagaa

SEQ ID NO: 2306 - protein, 601 aa, Homo sapiens
MLTRKPSAAAPAAYPTGRGGDSAVRQLQASPGLGAGPTRSGVGTGPPSPIALPPLRASNAAAAAHTIGGSKHTMNDHLHVGSHAHGQIQVQQLFEDNSNKRTVLTTQPNGLTTVGKTGLPVVPERQLDSIHRRQGSSTSLKSMEGMGKVKATPMTPEQAMKQYMQKLTAFEHHEIFSYPEIYFLGLNAKKRQGMTGGPNNGGYDDDQGSYVQVPHDHVAYRYEVLKVIGKGSFGQVVKAYDHKVHQHVALKMVRNEKRFHRQAAEEIRILEHLRKQDKDNTMNVIHMLENFTFRNHICMTFELLSMNLYELIKKNKFQGFSLPLVRKFAHSILQCLDALHKNRIIHCDLKPENILLKQQGRSGIKVIDFGSSCYEHQRVYTYIQSRFYRAPEVILGARYGMPIDMWSLGCILAELLTGYPLLPGEDEGDQLACMIELLGMPSQKLLDASKRAKNFVSSKGYPRYCTVTTLSDGSVVLNGGRSRRGKLRGPPESREWGNALKGCDDPLFLDFLKQCLEWDPAVRMTPGQALRHPWLRRRLPKPPTGEKTSVKRITESTGAITSISKLPPPSSSASKLRTNLAQMTDANGNIQQRTVLPKLVS

SEQ ID NO: 2307 - DNA, 507 bp, Homo sapiens
tttttttaggattaacttaaatttattaatgccaagtggaaagaaggtaacagttcctgaccctccagctgtatccacagttcggccaggaacaggctctgccagaggctagggccagcgctacatagtctgtggttaatggaggtgactagggaggggtgagcacaccagctgctctagtctcctttccttccccagaaatgaggaagtggtcatgtattattttaggagttcccctgcccacccaatcctctcataattgggagcaatcaggtacatttttttttttttttccttttcacctcctggagtcctggacttccccacatctcccctgcccctcccacgtttccatagtccaagggccagagtaaatgaaaatacagcagccgcccaagcaatggggcccatgctggggcttcagtcatcagcatcttcactggagtctgagttagctggcatcataggatcatcaatgagtgagaagtccctttctgagctatcata

SEQ ID NO: 2308 - DNA, 2734 bp, Homo sapiens
gctcgagtactggcgaagacgagaagaagaggagcgttggagaatggaaatgagacgttatgaagaggacatgtactggaggagaatggaggaagaacaacatcattgggatgatcgccgccgaatgccagatggaggttatcctcatggtcctccaggcccattaggccttctgggagtccgaccaggcatgcctcctcagcctcaggggcctgcacccttacgtcgtcctgactcatctgatgaccgttatgtaatgacaaaacatgccaccatttatccaactgaagaggagttacaggcagttcagaaaattgtttctattactgaacgtgctttaaaactcgtttcagacagtttgtctgaacatgagaagaacaagaacaaagagggagatgataagaaagagggaggtaaagacagagctttgaaaggagttttgcgagtgggagtatttgcaaaaggattacttctccgaggagatagaaatgtcaaccttgttttgctgtgctcagagaaaccttcaaagacattattaagccgtattgcagaaaacctacccaaacagcttgcttttataagccctgagaagtatgacataaaatgtgctgtatctgaagcggcaataattttgaattcatgtgtggaacccaaaatgcaagtcactatcacactgacatctccaattattcgagaagagaacatgagggaaggagatgtaacctcgggtatggtgaaagacccaccggacgtcttggacaggcaaaaatgccttgacgctctggctgctctacgccacgctaagtggttccaggctagagctaatggtctgcagtcctgtgtgattatcatacgcattcttcgagacctctgtcagcgagttccaacttggtctgattttccaagctgggctatggagttactagtagagaaagcaatcagcagtgcttctagccctcagagccctggggatgcactgagaagagtttttgaatgcatttcttcagggattattcttaaaggtagtcctggacttctggatccttgtgaaaaggatccctttgataccttggcaacaatgactgaccagcagcgtgaagacatcacatccagtgcacagtttgcattgagactccttgcattccgccagatacacaaagttctaggcatggatccattaccgcaaatgagccaacgttttaacatccacaacaacaggaaacgaagaagagatagtgatggagttgatggatttgaagctgaggggaaaaaagacaaaaaagattatgataacttttaaaaagtgtctgtaaatcttcagtgttaaaaaaacagatgcccatttgttggctgtttttcattcataataatgtctacattgaaaaatttatcaagaatttaaaggatttcatggaagaaccaagtttttctatgatattaaaaaatgtacagtgttaggtattatttgaatggaaagacacccaaaaaaaaaaatgtgctccgactagggggaaaacagtagttccgattttttcccattatttttattttattttctggttgccctagcttccccccctatttttgtgtcttttattaactagtgcattgtcttattaaatcttcactgtatttaatgcaggatgtgtgcttcagttgctctgtgtattttgatattttaatttagaggttttgtttgctttttgacactagttgtaagttactttgttatagatggtatcctttaccccttcttaatattttacagcagtacgtttttttgtaacgtgagactgcagagtttgtttttctatatgtgaaggattacaacacaaaaagttatcctgccattcgagtgctcagaactgaatgtttctgcagatcttgtgggcatttgtctctagtgtgatatataaaggtgtaattaagacagagttctgttaatctaatcaagtttgctgttagttgtgcattagcagtataaaagctaatatatactatatggtcttgcaacagttttaaagcctctgcataattgataataaaaatgcatgacattcttgtttttaatagacttttaaaatcataattttaggtttaacacgtagatctttgtacagttgactttttgacatagcaaggccaaaaataactttctgaatatttttttcttgtgtataagtggaaagggcatttttcacatataagtgggctaaccaatattttcaaaagaacttcatcattgtacaactaacaacagtaactagcccttaattatggtgacagttccttattggtgtgtgtgagattactctagcaactattacagtataacacagatgatcttctccacacaccccatcacccagataatttacagttctgttaacagtgaggttgataaagtattactgataaaaaattatctaaggaaaaaaacagaaaattatttggtgtggccatcttacctgcttatgtctcctacacaaagctaaatattctagcagtgatgtaatgaaaaattacatcttactgttgatatatgtatgctctggtacacagatgtcattttgttgtcacagcactacagtgaaatacacaaaaaatgaaattcatataatgacttaaatgtattatatgttagaattgacaacataaactacttttgctttgaaatgatgtatgcttcagtaaaatcatattcaaatttaaaaaaaaaaaaaaaaaaaaaaaa

SEQ ID NO: 2309 - protein, 418 aa, Homo sapiens
MEMRRYEEDMYWRRMEEEQHHWDDRRRMPDGGYPHGPPGPLGLLGVRPGMPPQPQGPAPLRRPDSSDDRYVMTKHATIYPTEEELQAVQKIVSITERALKLVSDSLSEHEKNKNKEGDDKKEGGKDRALKGVLRVGVFAKGLLLRGDRNVNLVLLCSEKPSKTLLSRIAENLPKQLAFISPEKYDIKCAVSEAAIILNSCVEPKMQVTITLTSPIIREENMREGDVTSGMVKDPPDVLDRQKCLDALAALRHAKWFQARANGLQSCVIIIRILRDLCQRVPTWSDFPSWAMELLVEKAISSASSPQSPGDALRRVFECISSGIILKGSPGLLDPCEKDPFDTLATMTDQQREDITSSAQFALRLLAFRQIHKVLGMDPLPQMSQRFNIHNNRKRRRDSDGVDGFEAEGKKDKKDYDNF

SEQ ID NO: 2310 - DNA, 2010 bp, Homo sapiens
taaggagagtccacagcacttcaagtctggatagtcagaagtttgtgacagtgccctccagtaatgaagtggtaactaacctggaagtgctgacaagcaaatgcctccatgggaagaactactgtcgacaggtcctctgtctgtatgatcttgccaaggagttgggctgttcctacacagatgttgctgctcaggatggtgaagccatgctccggaaaatcttggcctctcagcagcctgaccgatgcaaacgagcccaggccttcatcagcacacagggccttaagccagatactgtggctgaactcgtggcagaagaggtgacacgggagctgcttacttcatcacagggaacaggacataagcagatgttcaacccaacagaggagagccagacatttcttcagctgaccactctgtgtcaagaccgcacattggtaggcatgaagttgttggataagatttcctccgttccccatggggaactgtcttgcaccacagagctcctgatcctggcccatcattgcttcaccctgacgtgccacatggagggcatcatccgagtcctacaggccgcccacatgctcacagataaccacctggcccccagtgaggagtatgggctggtggtacggctcctcactggcattggaaggtacaacgagatgacatacatatttgatttgctgcataaaaagcactactttgaagtgctaatgaggaagaagttggatccgagtggtaccctgaaaacagccctgctggactacatcaaacgctgccgtcctggagacagtgaaaagcacaatatgattgccctgtgcttcagcatgtgccgggagattggcgagaaccacgaggcagctgcccgcatccaactgaaattgattgagtctcagccctgggaggacagcctcaaggatgggcaccagctgaaacaactgctgctgaaggccctgactctgatgttggatgcagcagagagttatgccaaggactcctgtgtgcgacaggcccagcactgtcagcggctcaccaagttgataactctgcagattcactttctgaacactggccagaacacaatgctcatcaacttgggccgccacaagctgatggactgtattctggccctacctcggttctaccaggcttctattgtggctgaggcctacgattttgttccagattgggctgaaattttataccagcaagtgattcttaaaggagactttaattacttggaagaatttaagcagcaaaggttattaaagtccagtatacttgaagagatttccaaaaaatataaacaacatcagcctactgacatggtcatggaaaacctgaagaaattactcacatattgtgaagatgtttacctgtattacaagttggcatacgaacacaagttttatgaaattgtaaatgtgcttctgaaggaccctcagacaggttgctgtctaaaggacatgctagcaggttagatgatttcataggtgtctgttttcttgtactgttagcagattctgacagatgtgatgagaagaagaatgcattggagatctttgctaaagttgaacaatcccggtactgtaccatatcagtcctttgtgggtagtaggtagcaagtaagaaacttttcaggaggaaattcctatttaaaatagattgattttagatgattgttcatccacaccattttatatagatactagtattaagatcaaaagcttcctcttcctcaggacagcttctactttagatgatccaataatgattaaagaatacctgtacctgcagattccagtttcaaagaaatttaattattatttacacagttaaggaacaggtgatacattttcatttgttagaaactgatctttctgtaataaaatagattttcaattcaaaaaaaaaaaaaaaaaaaaaaaaaaaaaaaaaaaaaaaaaaaaaaaaaaaaaaaaaaaaaaaaaaaaaaaaaaaaaaaaaaaaaaaaaaaaaaaaaaaaaa

SEQ ID NO: 2311 - protein, 425 aa, Homo sapiens
MLRKILASQQPDRCKRAQAFISTQGLKPDTVAELVAEEVTRELLTSSQGTGHKQMFNPTEESQTFLQLTTLCQDRTLVGMKLLDKISSVPHGELSCTTELLILAHHCFTLTCHMEGIIRVLQAAHMLTDNHLAPSEEYGLVVRLLTGIGRYNEMTYIFDLLHKKHYFEVLMRKKLDPSGTLKTALLDYIKRCRPGDSEKHNMIALCFSMCREIGENHEAAARIQLKLIESQPWEDSLKDGHQLKQLLLKALTLMLDAAESYAKDSCVRQAQHCQRLTKLITLQIHFLNTGQNTMLINLGRHKLMDCILALPRFYQASIVAEAYDFVPDWAEILYQQVILKGDFNYLEEFKQQRLLKSSILEEISKKYKQHQPTDMVMENLKKLLTYCEDVYLYYKLAYEHKFYEIVNVLLKDPQTGCCLKDMLAG

SEQ ID NO: 2312 - DNA, 2490 bp, Homo sapiens
accagttcgcgccggcggtagacgaggacgccaacagcagcggagaaacgtttctctttcctctcagtttgcgcacaccatggcggcccctgcccagcagactactcagcctggcggcgggaagcgcaaaggcaaggctcagtatgtgctggccaagcgcgctcggcgctgcgacgctggcgggccccgtcagctagagcccgggctacagggcatcctcatcacctgcaatatgaacgagcgcaagtgcgtggaggaggcctacagcctcctcaacgaatacggcgacgacatgtatgggccagaaaagtttacagacaaggatcagcggccctctggaagtgagggagaggatgatgatgcggaggctgccttgaagaaagaagttggtgacattaaggcatctacagagatgaggttaagaagattccagtcagtggaaagtggagcaaataacgttgtcttcatcaggacacttgggatagagcctgagaaattggtgcatcatattctccaggatatgtacaaaaccaagaaaaagaagactcgagttattttgcgaatgttacccatctcaggcacatgcaaggcttttttagaagatatgaaaaaatatgcagaaacatttttggaaccctggtttaaagctccaaacaaagggacatttcagattgtgtacaaatctcgaaataacagtcatgtgaatagagaagaagttatcagagaattggcaggaatagtgtgcaccctcaattcagaaaataaagtggatctcaccaatccacagtacacagtggtagtagaaatcatcaaagctgtctgttgcctgagtgttgtgaaagattacatgttgtttagaaaatacaatctccaggaggtggtgaagagccctaaggatccgtcacagcttaactcaaagcagggaaatggggaagaagctaaactggaatctgcggacaaatcagaccaaaacaacacagcagaaggaaaaaataaccagcaggtaccagagaatactgaggagctggggcagacaaaaccaacgtctaatccacaggtggtaaatgagggaggagccaaacctgaacttgcaagtcaagccacagaaggatccaagtcaaatgaaaatgactcctcataggaagtcatttggtgttggaggtgggtttctcacctggggctctacgagatgttgctggggctccaccttaaattgtgactaaaaacagttttttatttgtgtgctgcactatgctgttctcacagtagtgagcaatgattgcgcagccctgttaacagtttttttagggatctttcagcctttatggtattacgtagaggcagacccatgtgctgctgttgcaaagaggggaggataggagggggatgttggcctctcccaggctcctcttctgcagtgccagctgacttaagggagtgaactacctgtgaagtagaaaatcagagggaagttttcattctaaggaaggagtttttacatgccacagctcagctgtctgcctgccactttgttgtaaacattgcaaaaatgtggatcatgtaggttagaagtgaattgtttagtgaagtttttgtacttttgtgattttcttgtttatgtctgtttttttttttttttttaacatttgtgtgtaatatagctgacagtccagtgtcgcaattttggaaggcaagatgtgagagagacgagaaccattttaggcatagaactacagacatttctgaaaaggttggtgatgaagaacttcagtcttctgagtatacttcagtatactagtgcaacaagggacacaaagaaattctgtcttaataaagaaagctacttctcaagggtattatgtggactcagtccaagctctcctgtcccattgtgcattgtctgtgacatgcaacttacaaaactagcaattgtaacaataaatcacagccacttgacaagaaaggatattcattattttcaaatggcttttggactatcaaaaacagtaaggcttttgttcagaaatcacctttagtcaaaaggtttaagaagcaaattatttagtagcagaacttatctcaggaaaggaaaatatgcatggttggtgagaatctaataacattaaaatgctggggcaagatgcagtacaagttgaagagactttattctcaataagttgatttactgatgatatgtcatatgatgcaaaaaaggttttgtgtcattaactgaaaagtagcagcttctctatccaggatgatgagtcaacaggtttcactaatatttgtcatgctgtagcatttgtaagatttgtaaatgatgaaattcaaagaaaactttttctattgctaggagcctgccagaacaaggccaatatataatgttgtgacatcatatctgataaccagaggtctggtatctacactcctggtgccccatcagtggttgtctccataagtcattttgcgttaaaaaaaaaaaaaaaaaaa

SEQ ID NO: 2313 - protein, 353 aa, Homo sapiens
MAAPAQQTTQPGGGKRKGKAQYVLAKRARRCDAGGPRQLEPGLQGILITCNMNERKCVEEAYSLLNEYGDDMYGPEKFTDKDQRPSGSEGEDDDAEAALKKEVGDIKASTEMRLRRFQSVESGANNVVFIRTLGIEPEKLVHHILQDMYKTKKKKTRVILRMLPISGTCKAFLEDMKKYAETFLEPWFKAPNKGTFQIVYKSRNNSHVNREEVIRELAGIVCTLNSENKVDLTNPQYTVVVEIIKAVCCLSVVKDYMLFRKYNLQEVVKSPKDPSQLNSKQGNGEEAKLESADKSDQNNTAEGKNNQQVPENTEELGQTKPTSNPQVVNEGGAKPELASQATEGSKSNENDSS

SEQ ID NO: 2314 - DNA, 3346 bp, Homo sapiens
ggcacgagctggctcgcgcgtgccttttcccctcaggttgtggggagagcggaatcctgctccgccgtcgcagcagcagcggcagccccggcagcctcgggcgacagcggcggcgcgcgagcccccgggcggaccgtaccaccgctcgccagcacgcagggggagccgcccgtctcgccgcgcacgcctcggcgaccccgcggggctgaggcgtcgccgcgcccggcagcgtgagcgcagagccggcctcgaccccgagctcggagccccgcgggccgcgcccgccgccggccccacccatccgggtcgaggaggccgaggccatggctgagacggaggagcggagcctggacaacttctttgccaagagggacaagaagaagaagaaggagcggagcaaccgggcggcgagtgccgcgggcgcagcgggcagcgccggcggaagcagtggagccgcgggtgcggcgggcggcggggcgggcgcggggacccggccgggtgacggcgggaccgccagcgcgggggctgcgggcccaggggccgccaccaaggctgtgacgaaggacgaagatgaatggaaagaattggagcaaaaagaggttgattacagcggcctcagggttcaggcaatgcaaataagcagtgaaaaggaagaagacgataatgaaaagagacaagatccaggtgataactgggaagaaggtggaggtggtggtggaggtatggaaaaatcttcaggtccctggaataaaacagctccagtacaagcacctcctgctccagtaattgttacagaaaccccagaaccagcgatgactagtggtgtgtataggcctcctggggccaggttaaccacaacaaggaaaacaccacaaggaccaccagaaatctacagtgatacacagttcccatccctgcagtcaactgccaagcatgtagaaagccggaaggataaagaaatggagaagagctttgaagtagtaagacacaaaaatagaggtagggatgaggtttcaaaaaaccaggcccttaaacttcagctagacaaccaatatgctgtgcttgaaaatcagaaaagcagccactcacaatacaattaaggaatgggctttgctaacccttctgaggtaactagactgcagctaaccaccaccaacagccattcatcatctgatctctgctggatctacagacaccgatgcagaccactcgatttcatgaccggccctattgcactatggaagttaaagtgtcacgactgctctatgcatattggatttaggggaattttcattgttacataaatgtgtgaactagtttcaacagtgttctttcatatttactctgcaaatacaaaaaaccaaaacctgcagccagtggtcatttcaaaatctttttatgttcagatactgagccttcataagggttgactacctcagatttgctgcactcattgtggacttcatgtggatcacaacttctggataagaagattacaactattaagtgtcgatgtgaaccttgcaaccagctctactggattcttatcagaaatcctgcataaaaagtcagccatctgggttctgatctgctgtaaaagatgaagatttaagtgaccttaattaacctgtcctgtgccctacccttaaggaatactctctgtagtaggctgttgttatattagacttcctggaacacaccgctgaaaagaactgatgtgttcagatcatctgtgtagggctgtgatttgtaatttaaactaattgtattctgaggtaaccacaaaataaattcaaccaaactggggtccaccaagtgggggaaggggaagggagagaataatcttgggggtttttttttttggtaatttttttatttggatagtgcttttttgttttgtttttgttctgcattaaggccttttttgctttgacttgaaataagttctttgacagagcatattgcttggttaattaagtaacctaaagtatgcattaggattgtgaaatgtctcgtgagtatgccaatcctgagggtggaaccaaatagcctttgatgaaaagggcagtggattctggaggctctacttcaggtgctgctataatgcctcatctaatcaggactaaattgtgtaggaaactgcagtgggaagaatatgctttctgctcaggctaagagggtcactgatctgtccttagaaattcagagtaacatgagcaaaacctcagctaaaacccatttaagtggcatggattgtgcatgatctttgataagaattcctcatgtacttgtgcctagtttttcaaggtattggctgttctatagatgcagtgattgtcccagctagctctgttaccagccttttggtgtgtctttatgttcatttggagagtcagggcgaaagacaggtgatgtagcacttctgtttttaataattattgcttaaaatacctattaatagttttgggtcatttaaagggacttgaggaagctacccaggattacagaagagtgtccacctaacaagatggtctggcagtttcctagttttgtatctggttcaatagaaatatgtgaaagtggtaatgtcatcatttgatgcagagtccgggtttctctataataaatccctttgccaaatgcatgagttgcagacttgctactggcaagagtgaagcaagtgggtgagtaaaactattttgacgtgggagcgttttcagataggagtttagtcttgacgaaagtgtccgtgcaggaattggactccgaggagggttacagtatctcctgacgggacctgccactcgcatctgggcaatgttgacatttgaggtggcaggcaggatgcctgccttctaatatatttgggtgagtaactgagccagccaagggaaggttgaatgattaaatcagaaatgggattcttggtaaactgaagacttttatttgggaatgaaaaaccttaaaaaaatctcttcatcgttgaactgtgcattttccctgcattttttcccaacaaaattttgttgggggttatgttactgaagaatgaacagatgagtaagtggaggtgttatgtaaaggcatattgtactcgaaatctgaagacctgcagcagatttaaattacaactcttgttataactttttaaaagattgtgaaaatatcaaaatataaatgaatcaagttttaatatactgtatgatgggtggatgaggctgtccattgtaccatttgtttgaattctcaggcatggtttggcagtgcaagaattctgtaacattaacaaattcaataaaaagtaaatatatggaaaaaaaaaaaaaaaaaaaaaaaaaaaaaaaaa

SEQ ID NO: 2315 - protein, 258 aa, Homo sapiens
MAETEERSLDNFFAKRDKKKKKERSNRAASAAGAAGSAGGSSGAAGAAGGGAGAGTRPGDGGTASAGAAGPGAATKAVTKDEDEWKELEQKEVDYSGLRVQAMQISSEKEEDDNEKRQDPGDNWEEGGGGGGGMEKSSGPWNKTAPVQAPPAPVIVTETPEPAMTSGVYRPPGARLTTTRKTPQGPPEIYSDTQFPSLQSTAKHVESRKDKEMEKSFEVVRHKNRGRDEVSKNQALKLQLDNQYAVLENQKSSHSQYN

SEQ ID NO: 2316 - DNA, 1830 bp, Homo sapiens
ggggagttgaaacctaattttgtggcgtagcagctatgcagcttgaaatccaagtagcactaaattttattatttcgtatttgtacaataagcttcccaggagacgtgtcaacatttttggtgaagaacttgaaagacttcttaagaagaaatatgaagggcactggtatcctgaaaagccatacaaaggatcggggtttagatgtatacacataggggagaaagtggacccagtgattgaacaagcatccaaagagagtggtttggacattgatgatgttcgtggcaatctgccacaggatcttagtgtttggatcgacccatttgaggtttcttaccaaattggtgaaaagggaccagtgaaggtgctttacgtggatgataataatgaaaatggatgtgagttggataaggagatcaaaaacagctttaacccagaggcccaggtttttatgcccataagtgacccagcctcatcagtgtccagctctccatcgcctccttttggtcactctgctgctgtaagccctaccttcatgccccggtccactcagcctttaacctttaccactgccacttttgctgccaccaagttcggctctaccaaaatgaagaatagtggccgtagcaacaaggttgcacgtacttctcccatcaacctcggcttgaatgtgaatgacctcttgaagcagaaagccatctcttcctcaatgcactctctgtatgggcttggcttgggtagccagcagcagccacagcaacagcagcagccagcccagccgccaccgccaccaccaccaccacagcagcaacaacagcagaaaacctctgctctttctcctaatgccaaggaatttatttttcctaatatgcagggtcaaggtagtagtaccaatggaatgttcccaggtgacagcccccttaacctcagtcctctccagtacagtaatgcctttgatgtgtttgcagcctatggaggcctcaatgagaagtcttttgtagatggcttgaattttagcttaaataacatgcagtattctaaccagcaattccagcctgttatggctaactaaaaaaaagaaaatgtatcgtacaagttaaaatgcacgggcccaagggggattttttttttcacctccttgagaatttttttttttaagcttatagtaaggatacattcaagcttggttaaaaaaataataataaaacatgcatcatttttcatttgccaaccaagcacaaagttattttatactgactgtatattttaaagtatactctcagatatggcctcttacagtatttaagatatagcaaggacatggctgatttttttttataaaaattggcactaataagtgggtttattggtcttttctaattgtataatttaatttagtacaaagtttgtaaaatatcagaggatatatatatattgtttctacgacatggtattgcatttatatctttttactacagtgatctgtgacagcagcagcttcatgttgtattttttttactgaaattgtaaaatatccatcttaaagacatcaactattctaaaaattgtgtacaggatattcctttagtggtggaattaaaatgtacgaatacttgctttttcaaaaaaatgtattttctgttaaaagtttaaagatttttgctatatattatggaagaaaaatgtaatcgtaaatattaattttgtacctatattgtgcaatacttgaaaaaaacggtataaaagtattttgagtcagtgtcttacatgttaagagggactgaaatagtttatattaagtttgtattaaaattctttaaaattaaaaa

SEQ ID NO: 2317 - protein, 345 aa, Homo sapiens
MQLEIQVALNFIISYLYNKLPRRRVNIFGEELERLLKKKYEGHWYPEKPYKGSGFRCIHIGEKVDPVIEQASKESGLDIDDVRGNLPQDLSVWIDPFEVSYQIGEKGPVKVLYVDDNNENGCELDKEIKNSFNPEAQVFMPISDPASSVSSSPSPPFGHSAAVSPTFMPRSTQPLTFTTATFAATKFGSTKMKNSGRSNKVARTSPINLGLNVNDLLKQKAISSSMHSLYGLGLGSQQQPQQQQQPAQPPPPPPPPQQQQQQKTSALSPNAKEFIFPNMQGQGSSTNGMFPGDSPLNLSPLQYSNAFDVFAAYGGLNEKSFVDGLNFSLNNMQYSNQQFQPVMAN

SEQ ID NO: 2318 - DNA, 1839 bp, Homo sapiens
agcaacggggtgcggcagggtggggaacgcgggagcggggccagctcccaggaaagctggtctgcgagcggcccctgcccggctcccaggtccctgcgcgaccccgcccttcccgagaccccagccgggctgccgcccgcgtcccggaagctccagcctgaaccatgtttttcacttgtggcccaaatgaggccatggtggtctccgggttctgccgaagccccccagtcatggtggctggagggcgtgtctttgtcctgccctgcatccaacagatccagaggatctctctcaacacactgaccctcaatgtcaagagtgaaaaggtttacactcgccatggggtccccatctcagtcactggcattgcccaggtaaaaatccaggggcagaacaaggagatgttggcggccgcctgtcagatgttcctggggaagacggaggctgagattgcccacattgccctggagacgttagagggccaccagagggccatcatggcccacatgactgtggaggagatctataaggacaggcagaaattctcagaacaggttttcaaagtggcctcctcagacctggtcaacatgggcatcagtgtggttagctacactctgaaggacattcacgatgaccaggactatttgcactctttggggaaggctcgaacagctcaagtccaaaaagatgcacggattggagaagcagaggccaagagagatgctgggatccgggaagctaaagccaagcaggaaaaggtgtctgctcagtacctgagtgagatcgagatggccaaggcacagagagattacgaactgaagaaggccgcctatgacatcgaggtcaacacccgccgagcacaggctgacctggcctatcagcttcaggtggccaagactaagcagcagattgaggagcagcgggtgcaggtgcaggtggtggagcgggcccagcaggtggcagtgcaggagcaggagatcgcccggcgggagaaggagctggaggcccgggtgcggaagccagcggaagcggagcgctacaagctggagcgcctagccgaggcagagaagtcccaactaattatgcaggcggaggcagaagccgcgtctgtgcggatgcgtggggaagctgaggcctttgccataggggcccgagcccgagccgaggctgagcagatggccaagaaggcagaagccttccagctgtaccaagaggctgctcagctggacatgctgctagagaagctgccccaggtggcagaggagatcagtggtcccttgacttcagccaataagatcacactggtgtccagcggcagtgggaccatgggggcagccaaagtgactggggaagtactggacattctaactcgcctgccagagagtgtggaaagactcacaggcgtgagcatctcccaggtgaatcacaagcctttgagaacagcctgagccttcagccctcacagatgcccagcctcatagctgaagttgcctgaatgatcctcctgttgcatgtaacccactggcctccctgagcatgtccattgacagtgaggtcccacccctcatctctccttgccaaatagtttgtgccttgtcttgaagggggttgctccccttgccaacctcacactgctatgattgccaactccagcggtcccatgtcagccttctgatgatcccactccaccccacctcaacttatttaacttcctaattaaatcagactgtttgagcctgttgtctagaatattttcctgaccaagactgagggatgggctggaggttttcaactttgctacccaaataaattgctgtaagtaagtactaaaaaaaaaaa

SEQ ID NO: 2319 - protein, 427 aa, Homo sapiens
MFFTCGPNEAMVVSGFCRSPPVMVAGGRVFVLPCIQQIQRISLNTLTLNVKSEKVYTRHGVPISVTGIAQVKIQGQNKEMLAAACQMFLGKTEAEIAHIALETLEGHQRAIMAHMTVEEIYKDRQKFSEQVFKVASSDLVNMGISVVSYTLKDIHDDQDYLHSLGKARTAQVQKDARIGEAEAKRDAGIREAKAKQEKVSAQYLSEIEMAKAQRDYELKKAAYDIEVNTRRAQADLAYQLQVAKTKQQIEEQRVQVQVVERAQQVAVQEQEIARREKELEARVRKPAEAERYKLERLAEAEKSQLIMQAEAEAASVRMRGEAEAFAIGARARAEAEQMAKKAEAFQLYQEAAQLDMLLEKLPQVAEEISGPLTSANKITLVSSGSGTMGAAKVTGEVLDILTRLPESVERLTGVSISQVNHKPLRTA

SEQ ID NO: 2320 - DNA, 931 bp, Homo sapiens
gcagagcccagggagctggaggtcggcgcttcctctcgtgcttggtccactgacgcgcggccccgccgcgaggagcatcagatccatgctgctgctgactcggagccccacagcttggcacaggctctctcagctcaagcctccggtcctccctgggaccctgggaggccaggccctgcatctgaggtcctggcttttgtcaaggcagggccctgcagagacaggtgggcagggccagccccagggccctgggcttcgaacccggctgctgatcacaggcctgttcggggctggactcggtggggcctggctggccctgagggctgagaaggagaggctgcagcagcaaaagcgaacagaagccctgcgccaggcagctgtgggccagggcgacttccacctgctggatcacagaggccgggctcgctgcaaggctgacttccggggccagtgggtgctgatgtactttggcttcactcactgccctgacatctgcccagacgagctggagaagctggtgcaggtggtgcggcagctggaagcagagcctggtttgcctccagtgcagcctgtcttcatcactgtggaccccgagcgggacgacgttgaagccatggcccgctacgtccaggacttccacccaagactgttgggtctgaccggctccaccaaacaggttgcccaggctagtcacagttaccgcgtgtactacaatgccggccccaaggatgaggaccaggactacatcgtggaccactccattgccatctacctgctcaaccctgacggcctcttcacggattactacggccggagcagatcggctgagcagatctcagacagtgtgcggcggcacatggcggctttccgcagtgtcctgtcttgagccactgcagtctgggccccatcattaaacgggctgcgtttaaaa

SEQ ID NO: 2321 - protein, 266 aa, Homo sapiens
MLLLTRSPTAWHRLSQLKPPVLPGTLGGQALHLRSWLLSRQGPAETGGQGQPQGPGLRTRLLITGLFGAGLGGAWLALRAEKERLQQQKRTEALRQAAVGQGDFHLLDHRGRARCKADFRGQWVLMYFGFTHCPDICPDELEKLVQVVRQLEAEPGLPPVQPVFITVDPERDDVEAMARYVQDFHPRLLGLTGSTKQVAQASHSYRVYYNAGPKDEDQDYIVDHSIAIYLLNPDGLFTDYYGRSRSAEQISDSVRRHMAAFRSVLS

SEQ ID NO: 2322 - DNA, 498 bp, Homo sapiens
tgtttgtttctttcttgttttgcatcaacttttatcagtccatgcaacttcaatgccctcgatgaaggatgcataaaaagccatacttcttaaaaaaaaaaaaagaaaaaaaaagacttccttctgcataaagagatatatttgccacatcagtccctgtagcacagttttcaaaaccattctgtcaaaaatacagtaatacaagactggctttagtgtcactagcttacactgcttttcatgtatttaggccacctgttgttcctggtactgtatcatgcaataagtcatcaagggcttagtctagtgtaccggtaagctagtggcactgaagcgcttttcacaatctcaacatacatttgaattgcaacacacagatatttctagagtattaactagtgaacccttttattattaaaaaaaaaaaaaaactacttacaaccattgaagaaaaaattgcaacaaaaaatgtaaaaattgaccgtctccaacttgtcc

SEQ ID NO: 2323 - DNA, 1637 bp, Homo sapiens
aagaactggcctgtacattttcaaggaattcttgagaggttcttggagagattctgggagccaaacactccattgggatcctagctgttttagagaacaacttgtaatggagccttcatctcttgagctgccggctgacacagtgcagcgcattgcggctgaactcaaatgccacccaacggatgagagggtggctctccacctagatgaggaagataagctgaggcacttcagggagtgcttttatattcccaaaatacaggatctgcctccagttgatttatcattagtgaataaagatgaaaatgccatctatttcttgggaaattctcttggccttcaaccaaaaatggttaaaacatatcttgaagaagaactagataagtgggccaaaatagcagcctatggtcatgaagtggggaagcgtccttggattacaggagatgagagtattgtaggccttatgaaggacattgtaggagccaatgagaaagaaatagccctaatgaatgctttgactgtaaatttacatcttctaatgttatcattttttaagcctacgccaaaacgatataaaattcttctagaagccaaagccttcccttctgatcattatgctattgagtcacaactacaacttcacggacttaacattgaagaaagtatgcggatgataaagccaagagagggggaagaaaccttaagaatagaggatatccttgaagtaattgagaaggaaggagactcaattgcagtgatcctgttcagtggggtgcatttttacactggacagcactttaatattcctgccatcacaaaagctggacaagcgaagggttgttatgttggctttgatctagcacatgcagttggaaatgttgaactctacttacatgactggggagttgattttgcctgctggtgttcctacaagtatttaaatgcaggagcaggaggaattgctggtgccttcattcatgaaaagcatgcccatacgattaaacctgcattagtgggatggtttggccatgaactcagcaccagatttaagatggataacaaactgcagttaatccctggggtctgtggattccgaatttcaaatcctcccattttgttggtctgttccttgcatgctagtttagagatctttaagcaagcgacaatgaaggcattgcggaaaaaatctgttttgctaactggctatctggaatacctgatcaagcataactatggcaaagataaagcagcaaccaagaaaccagttgtgaacataattactccgtctcatgtagaggagcgggggtgccagctaacaataacattttctgttccaaacaaagatgttttccaagaactagaaaaaagaggagtggtttgtgacaagcggaatccaaatggcattcgagtggctccagttcctctctataattctttccatgatgtttataaatttaccaatctgctcacttctatacttgactctgcagaaacaaaaaattagcagtgttttctagaacaacttaagcaaattatactgaaagctgctgtggttatttcagtattattcgatttttaattattgaaagtatgtcaccattgaccacatgtaactaacaataaataatataccttac

SEQ ID NO: 2324 - protein, 465 aa, Homo sapiens
MEPSSLELPADTVQRIAAELKCHPTDERVALHLDEEDKLRHFRECFYIPKIQDLPPVDLSLVNKDENAIYFLGNSLGLQPKMVKTYLEEELDKWAKIAAYGHEVGKRPWITGDESIVGLMKDIVGANEKEIALMNALTVNLHLLMLSFFKPTPKRYKILLEAKAFPSDHYAIESQLQLHGLNIEESMRMIKPREGEETLRIEDILEVIEKEGDSIAVILFSGVHFYTGQHFNIPAITKAGQAKGCYVGFDLAHAVGNVELYLHDWGVDFACWCSYKYLNAGAGGIAGAFIHEKHAHTIKPALVGWFGHELSTRFKMDNKLQLIPGVCGFRISNPPILLVCSLHASLEIFKQATMKALRKKSVLLTGYLEYLIKHNYGKDKAATKKPVVNIITPSHVEERGCQLTITFSVPNKDVFQELEKRGVVCDKRNPNGIRVAPVPLYNSFHDVYKFTNLLTSILDSAETKN

SEQ ID NO: 2325 - DNA, 627 bp, Homo sapiens
agtctccggcgagttgttgcctgggctggacgtggttttgtctgctgcgcccgctcttcgcgctctcgtttcattttctgcagcgcgccacgaggatggcccacaagcagatctactactcggacaagtacttcgacgaacactacgagtaccggcatgttatgttacccagagaactttccaaacaagtacctaaaactcatctgatgtctgaagaggagtggaggagacttggtgtccaacagagtctaggctgggttcattacatgattcatgagccagaaccacatattcttctctttagacgacctcttccaaaagatcaacaaaaatgaagtttatctggggatcgtcaaatctttttcaaatttaatgtatatgtgtatataaggtagtattcagtgaatacttgagaaatgtacaaatctttcatccatacctgtgcatgagctgtattcttcacagcaacagagctcagttaaatgcaactgcaagtaggttactgtaagatgtttaagataaaagttcttccagtcagtttttctcttaagtgcctgtttgagtttactgaaacagtttacttttgttcaataaagtttgtatgttgcatttaaaaaaaaaaaaaaa

SEQ ID NO: 2326 - protein, 79 aa, Homo sapiens
MAHKQIYYSDKYFDEHYEYRHVMLPRELSKQVPKTHLMSEEEWRRLGVQQSLGWVHYMIHEPEPHILLFRRPLPKDQQK

SEQ ID NO: 2327 - DNA, 2538 bp, Homo sapiens
cgcccccaccgccacccaaccaagcatcacccattccagcacttccggcctgacccctgtccagcgcctttcctttctccagcttctgctctgccccaagagtggtcgccttcgtggcagggcacgactctctcccagctcgggtcgccgcccacattagtgtggggccctgcggcctagcgtccctcaccagaggcctccccttgcctagctggaccgccgagggacatcgacgagtatcctcctcctgctgtccccggcttcgcctgccgcccctaaccggccagtcaagatggccgccgctgggtgaggcaagctggcgcgccgcgggggcgtctgggagttgtagttcgggacggcgggctgacgcacttcgccgccggccgacgggcgccattgtgcggcgcgcgccggagtatcctgagctccagctggaccctaaattggatcctcttcctgctgagagtcccctaatgaacattgaggttgttgaggtcctcacactgaaccaggaggtggctggtccccggaatgcccagatccaggccctatatgctgaagatggaagcctgagtgcagatgcccccagtgagcaggtccaacagcagggcaagcatccaggtgaccctgaggccgcgcgccagaggttccggcagttccgttataaggacatgacaggtccccgggaggccctggaccagctccgagagctgtgtcaccagtggctacagcctaaggcacgctccaaggagcagatcctggagctgctggtgctggagcagttcctaggtgcactgcctgtgaagctccggacatgggtggaatcgcagcacccagagaactgccaagaggtggtggccctggtagagggtgtgacctggatgtctgaggaggaagtacttcctgcaggacaacctgccgagggcaccacctgctgcctcgaggtcactgcccagcaggaggagaagcaggaggatgcagccatctgcccagtgacagtgctccctgaggagccagtgaccttccaggatgtggctgtggacttcagccgggaggagtgggggctgctgggcccgacacagaggaccgagtaccgcgatgtgatgctggagacctttgggcacctggtctctgtggggtgggagactacactggaaaataaagagttagctccaaattctgacattcctgaggaagaaccagcccccagcctgaaagtacaagaatcctcaagggattgtgccttgtcctctacattagaagataccttgcagggtggggtccaggaagtccaagacacagtgttgaagcagatggagtctgctcaggaaaaagaccttcctcagaagaagcactttgacaaccgtgagtcccaggcaaacagtggtgctcttgacacaaaccaagtttcgctccagaaaattgacaaccctgagtcccaggcaaacagtggcgctcttgacacaaaccaagttttgctccacaaaattcctcctagaaaacgattgcgcaaacgtgactcacaagttaaaagtatgaaacataattcacgtgtaaaaattcatcagaagagctgtgaaaggcaaaaggccaaggaaggcaatggttgtaggaaaaccttcagtcggagtactaaacagattacgtttataagaattcacaaggggagccaagtttgccgatgcagtgaatgtggtaaaatattccggaacccaagatacttttctgtgcataagaaaatccataccggagagaggccctatgtgtgtcaagactgtgggaaaggatttgttcagagctcttccctcacacagcatcagagagttcattctggagagagaccatttgaatgtcaggagtgtgggaggaccttcaatgatcgctcagccatctcccagcacctgaggactcacactggcgctaagccctacaagtgtcaggactgtggaaaagccttccgccagagctcccacctcatcagacatcagaggactcacaccggggagcgcccatatgcatgcaacaaatgtggaaaggccttcacccagagctcacaccttattgggcaccagagaacccacaataggacaaagcgaaagaagaaacagcctacctcatagctctcaagccagttgaagaaaccttgccttttcagcttgaccctgcaatataacatgcacaggcctgcttgtgaatcaggactgaatgtgaaagggaagtattgagtgaggacattcccaaaaccaaaggacaactgaggagactgcccagcacataatgaataaataagaaaatgagtgaggagttattaacatcatttggaaaaaagatttcccattcacttgatattgtttgttcactcatttagtcattaaaagtgagattaataaaatctgaaaatgttatataataactttaaaaagccaggtaattaataatctgcactgatattacatccacagtaccacagtatttatgtgtatgaattaaggattaaaagataatgtggataaataaactattgatctatgtctgtgt

SEQ ID NO: 2328 - protein, 548 aa, Homo sapiens
MNIEVVEVLTLNQEVAGPRNAQIQALYAEDGSLSADAPSEQVQQQGKHPGDPEAARQRFRQFRYKDMTGPREALDQLRELCHQWLQPKARSKEQILELLVLEQFLGALPVKLRTWVESQHPENCQEVVALVEGVTWMSEEEVLPAGQPAEGTTCCLEVTAQQEEKQEDAAICPVTVLPEEPVTFQDVAVDFSREEWGLLGPTQRTEYRDVMLETFGHLVSVGWETTLENKELAPNSDIPEEEPAPSLKVQESSRDCALSSTLEDTLQGGVQEVQDTVLKQMESAQEKDLPQKKHFDNRESQANSGALDTNQVSLQKIDNPESQANSGALDTNQVLLHKIPPRKRLRKRDSQVKSMKHNSRVKIHQKSCERQKAKEGNGCRKTFSRSTKQITFIRIHKGSQVCRCSECGKIFRNPRYFSVHKKIHTGERPYVCQDCGKGFVQSSSLTQHQRVHSGERPFECQECGRTFNDRSAISQHLRTHTGAKPYKCQDCGKAFRQSSHLIRHQRTHTGERPYACNKCGKAFTQSSHLIGHQRTHNRTKRKKKQPTS

SEQ ID NO: 2329 - DNA, 2743 bp, Homo sapiens
cgcccccaccgccacccaaccaagcatcacccattccagcacttccggcctgacccctgtccagcgcctttcctttctccagcttctgctctgccccaagagtggtcgccttcgtggcagggcacgactctctcccagctcgggtcgccgcccacattagtgtggggccctgcggcctagcgtccctcaccagaggcctccccttgcctagctggaccgccgagggacatcgacgagtatcctcctcctgctgtccccggcttcgcctgccgcccctaaccggccagtcaagatggccgccgctgggtgaggcaagctggcgcgccgcgggggcgtctgggagttgtagttcgggacggcgggctgacgcacttcgccgccggccgacgggcgccattgtgcggcgcgcgccgggactctgcccacttccaccagagacacattgagaaggaggaaactatggcctccaggcttccgacggcctggtcctgtgaaccagtgacctttgaagatgtaacactgggttttaccccggaagagtggggactgctggacctcaaacagaagtccctgtacagggaagtgatgctggagaactacaggaacctggtctcagtggagtatcctgagctccagctggaccctaaattggatcctcttcctgctgagagtcccctaatgaacattgaggttgttgaggtcctcacactgaaccaggaggtggctggtccccggaatgcccagatccaggccctatatgctgaagatggaagcctgagtgcagatgcccccagtgagcaggtccaacagcagggcaagcatccaggtgaccctgaggccgcgcgccagaggttccggcagttccgttataaggacatgacaggtccccgggaggccctggaccagctccgagagctgtgtcaccagtggctacagcctaaggcacgctccaaggagcagatcctggagctgctggtgctggagcagttcctaggtgcactgcctgtgaagctccggacatgggtggaatcgcagcacccagagaactgccaagaggtggtggccctggtagagggtgtgacctggatgtctgaggaggaagtacttcctgcaggacaacctgccgagggcaccacctgctgcctcgaggtcactgcccagcaggaggagaagcaggaggatgcagccatctgcccagtgacagtgctccctgaggagccagtgaccttccaggatgtggctgtggacttcagccgggaggagtgggggctgctgggcccgacacagaggaccgagtaccgcgatgtgatgctggagacctttgggcacctggtctctgtggggtgggagactacactggaaaataaagagttagctccaaattctgacattcctgaggaagaaccagcccccagcctgaaagtacaagaatcctcaagggattgtgccttgtcctctacattagaagataccttgcagggtggggtccaggaagtccaagacacagtgttgaagcagatggagtctgctcaggaaaaagaccttcctcagaagaagcactttgacaaccgtgagtcccaggcaaacagtggtgctcttgacacaaaccaagtttcgctccagaaaattgacaaccctgagtcccaggcaaacagtggcgctcttgacacaaaccaagttttgctccacaaaattcctcctagaaaacgattgcgcaaacgtgactcacaagttaaaagtatgaaacataattcacgtgtaaaaattcatcagaagagctgtgaaaggcaaaaggccaaggaaggcaatggttgtaggaaaaccttcagtcggagtactaaacagattacgtttataagaattcacaaggggagccaagtttgccgatgcagtgaatgtggtaaaatattccggaacccaagatacttttctgtgcataagaaaatccataccggagagaggccctatgtgtgtcaagactgtgggaaaggatttgttcagagctcttccctcacacagcatcagagagttcattctggagagagaccatttgaatgtcaggagtgtgggaggaccttcaatgatcgctcagccatctcccagcacctgaggactcacactggcgctaagccctacaagtgtcaggactgtggaaaagccttccgccagagctcccacctcatcagacatcagaggactcacaccggggagcgcccatatgcatgcaacaaatgtggaaaggccttcacccagagctcacaccttattgggcaccagagaacccacaataggacaaagcgaaagaagaaacagcctacctcatagctctcaagccagttgaagaaaccttgccttttcagcttgaccctgcaatataacatgcacaggcctgcttgtgaatcaggactgaatgtgaaagggaagtattgagtgaggacattcccaaaaccaaaggacaactgaggagactgcccagcacataatgaataaataagaaaatgagtgaggagttattaacatcatttggaaaaaagatttcccattcacttgatattgtttgttcactcatttagtcattaaaagtgagattaataaaatctgaaaatgttatataataactttaaaaagccaggtaattaataatctgcactgatattacatccacagtaccacagtatttatgtgtatgaattaaggattaaaagataatgtggataaataaactattgatctatgtctgtgt

SEQ ID NO: 2330 - protein, 621 aa, Homo sapiens
MASRLPTAWSCEPVTFEDVTLGFTPEEWGLLDLKQKSLYREVMLENYRNLVSVEYPELQLDPKLDPLPAESPLMNIEVVEVLTLNQEVAGPRNAQIQALYAEDGSLSADAPSEQVQQQGKHPGDPEAARQRFRQFRYKDMTGPREALDQLRELCHQWLQPKARSKEQILELLVLEQFLGALPVKLRTWVESQHPENCQEVVALVEGVTWMSEEEVLPAGQPAEGTTCCLEVTAQQEEKQEDAAICPVTVLPEEPVTFQDVAVDFSREEWGLLGPTQRTEYRDVMLETFGHLVSVGWETTLENKELAPNSDIPEEEPAPSLKVQESSRDCALSSTLEDTLQGGVQEVQDTVLKQMESAQEKDLPQKKHFDNRESQANSGALDTNQVSLQKIDNPESQANSGALDTNQVLLHKIPPRKRLRKRDSQVKSMKHNSRVKIHQKSCERQKAKEGNGCRKTFSRSTKQITFIRIHKGSQVCRCSECGKIFRNPRYFSVHKKIHTGERPYVCQDCGKGFVQSSSLTQHQRVHSGERPFECQECGRTFNDRSAISQHLRTHTGAKPYKCQDCGKAFRQSSHLIRHQRTHTGERPYACNKCGKAFTQSSHLIGHQRTHNRTKRKKKQPTS

SEQ ID NO: 2331 - DNA, 2839 bp, Homo sapiens
cgcccccaccgccacccaaccaagcatcacccattccagcacttccggcctgacccctgtccagcgcctttcctttctccagcttctgctctgccccaagagtggtcgccttcgtggcagggcacgactctctcccagctcgggtcgccgcccacattagtgtggggccctgcggcctagcgtccctcaccagaggcctccccttgcctagctggaccgccgagggacatcgacgagtatcctcctcctgctgtccccggcttcgcctgccgcccctaaccggccagtcaagatggccgccgctgggtgaggcaagctggcgcgccgcgggggcgtctgggagttgtagttcgggacggcgggctgacgcacttcgccgccggccgacgggcgccattgtgcggcgcgcgccgggactctgcccacttccaccagagacacattgagaaggaggaaactatggcctccaggcttccgacggcctggtcctgtgaaccagtgacctttgaagatgtaacactgggttttaccccggaagagtggggactgctggacctcaaacagaagtccctgtacagggaagtgatgctggagaactacaggaacctggtctcagtggaacatcagctttccaaaccagatgtggtatctcagttagaggaggcagaagatttctggccagtggagagaggaattcctcaagacaccattccagagtatcctgagctccagctggaccctaaattggatcctcttcctgctgagagtcccctaatgaacattgaggttgttgaggtcctcacactgaaccaggaggtggctggtccccggaatgcccagatccaggccctatatgctgaagatggaagcctgagtgcagatgcccccagtgagcaggtccaacagcagggcaagcatccaggtgaccctgaggccgcgcgccagaggttccggcagttccgttataaggacatgacaggtccccgggaggccctggaccagctccgagagctgtgtcaccagtggctacagcctaaggcacgctccaaggagcagatcctggagctgctggtgctggagcagttcctaggtgcactgcctgtgaagctccggacatgggtggaatcgcagcacccagagaactgccaagaggtggtggccctggtagagggtgtgacctggatgtctgaggaggaagtacttcctgcaggacaacctgccgagggcaccacctgctgcctcgaggtcactgcccagcaggaggagaagcaggaggatgcagccatctgcccagtgacagtgctccctgaggagccagtgaccttccaggatgtggctgtggacttcagccgggaggagtgggggctgctgggcccgacacagaggaccgagtaccgcgatgtgatgctggagacctttgggcacctggtctctgtggggtgggagactacactggaaaataaagagttagctccaaattctgacattcctgaggaagaaccagcccccagcctgaaagtacaagaatcctcaagggattgtgccttgtcctctacattagaagataccttgcagggtggggtccaggaagtccaagacacagtgttgaagcagatggagtctgctcaggaaaaagaccttcctcagaagaagcactttgacaaccgtgagtcccaggcaaacagtggtgctcttgacacaaaccaagtttcgctccagaaaattgacaaccctgagtcccaggcaaacagtggcgctcttgacacaaaccaagttttgctccacaaaattcctcctagaaaacgattgcgcaaacgtgactcacaagttaaaagtatgaaacataattcacgtgtaaaaattcatcagaagagctgtgaaaggcaaaaggccaaggaaggcaatggttgtaggaaaaccttcagtcggagtactaaacagattacgtttataagaattcacaaggggagccaagtttgccgatgcagtgaatgtggtaaaatattccggaacccaagatacttttctgtgcataagaaaatccataccggagagaggccctatgtgtgtcaagactgtgggaaaggatttgttcagagctcttccctcacacagcatcagagagttcattctggagagagaccatttgaatgtcaggagtgtgggaggaccttcaatgatcgctcagccatctcccagcacctgaggactcacactggcgctaagccctacaagtgtcaggactgtggaaaagccttccgccagagctcccacctcatcagacatcagaggactcacaccggggagcgcccatatgcatgcaacaaatgtggaaaggccttcacccagagctcacaccttattgggcaccagagaacccacaataggacaaagcgaaagaagaaacagcctacctcatagctctcaagccagttgaagaaaccttgccttttcagcttgaccctgcaatataacatgcacaggcctgcttgtgaatcaggactgaatgtgaaagggaagtattgagtgaggacattcccaaaaccaaaggacaactgaggagactgcccagcacataatgaataaataagaaaatgagtgaggagttattaacatcatttggaaaaaagatttcccattcacttgatattgtttgttcactcatttagtcattaaaagtgagattaataaaatctgaaaatgttatataataactttaaaaagccaggtaattaataatctgcactgatattacatccacagtaccacagtatttatgtgtatgaattaaggattaaaagataatgtggataaataaactattgatctatgtctgtgt

SEQ ID NO: 2332 - protein, 653 aa, Homo sapiens
MASRLPTAWSCEPVTFEDVTLGFTPEEWGLLDLKQKSLYREVMLENYRNLVSVEHQLSKPDVVSQLEEAEDFWPVERGIPQDTIPEYPELQLDPKLDPLPAESPLMNIEVVEVLTLNQEVAGPRNAQIQALYAEDGSLSADAPSEQVQQQGKHPGDPEAARQRFRQFRYKDMTGPREALDQLRELCHQWLQPKARSKEQILELLVLEQFLGALPVKLRTWVESQHPENCQEVVALVEGVTWMSEEEVLPAGQPAEGTTCCLEVTAQQEEKQEDAAICPVTVLPEEPVTFQDVAVDFSREEWGLLGPTQRTEYRDVMLETFGHLVSVGWETTLENKELAPNSDIPEEEPAPSLKVQESSRDCALSSTLEDTLQGGVQEVQDTVLKQMESAQEKDLPQKKHFDNRESQANSGALDTNQVSLQKIDNPESQANSGALDTNQVLLHKIPPRKRLRKRDSQVKSMKHNSRVKIHQKSCERQKAKEGNGCRKTFSRSTKQITFIRIHKGSQVCRCSECGKIFRNPRYFSVHKKIHTGERPYVCQDCGKGFVQSSSLTQHQRVHSGERPFECQECGRTFNDRSAISQHLRTHTGAKPYKCQDCGKAFRQSSHLIRHQRTHTGERPYACNKCGKAFTQSSHLIGHQRTHNRTKRKKKQPTS

SEQ ID NO: 2333 - DNA, 4908 bp, Homo sapiens
acctgcgtgcagtcggtcctccaggccacgcagcgcccgagagtaccagggagactccggcccctgtcggcgccaagcccctccgcccctcacagcgcccaggtccgcggccgggccttgattttttggcggggaccgtcatggcgtcgcagccaaattcgtctgcgaagaagaaagaggagaaggggaagaacatccaggtggtggtgagatgcagaccatttaatttggcagagcggaaagctagcgcccattcaatagtagaatgtgatcctgtacgaaaagaagttagtgtacgaactggaggattggctgacaagagctcaaggaaaacatacacttttgatatggtgtttggagcatctactaaacagattgatgtttaccgaagtgttgtttgtccaattctggatgaagttattatgggctataattgcactatctttgcgtatggccaaactggcactggaaaaacttttacaatggaaggtgaaaggtcacctaatgaagagtatacctgggaagaggatcccttggctggtataattccacgtacccttcatcaaatttttgagaaacttactgataatggtactgaattttcagtcaaagtgtctctgttggagatctataatgaagagctttttgatcttcttaatccatcatctgatgtttctgagagactacagatgtttgatgatccccgtaacaagagaggagtgataattaaaggtttagaagaaattacagtacacaacaaggatgaagtctatcaaattttagaaaagggggcagcaaaaaggacaactgcagctactctgatgaatgcatactctagtcgttcccactcagttttctctgttacaatacatatgaaagaaactacgattgatggagaagagcttgttaaaatcggaaagttgaacttggttgatcttgcaggaagtgaaaacattggccgttctggagctgttgataagagagctcgggaagctggaaatataaatcaatccctgttgactttgggaagggtcattactgcccttgtagaaagaacacctcatgttccttatcgagaatctaaactaactagaatcctccaggattctcttggagggcgtacaagaacatctataattgcaacaatttctcctgcatctctcaatcttgaggaaactctgagtacattggaatatgctcatagagcaaagaacatattgaataagcctgaagtgaatcagaaactcaccaaaaaagctcttattaaggagtatacggaggagatagaacgtttaaaacgagatcttgctgcagcccgtgagaaaaatggagtgtatatttctgaagaaaattttagagtcatgagtggaaaattaactgttcaagaagagcagattgtagaattgattgaaaaaattggtgctgttgaggaggagctgaatagggttacagagttgtttatggataataaaaatgaacttgaccagtgtaaatctgacctgcaaaataaaacacaagaacttgaaaccactcaaaaacatttgcaagaaactaaattacaacttgttaaagaagaatatatcacatcagctttggaaagtactgaggagaaacttcatgatgctgccagcaagctgcttaacacagttgaagaaactacaaaagatgtatctggtctccattccaaactggatcgtaagaaggcagttgaccaacacaatgcagaagctcaggatatttttggcaaaaacctgaatagtctgtttaataatatggaagaattaattaaggatggcagctcaaagcaaaaggccatgctagaagtacataagaccttatttggtaatctgctgtcttccagtgtctctgcattagataccattactacagtagcacttggatctctcacatctattccagaaaatgtgtctactcatgtttctcagatttttaatatgatactaaaagaacaatcattagcagcagaaagtaaaactgtactacaggaattgattaatgtactcaagactgatcttctaagttcactggaaatgattttatccccaactgtggtgtctatactgaaaatcaatagtcaactaaagcatattttcaagacttcattgacagtggccgataagatagaagatcaaaaaaaggaactagatggctttctcagtatactgtgtaacaatctacatgaactacaagaaaataccatttgttccttggttgagtcacaaaagcaatgtggaaacctaactgaagacctgaagacaataaagcagacccattcccaggaactttgcaagttaatgaatctttggacagagagattctgtgctttggaggaaaagtgtgaaaatatacagaaaccacttagtagtgtccaggaaaatatacagcagaaatctaaggatatagtcaacaaaatgacttttcacagtcaaaaattttgtgctgattctgatggcttctcacaggaactcagaaattttaaccaagaaggtacaaaattggttgaagaatctgtgaaacactctgataaactcaatggcaacctggaaaaaatatctcaagagactgaacagagatgtgaatctctgaacacaagaacagtttatttttctgaacagtgggtatcttccttaaatgaaagggaacaggaacttcacaacttattggaggttgtaagccaatgttgtgaggcttcaagttcagacatcactgagaaatcagatggacgtaaggcagctcatgagaaacagcataacatttttcttgatcagatgactattgatgaagataaattgatagcacaaaatctagaacttaatgaaaccataaaaattggtttgactaagcttaattgctttctggaacaggatctgaaactggatatcccaacaggtacgacaccacagaggaaaagttatttatacccatcaacactggtaagaactgaaccacgtgaacatctccttgatcagctgaaaaggaaacagcctgagctgttaatgatgctaaactgttcagaaaacaacaaagaagagacaattccggatgtggatgtagaagaggcagttctggggcagtatactgaagaacctctaagtcaagagccatctgtagatgctggtgtggattgttcatcaattggcggggttccatttttccagcataaaaaatcacatggaaaagacaaagaaaacagaggcattaacacactggagaggtctaaagtggaagaaactacagagcacttggttacaaagagcagattacctctgcgagcccagatcaacctttaattcacttgggggttggcaattttatttttaaagaaaacttaaaaataaaacctgaaaccccagaacttgagccttgtgtatagattttaaaagaatatatatatcagccgggcgcggtggctcatgcctgtaatcccagcactttgggaggctgaggcgggtggattgcttgagcccaggagtttgagaccagcctggccaacgtggcaaaacctcgtctctgttaaaaattagccgggcgtggtggcacactcctgtaatcccagctactggggaggctgaggcacgagaatcacttgaacccaggaagcggggttgcagtgagccaaaggtacaccactacactccagcctgggcaacagagcaagactcggtctcaaaaacaaaatttaaaaaagatataaggcagtactgtaaattcagttgaattttgatatctacccatttttctgtcatccctatagttcactttgtattaaattgggtttcatttgggatttgcaatgtaaatacgtatttctagttttcatataaagtagttcttttataacaaatgaaaagtatttttcttgtatattattaagtaatgaatatataagaactgtactcttctcagcttgagcttaacataggtaaatatcaccaacatctgtccttagaaaggaccatctcatgttttttttcttgctatgacttgtgtattttcttgcatcctccctagacttccctatttcgctttctcctcggctcactttctccctttttatttttcaccaaaccatttgtagagctacaaaacctatcctttcttattttcagtagtcagaattttatctagaaatcttttaacacctttttagtggttatttctaaaatcactgtcaacaataaatctaaccctagttgtatccctcctttaagtatttaaaacttgttgccccaaatgtgaaagcatttaattcctttaagaggcctaactcattcaccctgacagagttcacaaaaagcccactttagagtatacattgctattatgggagaccacccagacatctgactaatggctctgtgccacactccaagacctgtgccttttagagaagctcacaatgatttaaggactgtttgaaacttccaattatgtctataatttatattcttttgtttacatgatgaaactttttgttgttgcttgtttgtatataatacaatgtgtacatgtatctttttctcgattcaaatcttaacccttaggactctggtatttttgatctggcaaccatatttctggaagttgagatgtttcagcttgaagaaccaaaacagaaggaatatgtacaaagaataaattttctgctcacgatgagtttagtgtgtaaagtttagagacatctgactttgatagctaaattaaaccaaaccctattgaagaattgaatatatgctacttcaagaaactaaattgatctcgtagaattatcttaataaaataatggctataatttctctgcaaaatcagatgtcagcataagcgatggataatacctaataaactgccctcagtaaatccatggttaataaatgtggtttctacatt

SEQ ID NO: 2334 - protein, 1056 aa, Homo sapiens
MASQPNSSAKKKEEKGKNIQVVVRCRPFNLAERKASAHSIVECDPVRKEVSVRTGGLADKSSRKTYTFDMVFGASTKQIDVYRSVVCPILDEVIMGYNCTIFAYGQTGTGKTFTMEGERSPNEEYTWEEDPLAGIIPRTLHQIFEKLTDNGTEFSVKVSLLEIYNEELFDLLNPSSDVSERLQMFDDPRNKRGVIIKGLEEITVHNKDEVYQILEKGAAKRTTAATLMNAYSSRSHSVFSVTIHMKETTIDGEELVKIGKLNLVDLAGSENIGRSGAVDKRAREAGNINQSLLTLGRVITALVERTPHVPYRESKLTRILQDSLGGRTRTSIIATISPASLNLEETLSTLEYAHRAKNILNKPEVNQKLTKKALIKEYTEEIERLKRDLAAAREKNGVYISEENFRVMSGKLTVQEEQIVELIEKIGAVEEELNRVTELFMDNKNELDQCKSDLQNKTQELETTQKHLQETKLQLVKEEYITSALESTEEKLHDAASKLLNTVEETTKDVSGLHSKLDRKKAVDQHNAEAQDIFGKNLNSLFNNMEELIKDGSSKQKAMLEVHKTLFGNLLSSSVSALDTITTVALGSLTSIPENVSTHVSQIFNMILKEQSLAAESKTVLQELINVLKTDLLSSLEMILSPTVVSILKINSQLKHIFKTSLTVADKIEDQKKELDGFLSILCNNLHELQENTICSLVESQKQCGNLTEDLKTIKQTHSQELCKLMNLWTERFCALEEKCENIQKPLSSVQENIQQKSKDIVNKMTFHSQKFCADSDGFSQELRNFNQEGTKLVEESVKHSDKLNGNLEKISQETEQRCESLNTRTVYFSEQWVSSLNEREQELHNLLEVVSQCCEASSSDITEKSDGRKAAHEKQHNIFLDQMTIDEDKLIAQNLELNETIKIGLTKLNCFLEQDLKLDIPTGTTPQRKSYLYPSTLVRTEPREHLLDQLKRKQPELLMMLNCSENNKEETIPDVDVEEAVLGQYTEEPLSQEPSVDAGVDCSSIGGVPFFQHKKSHGKDKENRGINTLERSKVEETTEHLVTKSRLPLRAQINL

SEQ ID NO: 2335 - DNA, 941 bp, Homo sapiens
gggggccgttggcgaagccagctgctggaggtgccgagaatctgagtttcggcaagcagccaggtctggaaactgtaacaggacattcagttagtaatgatggttgcaggttgaatagtctcgccctagatctcacctaacttgcagaatattttaaaaatgactacaccaaacaagacacctcctggtgctgaccccaagcagttggaaaggactggaacagtacgggaaattgggtcacaagctgtttggtcactctcatcttgcaaaccaggatttggagtggatcagttacgagatgacaatctagaaacttattggcaatcagatggttcccagcctcatttagtgaacatccaattcagaagaaaaacaacagtgaagacattatgtatttatgcagactacaaatctgatgaaagctatactccaagcaagatctcagtcagagtaggaaataattttcacaacctacaagaaattcggcaacttgagttggtggaaccaagtggctggattcatgttcccttaactgacaatcataagaagccaactcgttcattcatgatacagattgctgttctagccaatcacctgaatggaagagacacccatatgagacaaattaaaatatacacaccagtagaagagagctccattggtaaatttcctagatgtacaactatagatttcatgatgtatcgttcaataaggtgactttaaaatgagacgaaaatcattaaacgtatctttgttttatcctgtattcaaataatatatcatgtacctttattgaacaaggcatccgttatatctaattttgtatatgtttaaaaatattttattgtaactttgacaaataaatttggggtcatattatctttattttctttaacatgtaataaagctcacatattttacaaaaaaaaaaaaaaaaaaac

SEQ ID NO: 2336 - protein, 185 aa, Homo sapiens
MTTPNKTPPGADPKQLERTGTVREIGSQAVWSLSSCKPGFGVDQLRDDNLETYWQSDGSQPHLVNIQFRRKTTVKTLCIYADYKSDESYTPSKISVRVGNNFHNLQEIRQLELVEPSGWIHVPLTDNHKKPTRSFMIQIAVLANHLNGRDTHMRQIKIYTPVEESSIGKFPRCTTIDFMMYRSIR

SEQ ID NO: 2337 - DNA, 5895 bp, Homo sapiens
gttccttattgtggttcctgctgtggttttgatcatgttgttaccctcggacgtagcccggcttgtattgggttacttacagcaagaaaacctcatttctacctgccagacttttattttggaaagttcagatttaaaagaatatgcagaacattgtacagatgaagggtttattccagcctgcttactgtccttatttggaaaaaacttgacaacaattttaaatgagtatgtagctatgaaaacaaaagaaacatcaaataatgtcccagcaataatgtcatctctatggaagaaattggaccatacactttctcagatcaggagcatgcaaagttccccaaggtttgctggcagtcagagagcccgaacgagaactggaattgcagaaatcaaacggcagagaaagcttgcatctcaaacagctccagccagtgcagagttgctcactttaccttacctttcaggacagtttaccactcctccttccacaggtacacaggttactcgaccaagtggccaaatttcagatccatcgaggtcatattttgtagtggtcaaccactcacagtcacaagatactgtaaccactggagaagctttaaatgtcattcctggtgctcaggaaaagaaagcacatgccagtttaatgtctcccggtagacgcaaaagtgaatctcagagaaaaagtaccactttgtctggccctcattcaacaatacggaatttccaagatccaaacgcttttgcagtagaaaaacaaatggttattgaaaatgcacgagaaaaaatactaagcaacaaatctcttcaagaaaagctagcagaaaacataaataaatttttaactagtgataacaatattgcccaagtacctaagcaaacagataacaaccctacggagccagagacttcacttgatgaattcctaggacttccgagtgaaattcacatgtctgaagaagctatacaggacatattggaacagacagaatcagacccagcatttcaggcactctttgatctctttgactatggcaaaacaaagaataataaaaatatatcacaaagtatttccagtcaacctatggaatccaatcccagtatagtcttagcagatgaaactaatctagcagttaaaggttcttttgaaacagaagaatctgatggtcagtctggtcagcccgctttttgtacatcctatcagaatgatgacccattaaatgctatgaagaatagcaacaaccatgatgtgcttagacaagaagaccaggaaaatttttcccaaataagtaccagcatacagaaaaaggcctttaaaacagctgtacccactgaacagaagtgtgacattgacattacctttgagtccgtgcctaatttgaatgactttaaccaaagagggaattctaatgctgaatgtaatccacattgtgctgaattaaacaccaatcagatgtccactgaaactgaaatggctatagggattgaaaagaactctttgtcttcaaatgtaccgagtgaatctcagttacagcctgatcagcctgatataccaataacttcatttgtttcacttggttgtgaagctaacaatgaaaacttaattctctctgggaagagttctcaacttttatcccaagatacttcattaactggaaagccatctaaaaaaagtcaattttgtgaaaattctaatgatacagtaaaacttaaaattaattttcatggttccaagtcatcagattctagtgaaattcacaagagtaaaatagaaattaatgtgttagaaccagttatgtcacagctatcaaattgccaagataattcttgtcttcaaagtgaaatactacctgtgtctgttgaaagttcacatttaaatgtatctggacaaatagaaattcatcttggagattcgctgtcttctactaaacaaccatctaatgattcagcatctgttgagttaaatcatacagaaaatgaagctcaggcatccaagtctgagaattcacaggagccttcatcttctgtaaaagaagagaatactatttttctctctttaggaggaaatgctaactgtgagaaagttgcactgacgcctccagaaggcactcctgtagaaaacagtcactctcttcctccagaatctgtgtgttcttcagtgggagattctcaccctgagtcccaaaatactgatgataaaccttctagcaacaactcagcagagatagatgcatcaaatatcgtctctctcaaagttatcattagtgatgatccatttgtttcctcagatactgaacttaccagtgctgtttctagtattaatggagaaaacctgccaactataatcttgtcttctcctactaaatcacctactaaaaatgcagaactagttaaatgcctatcttcagaagaaactgtaggtgctgttgtatatgccgaagtaggggattcagcctcaatggaacagagtcttttaacattcaaatctgaagactctgcagtaaacaatactcagaatgaagatggcattgctttttcagctaatgttacaccatgtgtttccaaggatggaggatatatacagttgatgccagccacaagcacagcttttggcaattcaaataacattctgatagctacctgtgtgactgatccaacagcgttaggaacatctgtaagtcagtctaatgtagtggtgttgcctggaaattctgcacctatgactgctcaacctctaccacctcagttacagacaccaccaaggtcaaacagtgtatttgctgtcaaccaagctgtgtcaccaaacttttcacaaggatctgccataataattgcctctccagtccagcctgtactccaaggaatggtagggatgatcccagtatctgtggttggacagaatggaaataacttttctactcctcctcgggaggttcttcatatgcctgtgacagcacctgtatgcaatagaagtatccctcaattccccgcccctccaaaatctcagaaggctcagggactaagaaacaagccttgtataggaaaacaagtaaataatttggtggattcgtcaggtcattcagttggatgtcatgcacaaaaaactgaagtttctgacaaaagtattgccacagatcttgggaaaaaatcagaagaaaccacagttcccttcccagaagagagtatagttccagctgctaaaccatgccacagacgtgtactctgtttcgacagcactactgctcctgtggcaaatacgcaggggccaaaccataagatggtgtcccaaaacaaagaaaggaatgcagtctcttttcctaatcttgactcacccaatgtgtcctccaccttaaaacccccttctaataatgctatcaaaagagagaaagagaagcctcctctgcctaagattttatctaaatcggaaagtgccattagccggcataccaccataagagaaactcaatcagaaaagaaagtttcaccaacagaaattgtgcttgaatctttccataaagcaacagctaataaggagaatgaattatgcagcgatgtagaaagacagaaaaatccagaaaattcaaaactatctattgggcagcgaaatgggggtttgcgaagtgagaaatctatagcttcactgcaagaaatgaccaaaaaacaaggcacatcttcaaacaataaaaatgtactttcagtaggtacagctgtgaaggatctaaaacaagaacaaactaaatccgccagttctttgattaccacagaaatgttacaggatatacagaggcacagctcagtaagtaggcttgctgatagtagtgatttacctgtgccccggacacctggctcaggggcaggggaaaaacataaagaagaacctatagatattatcaaggccccctctagtaggcgtttcagtgaagacagtagtacatcaaaagtaatggtccctcctgtcaccccagacttgcctgcctgcagccctgccagtgaaacaggaagtgaaaacagtgtaaatatggctgcccacacattaatgattctctccagggcagccatttctaggactacttcagcaactcctctgaaagataacacacaacagtttagagcatcttcaaggagcaccacaaaaaagcggaaaattgaggaattagatgaacgtgagcgaaactctcgtccttctagtaaaaatcttacaaattcatcaataccaatgaaaaagaagaaaattaagaaaaagaagcttcccagttcatttccagcaggaatggatgtagacaaatttttgttatcattgcattatgatgagtaaacattctggacacataagaacagtaggtgttaaaaactcatatcccttaaactgagtgtagggaatgggatattgacagaatctgaaagcatgacctgcactttcattgtactgaaacttcactttatatctaaatcatgctgtttctgaaacagcttcctagtttgtaaatagacttacttggtatatttttattttgggaaaaacgtttgcagaaatgtaagtaaagccaatctgcaaaactgtatagctttgacaattccatattgtaaatactgtgtaaatcttgttgaaatagaggttaaatcaacctaatgttcttacactgtgttttttgacttcttatgatccctaattctgagacttactcatctggaatagtttctcacttgttttggaggaaaatgatgcttattcttataaattaccttcagtaactattcaataagacatttaaatacacaatcactaagtactacaaaataataaccacctcaactgatagcaaaatatctaattagaaatcaacagtttgatgagtttttttcctagagtgaatactacccctttcttataattgctgtaagtattatatttctggaatttcacactttacctactctgatcactctgttctctttgttttaaagagagaattttgtaaaccatttattgaatgttctgatctttcatttataacttaagattttttacagaactttaagtggttagactattgagccataaaattttggtttgtagtagagatttctcggtatgtacttttcccctaaatgctggggatttaaagaattgcactaattcatagaactctttacattgtagtgaccaatgcacatataatttaaatcttgtgttctatgtgagagtttatgtggaggattatcttctggtgttgtgtccatcataagatgtaaaaagagaaatcatagttttatattttagtttctcctacaatgggtatgttaaataactatatctatacttagatatagtgcattgtctgtgtcccttaaagtgttacaaagagtttctctcaaaaggtccttaaggagagtgagagatgagagaggtgccttctctgtattagactcacacacatcagtccagttgaagaattggtttaaacttttaaatgagaacagaaattataattagtacctgaccaattgtgcctagatattaaagtatgttctctttagtactttccgttcaattaaatatcagtatattagggatttttttctacaggtgtatattttgttgaagagtcactttcctcaaccatttttttgtactgggcctttaaaaaaataaatccatccaactttaacacaacatttctcagtgtagaaatcatgtcttcttaattgctgaaccttactgcaaaaacttgtgatgttaagaaatttgtatggtgtggcagtggtctattcctaaggaactaaatatcatatagttaatgtttatttaactcagcttgagactgtactacagttaggtttgaataaatattttcattaacttcaaaaaaaaaaaaaaaaaaaaaaaaaaaa

SEQ ID NO: 2338 - protein, 1427 aa, Homo sapiens
MLLPSDVARLVLGYLQQENLISTCQTFILESSDLKEYAEHCTDEGFIPACLLSLFGKNLTTILNEYVAMKTKETSNNVPAIMSSLWKKLDHTLSQIRSMQSSPRFAGSQRARTRTGIAEIKRQRKLASQTAPASAELLTLPYLSGQFTTPPSTGTQVTRPSGQISDPSRSYFVVVNHSQSQDTVTTGEALNVIPGAQEKKAHASLMSPGRRKSESQRKSTTLSGPHSTIRNFQDPNAFAVEKQMVIENAREKILSNKSLQEKLAENINKFLTSDNNIAQVPKQTDNNPTEPETSLDEFLGLPSEIHMSEEAIQDILEQTESDPAFQALFDLFDYGKTKNNKNISQSISSQPMESNPSIVLADETNLAVKGSFETEESDGQSGQPAFCTSYQNDDPLNAMKNSNNHDVLRQEDQENFSQISTSIQKKAFKTAVPTEQKCDIDITFESVPNLNDFNQRGNSNAECNPHCAELNTNQMSTETEMAIGIEKNSLSSNVPSESQLQPDQPDIPITSFVSLGCEANNENLILSGKSSQLLSQDTSLTGKPSKKSQFCENSNDTVKLKINFHGSKSSDSSEIHKSKIEINVLEPVMSQLSNCQDNSCLQSEILPVSVESSHLNVSGQIEIHLGDSLSSTKQPSNDSASVELNHTENEAQASKSENSQEPSSSVKEENTIFLSLGGNANCEKVALTPPEGTPVENSHSLPPESVCSSVGDSHPESQNTDDKPSSNNSAEIDASNIVSLKVIISDDPFVSSDTELTSAVSSINGENLPTIILSSPTKSPTKNAELVKCLSSEETVGAVVYAEVGDSASMEQSLLTFKSEDSAVNNTQNEDGIAFSANVTPCVSKDGGYIQLMPATSTAFGNSNNILIATCVTDPTALGTSVSQSNVVVLPGNSAPMTAQPLPPQLQTPPRSNSVFAVNQAVSPNFSQGSAIIIASPVQPVLQGMVGMIPVSVVGQNGNNFSTPPREVLHMPVTAPVCNRSIPQFPAPPKSQKAQGLRNKPCIGKQVNNLVDSSGHSVGCHAQKTEVSDKSIATDLGKKSEETTVPFPEESIVPAAKPCHRRVLCFDSTTAPVANTQGPNHKMVSQNKERNAVSFPNLDSPNVSSTLKPPSNNAIKREKEKPPLPKILSKSESAISRHTTIRETQSEKKVSPTEIVLESFHKATANKENELCSDVERQKNPENSKLSIGQRNGGLRSEKSIASLQEMTKKQGTSSNNKNVLSVGTAVKDLKQEQTKSASSLITTEMLQDIQRHSSVSRLADSSDLPVPRTPGSGAGEKHKEEPIDIIKAPSSRRFSEDSSTSKVMVPPVTPDLPACSPASETGSENSVNMAAHTLMILSRAAISRTTSATPLKDNTQQFRASSRSTTKKRKIEELDERERNSRPSSKNLTNSSIPMKKKKIKKKKLPSSFPAGMDVDKFLLSLHYDE

SEQ ID NO: 2339 - DNA, 2197 bp, Homo sapiens
gtcgccgctgccgggttgccagcggagtcgcgcgtcgggagctacgtagggcagagaagtcatggcttctccgtccaaaggcaatgacttgttttcgcccgacgaggagggcccagcagtggtggccggaccaggcccggggcctgggggcgccgagggggccgcggaggagcgccgcgtcaaggtctccagcctgcccttcagcgtggaggcgctcatgtccgacaagaagccgcccaaggaggcgtccccgctgccggccgaaagcgcctcggccggggccaccctgcggccactgctgctgtcggggcacggcgctcgggaagcgcacagccccgggccgctggtgaagcccttcgagaccgcctcggtcaagtcggaaaattcagaagatggagcggcgtggatgcaggaacccggccgatattcgccgccgccaagacatatgagccctaccacctgcaccctgaggaaacacaagaccaatcggaagccgcgcacgccctttaccacatcccagctcctcgccctggagcgcaagttccgtcagaaacagtacctctccattgcagagcgtgcagagttctccagctctctgaacctcacagagacccaggtcaaaatctggttccagaaccgaagggccaaggcgaaaagactgcaggaggcagaactggaaaagctgaaaatggctgcaaaacctatgctgccctccagcttcagtctccctttccccatcagctcgcccctgcaggcagcgtccatatatggagcatcctacccgttccatagacctgtgcttcccatcccgcctgtgggactctatgccacgccagtgggatatggcatgtaccacctgtcctaaggaagaccagatcaatagactccatgatggatgcttgtttcaaagggtttcctctccctctccacgaaggcagtaccagccagtactcctgctctgctaaccctgcgtgcaccaccctaagcggctaggctgacagggccacacgacatagctgaaatttgttctgtaggcggaggcaccaagccctgttttcttggtgtaatcttccagatgcccccttttcctttcacaaagattggctctgatggtttttatgtataaatatatatatataataaaatataatacatttttatacagcagacgtaaaaattcaaattattttaaaaggcaaaatttatatacatatgtgctttttttctatatctcaccttcccaaaagacactgtgtaagtccatttgttgtattttcttaaagagggagacaaattatttgcaaaatgtgctaaagtcaatgatttttacgggattattgacttctgcttatggaaaacaaagaaacagacacaatgcacacagaaaatattagatatggagagattattcaaagtgaaggggacacatcatatttctgcattttacttgcattaaaagaaacctctttatatactacagttgttcctatctctcccccgccccccaccgccccaccacacacatatttttaaagtttttccttttttaagaatatttttgtaagaccaatacctgggatgagaagaatcctgagactgcctggaggtgaggtagaaaattagaaatacttcctaattcttctcaaggctgttggtaactttatttcagataattggagagtaaaatgttaaaacctgttgagaggaattgatggtttctgagaaatactaggtacattcatcctcacagattgcaaaggtgatttgggtgggggtttagtaattttctgcttaaaaaatgagtatcttgtaaccattacctatatgctaaatattcttgaacaattagtagatccagaaagaaaaaaaaatatgctttctctgtgtgtgtacctgttgtatgtcctaaacttattagaaaattttatatacttttttacatgttggggggcagaaggtaaagccatgttttgacttggtgaaaatgggattgtcaaacagcccattaagttccctggtatttcaccttcctgtccatctgtcccctccctccggtatacctttatccctttgaaagggtgcttgtacaatttgatatattttattgaagagttatctcttattctgaattaaattaagcatttgttttattgcagtaaagtttgtccaaactcacaattaaaaaaaaaaaaaaaaa

SEQ ID NO: 2340 - protein, 267 aa, Homo sapiens [sequence omitted]

SEQ ID NO: 2341 - DNA, 2511 bp, Homo sapiens
cttttcacactggccttaaagaggatatattagaagttgaagtaggaagggagccagagaggccgatggcgcaaaggtacgacgatctaccccattacgggggcatggatggagtaggcatcccctccacgatgtatggggacccgcatgcagccaggtccatgcagccggtccaccacctgaaccacgggcctcctctgcactcgcatcagtacccgcacacagctcataccaacgccatggcccccagcatgggctcctctgtcaatgacgctttaaagagagataaagatgccatttatggacaccccctcttccctctcttagcactgatttttgagaaatgtgaattagctacttgtaccccccgcgagccgggggtggcgggcggggacgtctgctcgtcagagtcattcaatgaagatatagccgtgttcgccaaacagattcgcgcagaaaaacctctattttcttctaatccagaactggataacttgatgattcaagccatacaagtattaaggtttcatctattggaattagagaaggtacacgaattatgtgacaatttctgccaccggtatattagctgtttgaaagggaaaatgcctatcgatttggtgatagacgatagagaaggaggatcaaaatcagacagtgaagatataacaagatcagcaaatctaactgaccagccctcttggaacagagatcatgatgacacggcatctactcgttcaggaggaaccccaggcccttccagcggtggccacacgtcacacagtggggacaacagcagtgagcaaggtgatggcttggacaacagtgtagcttcccccagcacaggtgacgatgatgaccctgataaggacaaaaagcgtcacaaaaagcgtggcatctttcccaaagtagccacaaatatcatgagggcgtggctgttccagcatctaacacacccttacccttctgaagaacagaaaaagcagttggcacaagacacgggactcaccatccttcaagtgaacaattggtttattaatgcccggagaagaatagtgcagcccatgatagaccagtccaaccgagcagtaagtcaaggaacaccttataatcctgatggacagcccatgggaggtttcgtaatggacggtcagcaacatatgggaattagagcaccaggacctatgagtggaatgggcatgaatatgggcatggaggggcagtggcactacatgtaaccttcatctagttaaccaatcgcaaagcaagggggaaggctgcaaagtatgccaggggagtatgtagcccggggtggtccaatgggtgtgagtatgggacagccaagttatacccaaccccagatgcccccccatcctgctcagctgcgtcatgggccccccatgcatacgtacattcctggacaccctcaccacccaacagtgatgatgcatggaggaccgccccaccctggaatgccaatgtcagcatcaagccccacagttcttaatacaggagacccaacaatgagtggacaagtcatggacattcatgctcagtagcttaagggaatatgcattgtctgcaatggtgactgatttcaaatcatgttttttctgcaatgactgtggagttccattcttggcatctactctggaccaaggagcatccctaattcttcatagggacctttaaaaagcaggaaataccaactgaagtcaatttgggggacatgctaaataactatataagacattaagagaacaaagagtgaaatattgtaaatgctattatactgttatccatattacgttgtttcttatagattttttaaaaaaaatgtgaaatttttccacactatgtgtgttgtttccatagctcttcacttcctccagaagcctccttacattaaaaagccttacagttatcctgcaagggacaggaaggtctgatttgcaggatttttagagcattaaaataactatcaggcagaagaatctttcttctcgcctaggatttcagccatgcgcgcgctctctctctttctctctcttttcctctctctccctctttctagcctggggcttgaatttgcatgtctaattcatttactcaccatatttgaattggcctgaacagatgtaaatcgggaaggatgggaaaaactgcagtcatcaacaatgattaatcagctgttgcaggcagtgtcttaaggagactggtaggaggaggcatggaaaccaaaaggccgtgtgtttagaagcctaattgtcacatcaagcatcattgtccccatgcaacaaccaccaccttatacatcacttcctgttttaagcagctctaaaacatagactgaagatttatttttaatatgttgactttatttctgagcaaagcatcggtcatgtgtgtattttttcatagtcccaccttggagcatttatgtagacattgtaaataaattttgtgcaaaaaggactggaaaaatgaactgtattattgcaattttttttt

SEQ ID NO: 2342 - protein, 390 aa, Homo sapiens
MAQRYDDLPHYGGMDGVGIPSTMYGDPHAARSMQPVHHLNHGPPLHSHQYPHTAHTNAMAPSMGSSVNDALKRDKDAIYGHPLFPLLALIFEKCELATCTPREPGVAGGDVCSSESFNEDIAVFAKQIRAEKPLFSSNPELDNLMIQAIQVLRFHLLELEKVHELCDNFCHRYISCLKGKMPIDLVIDDREGGSKSDSEDITRSANLTDQPSWNRDHDDTASTRSGGTPGPSSGGHTSHSGDNSSEQGDGLDNSVASPSTGDDDDPDKDKKRHKKRGIFPKVATNIMRAWLFQHLTHPYPSEEQKKQLAQDTGLTILQVNNWFINARRRIVQPMIDQSNRAVSQGTPYNPDGQPMGGFVMDGQQHMGIRAPGPMSGMGMNMGMEGQWHYM

SEQ ID NO: 2343 - DNA, 6614 bp, Homo sapiens
ctgcgcgccgctggcgctgaggggaggaagtttgctgtcgagcggcctgggttccgtgggcaaggccgtgggaggcagcgttggctgcttcgacacactgagggcggcgcgatgggagacgagatggatgccatgattcccgagcgggagatgaaggattttcagtttagagcgctaaagaaggtgagaatctttgactcccctgaggaattgcccaaggaacgctcgagtctgcttgctgtgtccaacaaatatggtctggtcttcgctggtggagccagtggcttgcagatttttcctactaaaaatcttcttattcaaaataaacccggagatgatcccaacaaaatagttgataaagtccaaggcttgctagttcctatgaaattcccaatccatcacctggccttgagctgtgataacctcacactctctgcgtgcatgatgtccagtgaatatggttccattattgctttttttgatgttcgcacattctcaaatgaggctaaacagcaaaaacgcccatttgcctatcataagcttttgaaagatgcaggaggcatggtgattgatatgaagtggaaccccactgtcccctccatggtggcagtttgtctggctgatggtagtattgctgtcctgcaagtcacggaaacagtgaaagtatgtgcaactcttccttccacggtagcagtaacctctgtgtgctggagccccaaaggaaagcagctggcagtgggaaaacagaatggaactgtggtccagtatcttcctactttgcaggaaaaaaaagtcattccttgtcctccgttttatgagtcagatcatcctgtcagagttctggatgtgctgtggattggtacctacgtcttcgccatagtgtatgctgctgcagatgggaccctggaaacgtctccagatgtggtgatggctctactaccgaaaaaagaagaaaagcacccagagatatttgtgaactttatggagccctgttatggcagctgcacggagagacagcatcattactacctcagttacattgaggaatgggatttagtgctggcagcatctgcggcttcaacagaagttagtatccttgctcgacaaagtgatcagattaattgggaatcttggctactggaggattctagtcgagctgaattgcctgtgacagacaagagtgatgactccttgcccatgggagttgtcgtagactatacaaaccaagtggaaatcaccatcagtgatgaaaagactcttcctcctgctccagttctcatgttactttcaacagatggtgtgctttgtccattttatatgattaatcaaaatcctggggttaagtctctcatcaaaacaccagagcgactttcattagaaggagagcgacagcccaagtcaccaggaagtactcccactaccccaacctcctctcaagccccacagaaactggatgcttctgcagctgcagcccctgcctctctgccaccttcatcacctgctgctcccattgccactttttctttgcttcctgctggtggagcccccactgtgttctcctttggttcttcatctttgaagtcatctgctacggtcactggggagcccccttcatattccagtggctccgacagctccaaagcagccccaggccctggcccatcaaccttctcttttgttcccccttctaaagcctccctagcccccacccctgcagcgtctcctgtggctccatcagctgcttcattctcctttggatcatctggttttaagcctaccctggaaagcacaccagtgccaagtgtgtctgctccaaatatagcaatgaagccctccttcccaccctcaacctctgctgtcaaagtcaaccttagtgaaaagtttactgctgcagctacctctactcctgttagtagctcccagagcgcacccccgatgtcgccattctcttctgcctccaagccagctgcttctggaccactcagccaccccacacctctctcagcaccacctagttccgtgccattgaagtcctcagtcttgccctcaccatcaggacgatctgctcagggcagttcaagcccagtgccctcaatggtacagaaatcacccaggataacccctccagcggcaaagccaggctctccccaggcaaagtcacttcagcctgctgttgcagaaaagcagggacatcagtggaaagattcagatcctgtaatggctggaattggggaggagattgcacactttcagaaggagttggaagagttaaaagcccgaacttccaaagcctgtttccaagtgggcacttctgaggagatgaagatgctgcgaacagaatcagatgacttgcatacctttcttttggagattaaagagaccacagagtcgcttcatggagatataagtagcctgaaaacaactttacttgagggctttgctggtgttgaggaagccagagaacaaaatgaaagaaatcgtgactctggttatctgcatttgctttataaaagaccactggatcccaagagtgaagctcagcttcaggaaattcggcgccttcatcagtatgtgaaatttgctgtccaagatgtgaatgatgttctagacttggagtgggatcagcatctggaacaaaagaaaaaacaaaggcacctgcttgtgccagagcgagagacactgtttaacaccctagccaacaatcgggaaatcatcaaccaacagaggaagaggctgaatcacctggtggatagtcttcagcagctccgcctttacaaacagacttccctgtggagcctgtcctcggctgttccttcccagagcagcattcacagttttgacagtgacctggaaagcctgtgcaatgctttgttgaaaaccaccatagaatctcacaccaaatccttgcccaaagtaccagccaaactgtcccccatgaaacaggcacaactgagaaacttcttggccaagaggaagaccccaccagtgagatccactgctccagccagcctgtctcgatcagcctttctgtctcagagatattatgaagacttggatgaagtcagctcaacgtcatctgtctcccagtctctggagagtgaagatgcacggacgtcctgtaaagatgacgaggcagtggttcaggcccctcggcacgcccccgtggttcgcactccttccatccagcccagtctcttgccccatgcagcaccttttgctaaatctcacctggttcatggttcttcacctggtgtgatgggaacttcagtggctacatctgctagcaaaattattcctcaaggggccgatagcacaatgcttgccacgaaaaccgtgaaacatggtgcacctagtccttcccaccccatctcagccccgcaggcagctgccgcagcagcactcaggcggcagatggccagtcaggcaccagctgtaaacactttgactgaatcaacgttgaagaatgtccctcaagtggtaaatgtgcaggaattgaagaataaccctgcaaccccttctacagccatgggttcttcagtgccctactccacagccaaaacacctcacccagtgttgaccccagtggctgctaaccaagccaagcaggggtctctaataaattcccttaagccatctgggcctacaccagcatccggtcagttatcatctggtgacaaagcttcagggacagccaagatagaaacagctgtgacttcaaccccatctgcttctgggcagttcagcaagcctttctcattttctccatcagggactggctttaattttgggataatcacaccaacaccgtcttctaatttcactgctgcacaaggggcaacaccctccactaaagagtcaagccagccggacgcattctcatctggtgggggaagcaaaccttcttatgaggccattcctgaaagctcacctccctcaggaatcacatccgcatcaaacaccaccccaggagaacctgccgcatctagcagcagacctgtggcaccttctggaactgctctttccaccacctctagtaagctggaaaccccaccgtccaagctgggagagcttctgtttccaagttctttggctggagagactctgggaagtttttcaggactgcgggttggccaagcagatgattctacaaaaccaaccaataaggcttcatccacaagcctaactagtacccagccaaccaagacgtcaggcgtgccctcagggtttaattttactgcccccccggtgttagggaagcacacggagccccctgtgacatcctctgcaaccaccacctcagtagcaccaccagcagccaccagcacttcctcaactgccgtttttggcagtctgccagtcaccagtgcaggatcctctggggtcatcagttttggtgggacatctctaagtgctggcaagactagtttttcatttggaagccaacagaccaatagcacagtgcccccatctgccccaccaccaactacagctgccactccccttccaacatcattccccacattgtcatttggtagcctcctgagttcagcaactaccccctccctgcctatgtccgctggcagaagcacagaagaggccacttcatcagctttgcctgagaagccaggtgacagtgaggtctcagcatcagcagcctcacttctagaggagcaacagtcagcccagcttccccaggctcctccgcaaacttctgactctgttaaaaaagaacctgttcttgcccagcctgcagtcagcaactctggcactgcagcatctagtactagtcttgtagcactttctgcagaggctaccccagccaccacgggggtccctgatgccaggacggaggcagtaccacctgcttcctccttttctgtgcctgggcagactgctgtcacagcagctgctatctcaagtgcaggccctgtggccgtcgaaacatcaagtacccccatagcctccagcaccacgtccattgttgctcccggcccatctgcagaggcagcagcatttggtaccgtcacttctggctcatccgtctttgctcagcctcctgctgccagttctagctcagctttcaaccagctcaccaacaacacagccactgccccctctgccacgcccgtgtttgggcaagtggcagccagcaccgcaccaagtctgtttgggcagcagactggtagcacagccagcacagcagctgccacaccacaggtcagcagctcagggtttagcagcccagcttttggtaccacagccccaggggtctttggacagacaaccttcgggcaggcctcagtctttgggcagtcggcgagcagtgctgcaagtgtcttttccttcagtcagcctgggttcagttccgtgcctgccttcggtcagcctgcttcctccactcccacatccaccagtggaagtgtctttggtgccgcctcaagtaccagtagctccagttccttctcatttggacagtcttctcccaacacaggaggggggctgtttggccaaagcaacgctcctgcttttgggcagagtcctggctttggacagggaggctctgtctttggtggtacctcagctgccaccacaacagcagcaacctctgggttcagcttttgccaagcttcaggttttgggtctagtaatactggttctgtgtttggtcaagcagccagtactggtggaatagtctttggccagcaatcatcctcttccagtggtagcgtgtttgggtctggaaacactggaagagggggaggtttcttcagtggccttggaggaaaacccagtcaggatgcagccaacaaaaacccattcagctcggccagtgggggctttggatccacagctacctcaaatacctctaacctatttggaaacagtggggccaagacatttggtggatttgccagctcgtcgtttggagagcagaaacccactggcactttcagctctggaggaggaagtgtggcatcccaaggctttgggttttcctctccaaacaaaacaggtggcttcggtgctgctccagtgtttggcagccctcctacttttgggggatcccctgggtttggaggggtgccagcattcggttcagccccagcctttacaagccctctgggctcgacgggaggcaaagtgttcggagagggcactgcagctgccagcgcaggaggattcgggtttgggagcagcagcaacaccacatccttcggcacgctcgcgagtcagaatgcccccactttcggatcactgtcccaacagacttctggttttgggacccagagtagcggattctctggttttggatcaggcacaggagggttcagctttgggtcaaataactcgtctgtccagggttttggtggctggcgaagctgagggcgtgtcagcaggcctttcgatccctgggaccaaccgcatcctcagcttcttccccgagaaatgctggagcaggctgttcagaccgacgttgccatcaaaacacatacacccagaaagaaacaacagaaaccaaaactcacaaggcgcatgattacttgttttatatttcatgttgggttttccctcccactattaaacagtctgtttccgtacaaaaaaaaaaaaaa

SEQ ID NO: 2344 - protein, 2090 aa, Homo sapiens [sequence omitted]

SEQ ID NO: 2345 - DNA, 6714 bp, Homo sapiens
ctgcgcgccgctggcgctgaggggaggaagtttgctgtcgagcggcctgggttccgtgggcaaggccgtgggaggcagcgttggctgcttcgacacactgagggcggcgcgatgggagacgagatggatgccatgattcccgagcgggagatgaaggattttcagtttagagcgctaaagaaggtgagaatctttgactcccctgaggaattgcccaaggaacgctcgagtctgcttgctgtgtccaacaaatatggtctggtcttcgctggtggagccagtggcttgcagatttttcctactaaaaatcttcttattcaaaataaacccggagatgatcccaacaaaatagttgataaagtccaaggcttgctagttcctatgaaattcccaatccatcacctggccttgagctgtgataacctcacactctctgcgtgcatgatgtccagtgaatatggttccattattgctttttttgatgttcgcacattctcaaatgaggctaaacagcaaaaacgcccatttgcctatcataagcttttgaaagatgcaggaggcatggtgattgatatgaagtggaaccccactgtcccctccatggtggcagtttgtctggctgatggtagtattgctgtcctgcaagtcacggaaacagtgaaagtatgtgcaactcttccttccacggtagcagtaacctctgtgtgctggagccccaaaggaaagcagctggcagtgggaaaacagaatggaactgtggtccagtatcttcctactttgcaggaaaaaaaagtcattccttgtcctccgttttatgagtcagatcatcctgtcagagttctggatgtgctgtggattggtacctacgtcttcgccatagtgtatgctgctgcagatgggaccctggaaacgtctccagatgtggtgatggctctactaccgaaaaaagaagaaaagcacccagagatatttgtgaactttatggagccctgttatggcagctgcacggagagacagcatcattactacctcagttacattgaggaatgggatttagtgctggcagcatctgcggcttcaacagaagttagtatccttgctcgacaaagtgatcagattaattgggaatcttggctactggaggattctagtcgagctgaattgcctgtgacagacaagagtgatgactccttgcccatgggagttgtcgtagactatacaaaccaagtggaaatcaccatcagtgatgaaaagactcttcctcctgctccagttctcatgttactttcaacagatggtgtgctttgtccattttatatgattaatcaaaatcctggggttaagtctctcatcaaaacaccagagcgactttcattagaaggagagcgacagcccaagtcaccaggaagtactcccactaccccaacctcctctcaagccccacagaaactggatgcttctgcagctgcagcccctgcctctctgccaccttcatcacctgctgctcccattgccactttttctttgcttcctgctggtggagcccccactgtgttctcctttggttcttcatctttgaagtcatctgctacggtcactggggagcccccttcatattccagtggctccgacagctccaaagcagccccaggccctggcccatcaaccttctcttttgttcccccttctaaagcctccctagcccccacccctgcagcgtctcctgtggctccatcagctgcttcattctcctttggatcatctggttttaagcctaccctggaaagcacaccagtgccaagtgtgtctgctccaaatatagcaatgaagccctccttcccaccctcaacctctgctgtcaaagtcaaccttagtgaaaatagctcccagagcgcacccccgatgtcgccattctcttctgcctccaagccagctgcttctggaccactcagccaccccacacctctctcagcaccacctagttccgtgccattgaagtcctcagtcttgccctcaccatcaggacgatctgctcagggcagttcaagcccagtgccctcaatggtacagaaatcacccaggataacccctccagcggcaaagccaggctctccccaggcaaagtcacttcagcctgctgttgcagaaaagcagggacatcagtggaaagattcagatcctgtaatggctggaattggggaggagattgcacactttcagaaggagttggaagagttaaaagcccgaacttccaaagcctgtttccaagtgggcacttctgaggagatgaagatgctgcgaacagaatcagatgacttgcatacctttcttttggagattaaagagaccacagagtcgcttcatggagatataagtagcctgaaaacaactttacttgagggctttgctggtgttgaggaagccagagaacaaaatgaaagaaatcgtgactctggttatctgcatttgctttataaaagaccactggatcccaagagtgaagctcagcttcaggaaattcggcgccttcatcagtatgtgaaatttgctgtccaagatgtgaatgatgttctagacttggagtgggatcagcatctggaacaaaagaaaaaacaaaggcacctgcttgtgccagagcgagagacactgtttaacaccctagccaacaatcgggaaatcatcaaccaacagaggaagaggctgaatcacctggtggatagtcttcagcagctccgcctttacaaacagacttccctgtggagcctgtcctcggctgttccttcccagagcagcattcacagttttgacagtgacctggaaagcctgtgcaatgctttgttgaaaaccaccatagaatctcacaccaaatccttgcccaaagtaccagccaaactgtcccccatgaaacaggcacaactgagaaacttcttggccaagaggaagaccccaccagtgagatccactgctccagccagcctgtctcgatcagcctttctgtctcagagatattatgaagacttggatgaagtcagctcaacgtcatctgtctcccagtctctggagagtgaagatgcacggacgtcctgtaaagatgacgaggcagtggttcaggcccctcggcacgcccccgtggttcgcactccttccatccagcccagtctcttgccccatgcagcaccttttgctaaatctcacctggttcatggttcttcacctggtgtgatgggaacttcagtggctacatctgctagcaaaattattcctcaaggggccgatagcacaatgcttgccacgaaaaccgtgaaacatggtgcacctagtccttcccaccccatctcagccccgcaggcagctgccgcagcagcactcaggcggcagatggccagtcaggcaccagctgtaaacactttgactgaatcaacgttgaagaatgtccctcaagtggtaaatgtgcaggaattgaagaataaccctgcaaccccttctacagccaaaacacctcacccagtgttgaccccagtggctgctaaccaagccaagcaggggtctctaataaattcccttaagccatctgggcctacaccagcatccggtcagttatcatctggtgacaaagcttcagggacagccaagatagaaacagctgtgacttcaaccccatctgcttctgggcagttcagcaagcctttctcattttctccatcagggactggctttaattttgggataatcacaccaacaccgtcttctaatttcactgctgcacaaggggcaacaccctccactaaagagtcaagccagccggacgcattctcatctggtgggggaagcaaaccttcttatgaggccattcctgaaagctcacctccctcaggaatcacatccgcatcaaacaccaccccaggagaacctgccgcatctagcagcagacctgtggcaccttctggaactgctctttccaccacctctagtaagctggaaaccccaccgtccaagctgggagagcttctgtttccaagttctttggctggagagactctgggaagtttttcaggactgcgggttggccaagcagatgattctacaaaaccaaccaataaggcttcatccacaagcctaactagtacccagccaaccaagacgtcaggcgtgccctcagggtttaattttactgcccccccggtgttagggaagcacacggagccccctgtgacatcctctgcaaccaccacctcagtagcaccaccagcagccaccagcacttcctcaactgccgtttttggcagtctgccagtcaccagtgcaggatcctctggggtcatcagttttggtgggacatctctaagtgctggcaagactagtttttcatttggaagccaacagaccaatagcacagtgcccccatctgccccaccaccaactacagctgccactccccttccaacatcattccccacattgtcatttggtagcctcctgagttcagcaactaccccctccctgcctatgtccgctggcagaagcacagaagaggccacttcatcagctttgcctgagaagccaggtgacagtgaggtctcagcatcagcagcctcacttctagaggagcaacagtcagcccagcttccccaggctcctccgcaaacttctgactctgttaaaaaagaacctgttcttgcccagcctgcagtcagcaactctggcactgcagcatctagtactagtcttgtagcactttctgcagaggctaccccagccaccacgggggtccctgatgccaggacggaggcagtaccacctgcttcctccttttctgtgcctgggcagactgctgtcacagcagctgctatctcaagtgcaggccctgtggccgtcgaaacatcaagtacccccatagcctccagcaccacgtccattgttgctcccggcccatctgcagaggcagcagcatttggtaccgtcacttctggctcatccgtctttgctcagcctcctgctgccagttctagctcagctttcaaccagctcaccaacaacacagccactgccccctctgccacgcccgtgtttgggcaagtggcagccagcaccgcaccaagtctgtttgggcagcagactggtagcacagccagcacagcagctgccacaccacaggtcagcagctcagggtttagcagcccagcttttggtaccacagccccaggggtctttggacagacaaccttcgggcaggcctcagtctttgggcagtcggcgagcagtgctgcaagtgtcttttccttcagtcagcctgggttcagttccgtgcctgccttcggtcagcctgcttcctccactcccacatccaccagtggaagtgtctttggtgccgcctcaagtaccagtagctccagttccttctcatttggacagtcttctcccaacacaggaggggggctgtttggccaaagcaacgctcctgcttttgggcagagtcctggctttggacagggaggctctgtctttggtggtacctcagctgccaccacaacagcagcaacctctgggttcagcttttgccaagcttcaggttttgggtctagtaatactggttctgtgtttggtcaagcagccagtactggtggaatagtctttggccagcaatcatcctcttccagtggtagcgtgtttgggtctggaaacactggaagagggggaggtttcttcagtggccttggaggaaaacccagtcaggatgcagccaacaaaaacccattcagctcggccagtgggggctttggatccacagctacctcaaatacctctaacctatttggaaacagtggggccaagacatttggtggatttgccagctcgtcgtttggagagcagaaacccactggcactttcagctctggaggaggaagtgtggcatcccaaggctttgggttttcctctccaaacaaaacaggtggcttcggtgctgctccagtgtttggcagccctcctacttttgggggatcccctgggtttggaggggtgccagcattcggttcagccccagcctttacaagccctctgggctcgacgggaggcaaagtgttcggagagggcactgcagctgccagcgcaggaggattcgggtccctggccatgagcctgtctccgaccctgaagggcaggctgttgctgatgaggcccaaggcaggaggaggaagggagcaggccgctcctgggagaaagtccaatgagagcagatcccttggccacctttgtatggaaagagccttgacctcaccattaaaagtttgggagcagcagcaacaccacatccttcggcacgctcgcgagtcagaatgcccccactttcggatcactgtcccaacagacttctggttttgggacccagagtagcggattctctggttttggatcaggcacaggagggttcagctttgggtcaaataactcgtctgtccagggttttggtggctggcgaagctgagggcgtgtcagcaggcctttcgatccctgggaccaaccgcatcctcagcttcttccccgagaaatgctggagcaggctgttcagaccgacgttgccatcaaaacacatacacccagaaagaaacaacagaaaccaaaactcacaaggcgcatgattacttgttttatatttcatgttgggttttccctcccactattaaacagtctgtttccgtacaaaaaaaaaaaaaa

SEQ ID NO: 2346 - protein, 2130 aa, Homo sapiens
MRAAGAEGRKFAVERPGFRGQGRGRQRWLLRHTEGGAMGDEMDAMIPEREMKDFQFRALKKVRIFDSPEELPKERSSLLAVSNKYGLVFAGGASGLQIFPTKNLLIQNKPGDDPNKIVDKVQGLLVPMKFPIHHLALSCDNLTLSACMMSSEYGSIIAFFDVRTFSNEAKQQKRPFAYHKLLKDAGGMVIDMKWNPTVPSMVAVCLADGSIAVLQVTETVKVCATLPSTVAVTSVCWSPKGKQLAVGKQNGTVVQYLPTLQEKKVIPCPPFYESDHPVRVLDVLWIGTYVFAIVYAAADGTLETSPDVVMALLPKKEEKHPEIFVNFMEPCYGSCTERQHHYYLSYIEEWDLVLAASAASTEVSILARQSDQINWESWLLEDSSRAELPVTDKSDDSLPMGVVVDYTNQVEITISDEKTLPPAPVLMLLSTDGVLCPFYMINQNPGVKSLIKTPERLSLEGERQPKSPGSTPTTPTSSQAPQKLDASAAAAPASLPPSSPAAPIATFSLLPAGGAPTVFSFGSSSLKSSATVTGEPPSYSSGSDSSKAAPGPGPSTFSFVPPSKASLAPTPAASPVAPSAASFSFGSSGFKPTLESTPVPSVSAPNIAMKPSFPPSTSAVKVNLSENSSQSAPPMSPFSSASKPAASGPLSHPTPLSAPPSSVPLKSSVLPSPSGRSAQGSSSPVPSMVQKSPRITPPAAKPGSPQAKSLQPAVAEKQGHQWKDSDPVMAGIGEEIAHFQKELEELKARTSKACFQVGTSEEMKMLRTESDDLHTFLLEIKETTESLHGDISSLKTTLLEGFAGVEEAREQNERNRDSGYLHLLYKRPLDPKSEAQLQEIRRLHQYVKFAVQDVNDVLDLEWDQHLEQKKKQRHLLVPERETLFNTLANNREIINQQRKRLNHLVDSLQQLRLYKQTSLWSLSSAVPSQSSIHSFDSDLESLCNALLKTTIESHTKSLPKVPAKLSPMKQAQLRNFLAKRKTPPVRSTAPASLSRSAFLSQRYYEDLDEVSSTSSVSQSLESEDARTSCKDDEAVVQAPRHAPVVRTPSIQPSLLPHAAPFAKSHLVHGSSPGVMGTSVATSASKIIPQGADSTMLATKTVKHGAPSPSHPISAPQAAAAAALRRQMASQAPAVNTLTESTLKNVPQVVNVQELKNNPATPSTAKTPHPVLTPVAANQAKQGSLINSLKPSGPTPASGQLSSGDKASGTAKIETAVTSTPSASGQFSKPFSFSPSGTGFNFGIITPTPSSNFTAAQGATPSTKESSQPDAFSSGGGSKPSYEAIPESSPPSGITSASNTTPGEPAASSSRPVAPSGTALSTTSSKLETPPSKLGELLFPSSLAGETLGSFSGLRVGQADDSTKPTNKASSTSLTSTQPTKTSGVPSGFNFTAPPVLGKHTEPPVTSSATTTSVAPPAATSTSSTAVFGSLPVTSAGSSGVISFGGTSLSAGKTSFSFGSQQTNSTVPPSAPPPTTAATPLPTSFPTLSFGSLLSSATTPSLPMSAGRSTEEATSSALPEKPGDSEVSASAASLLEEQQSAQLPQAPPQTSDSVKKEPVLAQPAVSNSGTAASSTSLVALSAEATPATTGVPDARTEAVPPASSFSVPGQTAVTAAAISSAGPVAVETSSTPIASSTTSIVAPGPSAEAAAFGTVTSGSSVFAQPPAASSSSAFNQLTNNTATAPSATPVFGQVAASTAPSLFGQQTGSTASTAAATPQVSSSGFSSPAFGTTAPGVFGQTTFGQASVFGQSASSAASVFSFSQPGFSSVPAFGQPASSTPTSTSGSVFGAASSTSSSSSFSFGQSSPNTGGGLFGQSNAPAFGQSPGFGQGGSVFGGTSAATTTAATSGFSFCQASGFGSSNTGSVFGQAASTGGIVFGQQSSSSSGSVFGSGNTGRGGGFFSGLGGKPSQDAANKNPFSSASGGFGSTATSNTSNLFGNSGAKTFGGFASSSFGEQKPTGTFSSGGGSVASQGFGFSSPNKTGGFGAAPVFGSPPTFGGSPGFGGVPAFGSAPAFTSPLGSTGGKVFGEGTAAASAGGFGSLAMSLSPTLKGRLLLMRPKAGGGREQAAPGRKSNESRSLGHLCMERALTSPLKVWEQQQHHILRHARESECPHFRITVPTDFWFWDPE

SEQ ID NO: 2347 - DNA, 990 bp, Homo sapiens
cccatcccgtgggtggccggcgacaagatggcagcagcgtgtcggagcgtgaagggcctggtggcggtaataaccggaggagcctcgggcctgggcctggccacggcggagcgacttgtggggcagggagcctctgctgtgcttctggacctgcccaactcgggtggggaggcccaagccaagaagttaggaaacaactgcgttttcgccccagccgacgtgacctctgagaaggatgtgcaaacagctctggctctagcaaaaggaaagtttggccgtgtggatgtagctgtcaactgtgcaggcatcgcggtggctagcaagacgtacaacttaaagaagggccagacccataccttggaagacttccagcgagttcttgatgtgaatctcatgggcaccttcaatgtgatccgcctggtggctggtgagatgggccagaatgaaccagaccagggaggccaacgtggggtcatcatcaacactgccagtgtggctgccttcgagggtcaggttggacaagctgcatactctgcttccaaggggggaatagtgggcatgacactgcccattgctcgggatctggctcccataggtatccgggtgatgaccattgccccaggtctgtttggcaccccactgctgaccagcctcccagagaaagtgtgcaacttcttggccagccaagtgcccttccctagccgactgggtgaccctgctgagtatgctcacctcgtacaggccatcatcgagaacccattcctcaatggagaggtcatccggctggatggggccattcgtatgcagccttgaagggagaaggcagagaaaacacacgctcctctgcccttcctttccctggggtactactctccagcttgggaggaagcccagtagccattttgtaactgcctaccagtcgccctctgtgcctaataaagtctctttttctcacaaaaaaaaaaaaaaaaaaaaaaaaaaaaaaaaaaa

SEQ ID NO: 2348 - protein, 261 aa, Homo sapiens
MAAACRSVKGLVAVITGGASGLGLATAERLVGQGASAVLLDLPNSGGEAQAKKLGNNCVFAPADVTSEKDVQTALALAKGKFGRVDVAVNCAGIAVASKTYNLKKGQTHTLEDFQRVLDVNLMGTFNVIRLVAGEMGQNEPDQGGQRGVIINTASVAAFEGQVGQAAYSASKGGIVGMTLPIARDLAPIGIRVMTIAPGLFGTPLLTSLPEKVCNFLASQVPFPSRLGDPAEYAHLVQAIIENPFLNGEVIRLDGAIRMQP

SEQ ID NO: 2349 - DNA, 2368 bp, Homo sapiens
cgggcgatgccgcgctgcgggggggccgcacagccgccgccaccgccaccgccgccgggtggggtgggaggggcgggaacgcgcgccgccgcctccagggtgggcgcctttcgccgtggacgccgaccgtccgggacgagggtttcatcaccttaaatggttttgaaccaatgaaggtgtattcccttaaaaagacggacagcccatcgtgtgaactatagagtttgtggacagatttatattgggttcatagtggcgtcatgcacgcagactcctgcaagttcccctaagttcttagaggactgctttgccttttgatctgagagttgcaaagttccataaagaatggcccttgtggataagcacaaagtcaagagacagcgattggacagaatttgtgaaggtatccgcccccagatcatgaacggccccctgcacccccgccccctggtggcgctgctggacggccgcgactgcactgtggagatgcccatcctgaaggacctggccactgtggccttctgtgacgcgcagtcgacgcaggaaatccacgagaaggttctaaacgaagccgtgggcgccatgatgtaccacaccatcaccctcaccagggaggacctggagaagttcaaggccctgagagtgatcgtgcggataggcagtggctatgacaacgtggacatcaaggctgccggcgagctcggaattgccgtgtgcaacatcccgtctgcagccgtggaagagacagcggactctaccatctgccacatcctcaacctgtaccggaggaacacgtggctgtaccaggcactgcgggaaggcacgcgggttcagagcgtggagcagatccgcgaggtggcctcgggagcggcccgcatccgtggggagacgctgggcctcattggctttggtcgcacggggcaggcggttgcagttcgagccaaggcctttggattcagcgtcatattttatgacccctacttgcaggatgggatcgagcggtccctgggcgtgcagagggtctacaccctgcaggatttgctgtatcagagcgactgcgtctccttgcactgcaatctcaacgaacataaccaccacctcatcaatgactttaccataaagcagatgaggcagggagcattccttgtgaacgcagcccgtggcggcctggtggacgagaaagccttagcacaagccctcaaggagggcaggatacgaggggcagccctcgacgtgcatgagtcagagcccttcagctttgctcagggtccgttgaaagatgccccgaatctcatctgcactcctcacactgcctggtacagtgagcaggcgtcactggagatgagggaggcagctgccaccgagatccgccgagccatcacaggtcgcatcccagaaagcttaagaaattgtgtgaacaaggaattctttgtcacatcagcgccttggtcagtaatagaccagcaagcaattcatcctgagctcaatggtgccacatacagatatccgccaggcatcgtgggtgtggctccaggaggacttcctgcagccatggaagggatcatccctggaggcatcccagtgactcacaacctcccgacagtggcacatccttcccaagcgccctctcccaaccagcccacaaaacacggggacaatcgagagcaccccaacgagcaatagcagagaatgccagaaggtaatcactcagatacacttgggaccaagagacagtgaaaaatagatgaactaagagaaaaagaatcggatggtctttgtaactgattctggacatatgcatcattgatgttgcagtgttgaaactacaagagctagaaaactgaagatgtcgtctgcttacggaagcgctgaaagactaggatgtgatttattaacgaccaacttctgttattgtgtgttaagtttttcatctgtgcatcaaatcacaaaaagaataaatagagctttttcctttatcagtcccttgggcacagcaggtcctgaacaccctgctctacaatgttgcatcaagagttcaaacaacaaaataaaaaatattaagaggaaatccccatcctgtgacttgagtcccttaagtctacaggggctggtgacctctttttgctaataggaaaatcacattactacaaaatggggagaaaactgtttgcctgtggtagacacctgcacgcataggattgaagacagtacaggctgctgtacagagaagcgcctctcacatctgaactgcatactgagcgggcaagtcggttgtaagttcagtaaaaccctctgatgatgcaaaaaaaaaaaaaaagtattaagtttcacaagctgtttgtactcaaatatattttctcagtttcag

SEQ ID NO: 2350 - protein, 445 aa, Homo sapiens
MALVDKHKVKRQRLDRICEGIRPQIMNGPLHPRPLVALLDGRDCTVEMPILKDLATVAFCDAQSTQEIHEKVLNEAVGAMMYHTITLTREDLEKFKALRVIVRIGSGYDNVDIKAAGELGIAVCNIPSAAVEETADSTICHILNLYRRNTWLYQALREGTRVQSVEQIREVASGAARIRGETLGLIGFGRTGQAVAVRAKAFGFSVIFYDPYLQDGIERSLGVQRVYTLQDLLYQSDCVSLHCNLNEHNHHLINDFTIKQMRQGAFLVNAARGGLVDEKALAQALKEGRIRGAALDVHESEPFSFAQGPLKDAPNLICTPHTAWYSEQASLEMREAAATEIRRAITGRIPESLRNCVNKEFFVTSAPWSVIDQQAIHPELNGATYRYPPGIVGVAPGGLPAAMEGIIPGGIPVTHNLPTVAHPSQAPSPNQPTKHGDNREHPNEQ

SEQ ID NO: 2351 - DNA, 3780 bp, Homo sapiens
cgattaatcctccagttggttgtccctgccgtctcggaagggttagcacacagccaggtctgtttttgatgtatgtaattgaagatttataaagaaaagcttctcctctgcctcatccacagtcattttttttccaatgccagttcccagcaggcatataaatattggtcgttctcagagctgggatgctgctgggtggtacgagggcccctgggagaacgccgagtccctgcggcctctggggaggagaagctccctgacgtatggcacagcagaggggacttggtttgagccaaaccaccgaccacaggacgctgccctgcccgtggccgccgagccctacctgtaccgggaggccgtttataactcagtggctgcaagaaaggggtctactcctgacttcaccttctacgacagcagacaggcagtgatgtctggtcgcagccccctgctgccacgggagtactacagtgatccgtctggagctgctagggtacccaaagagcctcccctctatcgggacccaggagtcagccggccggtccccagctacggagtgcttggcagcagaacgtcatgggatccaatgcaaggccggtcacctgccctgcaggacgccggtcacctgtaccgggatcctggaggtaaaatgatccctcaggggcggcagacacagagcagggctgcatctcccgggcggtatggacgggagcagcccgacaccaggtatggggcggaggtgcctgcctaccccctcagccaggtcttcagcgacatcagcgaaagacccattgaccctgcccctgccagacaggtggccccgacgtgcctggttgtggaccccagttcagctgctgcccccgaaggcagcacaggggtggccccaggggccctgaatcgtggctacgggcctgcccgggaaagcatcccatccaagatggcttacgagacttacgaagctgacctgtccaccttccagggtcctggtggcaagaggaccgtgctccctgagttcctggcctttctgcgggcggaggggctggcagaggccacgctgggagccctactgcagcagggctttgactccccggccgtcctggctaccctggaggacgcggatatcaagtctgtcgcacccaacctgggccaggcccgtgttctgagccgcctggccaatagctgcaggaccgaaatgcagctgcggaggcaggaccgggggggcccgctgccccgggcgcggtccagcagcttcagccaccgaagcgaactgctccatggtgacttggcttctctgggcgctgcggctcctctgcagacagcatccccccgagctggagacccggctcgccgtccctccagcgcaccatctcagcacctcctggagacggcagccacctattctgcccctggcgtgggcacccatgccccacacttcccctccaactccgggtacagctctcccaccccttgcgccctgacagcgcgtctgagccccacgcaccccctgcaggcaggggtggccttgactaacccgggcccctcaaacccccttcacccaggccccagaacagcttactccacggcatacacggtgcccatggagctgctaaagagggagcgcaacgtggccgcctctccgctgcccagccctcacggcagcccccaggtcttgcggaagccaggtgcacccctggggccatccaccctgccgccggccagccagagcctccacacgcctcactcaccgtacgagaaggtggcccggcgcacaggggcacccatcatcgtgtccaccatgcttgcaccagaaccaagtatccgcccccagatcatgaacggccccctgcacccccgccccctggtggcgctgctggacggccgcgactgcactgtggagatgcccatcctgaaggacctggccactgtggccttctgtgacgcgcagtcgacgcaggaaatccacgagaaggttctaaacgaagccgtgggcgccatgatgtaccacaccatcaccttcaacagggaggacctggagaagttcaaggccctgagagtgatcgtgcggataggcagtggctatgacaacgtgaacatcaaggctgccggcgagctcggaattgccgtgtgcaacatcccgtctgcagccgtggaagagacagcggactctaccatctgccacatcctcaacctgtaccggaggaacacgtggctgtaccaggcactgcgggaaggcacgcgggttcagagcgtggagcagatccgcgaggtggcctcgggagcggcccgcatccgtggggagacgctgggcctcattggctttggtcgcacggggcaggcggttgcagttcgagccaaggcctttggattcagcgtcatattttatgacccctacttgcaggatgggatcgagcggtccctgggcgtgcagagggtctacaccctgcaggatttgctgtatcagagcgactgcgtctccttgcactgcaatctcaacgaacataaccaccacctcatcaatgactttaccataaagcagatgaggcagggagcattccttgtgaacgcagcccgtggcggcctggtggacgagaaagccttagcacaagccctcaaggagggcaggatacgaggggcagccctcgacgtgcatgagtcagagcccttcagctttgctcagggtccgttgaaagatgccccgaatctcatctgcactcctcacactgcctggtacagtgagcaggcgtcactggagatgagggaggcagctgccaccgagatccgccgagccatcacaggtcgcatcccagaaagcttaagaaattgtgtgaacaaggaattctttgtcacatcagcgccttggtcagtaatagaccagcaagcaattcatcctgagctcaatggtgccacatacagatatccgccaggcatcgtgggtgtggctccaggaggacttcctgcagccatggaagggatcatccctggaggcatcccagtgactcacaacctcccgacagtggcacatccttcccaagcgccctctcccaaccagcccacaaaacacggggacaatcgagagcaccccaacgagcaatagcagagaatgccagaaggtaatcactcagatacacttgggaccaagagacagtgaaaaatagatgaactaagagaaaaagaatcggatggtctttgtaactgattctggacatatgcatcattgatgttgcagtgttgaaactacaagagctagaaaactgaagatgtcgtctgcttacggaagcgctgaaagactaggatgtgatttattaacgaccaacttctgttattgtgtgttaagtttttcatctgtgcatcaaatcacaaaaagaataaatagagctttttcctttatcagtcccttgggcacagcaggtcctgaacaccctgctctacaatgttgcatcaagagttcaaacaacaaaataaaaaatattaagaggaaatccccatcctgtgacttgagtcccttaagtctacaggggctgggtgacctctttttgctaataggaaaatcacattactacaaaatggggaaaaaactgtttgcctgtggtagacacctgcacgcataggattgaagacagtacaggctgctgtacagagaagcgcctctcacatctgaactgcatactgagcgggcaagtcggttgtaagttcagtaaaaccctctgatgatgcaaaaaaaaaaaaaaagtattaagtttcacaagctgtttgtactcaaatatattttctcagtttcag

SEQ ID NO: 2352 - protein, 985 aa, Homo sapiens
MPVPSRHINIGRSQSWDAAGWYEGPWENAESLRPLGRRSSLTYGTAEGTWFEPNHRPQDAALPVAAEPYLYREAVYNSVAARKGSTPDFTFYDSRQAVMSGRSPLLPREYYSDPSGAARVPKEPPLYRDPGVSRPVPSYGVLGSRTSWDPMQGRSPALQDAGHLYRDPGGKMIPQGRQTQSRAASPGRYGREQPDTRYGAEVPAYPLSQVFSDISERPIDPAPARQVAPTCLVVDPSSAAAPEGSTGVAPGALNRGYGPARESIPSKMAYETYEADLSTFQGPGGKRTVLPEFLAFLRAEGLAEATLGALLQQGFDSPAVLATLEDADIKSVAPNLGQARVLSRLANSCRTEMQLRRQDRGGPLPRARSSSFSHRSELLHGDLASLGAAAPLQTASPRAGDPARRPSSAPSQHLLETAATYSAPGVGTHAPHFPSNSGYSSPTPCALTARLSPTHPLQAGVALTNPGPSNPLHPGPRTAYSTAYTVPMELLKRERNVAASPLPSPHGSPQVLRKPGAPLGPSTLPPASQSLHTPHSPYEKVARRTGAPIIVSTMLAPEPSIRPQIMNGPLHPRPLVALLDGRDCTVEMPILKDLATVAFCDAQSTQEIHEKVLNEAVGAMMYHTITFNREDLEKFKALRVIVRIGSGYDNVNIKAAGELGIAVCNIPSAAVEETADSTICHILNLYRRNTWLYQALREGTRVQSVEQIREVASGAARIRGETLGLIGFGRTGQAVAVRAKAFGFSVIFYDPYLQDGIERSLGVQRVYTLQDLLYQSDCVSLHCNLNEHNHHLINDFTIKQMRQGAFLVNAARGGLVDEKALAQALKEGRIRGAALDVHESEPFSFAQGPLKDAPNLICTPHTAWYSEQASLEMREAAATEIRRAITGRIPESLRNCVNKEFFVTSAPWSVIDQQAIHPELNGATYRYPPGIVGVAPGGLPAAMEGIIPGGIPVTHNLPTVAHPSQAPSPNQPTKHGDNREHPNEQ

SEQ ID NO: 2353 - DNA, 2947 bp, Homo sapiens
atgccaattcctcctcccccgccacccccacctggtcctcctccacctcccacatttcatcaggcaaacacagagcagcccaagctgagtagagatgagcagcggggtcgaggcgccctcttacaggacatttgcaaagggaccaagctgaagaaggtgaccaacattaatgatcggagtgctcccatcctcgagaagccgaaaggaagcagtggtggctatggctctggaggagctgccctgcagcccaagggaggtctcttccaaggaggagtgctgaagcttcgacctgtgggagccaaggatggttcagagaacctagctggtaagccagccctgcaaatccccagttctcgagctgctgccccaaggcctccagtatctgccgccagcgggcgtcctcaggatgatacagacagcagccgggcctcactcccagaactgccccggatgcagagaccctctttaccggacctctctcggcctaataccaccagcagtacgggcatgaagcacagctcctctgcccctcccccaccacccccagggcggcgtgccaacgcaccccccacacctctgcctatgcacagcagcaaagcccccgcctacaacagagagaaacccttgccaccgacgcctggacaaaggcttcaccctggtcgagagggacctcctgctccacccccagtcaaaccacctccttcccctgtgaatatcagaacaggaccaagtggccagtctctggctcctcctcctccgccttaccgccagcctcctggggtccccaatggaccctctagccccactaatgagtcagcccctgagctgccacagagacacaattctttgcataggaagacaccagggcctgtcagaggcctagcacctcctccacccacctcggcctccccatctttactgagtaataggccacctcccccagcccgagaccctcccagtcggggagcagctcctccacccccaccacctgtgatccgaaatggtgccagggatgctccccctcccccaccaccataccgaatgcatgggtcagaacccccgagccgaggaaagcccccacctccaccctcaaggacgccagctgggccaccccctcctcctccaccgcccctgaggaatggccacagagattctatcaccactgtccggtctttcttggatgattttgagtcaaagtattccttccatccagtagaagactttcctgctccagaagaatataaacactttcagaggatatatcccagcaaaacaaaccgagctgcccgtggagccccacctctgccacccattctcaggtgaagcctggcttggtcccgttcctcaggaaaaggatggaccttctcttcttctcagatggtcccttccattcccctgaaacctgcatgagagctcctaacatgtttctccaatgcaatcaagccctagactccaaatgtcctcccagctcacctccatctatgcatctcatctctggatttggtgatcagactctatattgacagtaggatctcaaaccctgcatccatccttcctccagcaagccctgctagccacatgaggaacaagtttccgtgtcttctgccttcctcttggggaaaggtgccttgttgtgatgaattaactcactgttagggcagggtggagaatggtactccttccttctcctgtccactgtgggggaagcttggcaggtatattatatttcatcatttaggaggctggcatgaccaggacttatgggtgggaggggagcatttttagtgaagcaagaaaggagtttgccaagaagtgatctgttttaaaggtcatatttggagaaagggcaaggaattgggtctgctttatttttgggggtattttgtttttgttctcacctgctgcccccccaccccaccaccccagggataaattggatataaacactaaatactaatcagttgaacttaacatttaataaaaagaaagggtgaaataaactgaagaccattttagaactagtcagttctctgcagcaaagggaacaggagccatttgaaccctctgggacccctcaccccactgcttcagggtgctaggctgagggatgtttttcctcccccttaccgcccatgcccttgaaagaaaagtcactttttgtggagggcatcattcattcctgattcacaaaccccaaaaacctctggtgggagataggaagatagggcgtgggcctgggccttaacctcaatcttgtgtctgcctcagtcttttctgactggccctgaagttgtcagtggctctttctgtccttcagcccctggaaggtgctccaggataacaaagaagggcaggttgaagcccctcatggaaggagctggctttgtggggctgcaaaggacttttaagtcctgcctgtactgaagttcacagcccacctgactgagcagactcttcctgttcctttctctaccacccttgccttcccaggactgcacggtttaacacagcagagtacagaagggtgaagaagtgagcagaggcttatgaagatattcagatactcttctatgccaggaagcacaaagactttgttgagatttgcctcagttcagtagatcttccttggcagccagccataggttgtttctttgtcttccgggtcctaaagagcacagagaaaatggaggtccccagtctaggtaggaagctgattggatgaggacttctttttttccgacagcaggatggggctcttgggctccacacaccagatgctttggttttctacaactgttgctatgtgtagagggtgctcagagcgtggcatgagagcaaggagaccatggctactctttgaaatggatggggaaaattagcttaaaaatttaatcacgagattgcgccactgcactccagcctgggcgacagagccagactccgtctc

SEQ ID NO: 2354 - protein, 440 aa, Homo sapiens
MPIPPPPPPPPGPPPPPTFHQANTEQPKLSRDEQRGRGALLQDICKGTKLKKVTNINDRSAPILEKPKGSSGGYGSGGAALQPKGGLFQGGVLKLRPVGAKDGSENLAGKPALQIPSSRAAAPRPPVSAASGRPQDDTDSSRASLPELPRMQRPSLPDLSRPNTTSSTGMKHSSSAPPPPPPGRRANAPPTPLPMHSSKAPAYNREKPLPPTPGQRLHPGREGPPAPPPVKPPPSPVNIRTGPSGQSLAPPPPPYRQPPGVPNGPSSPTNESAPELPQRHNSLHRKTPGPVRGLAPPPPTSASPSLLSNRPPPPARDPPSRGAAPPPPPPVIRNGARDAPPPPPPYRMHGSEPPSRGKPPPPPSRTPAGPPPPPPPPLRNGHRDSITTVRSFLDDFESKYSFHPVEDFPAPEEYKHFQRIYPSKTNRAARGAPPLPPILR

SEQ ID NO: 2355 - DNA, 6732 bp, Homo sapiens
gagagcgcggccgggacggttggagaagaaggcggctccccggaagggggagagacaaactgccgtaacctctgccgttcaggaacccggttacttatttattcgttaccctttttcttcttcctcccccaaaaaccttttccttttcccttctttttttttcctttttgggagctgaaaaatttccggtaagggaaagaagggctcctttcgctccttatttcgccgcctccttccctccgccaccttcccctcctccggctttttcctcccaactcggggaggtccttcccggtggccgccctgacgaggtctgagcacctaggcggaggcggcgcaggctttttgtagtgaggtttgcgcctgcgcaggcgcctgcctccgccatgcacgggggtggccccccctcgggggacagcgcatgcccgctgcgcaccatcaagagagtccagttcggagtcctgagtccggatgaactgaagcgaatgtctgtgacggagggtggcatcaaatacccagagacgactgagggaggccgccccaagcttggggggctgatggacccgaggcagggggtgattgagcggactggccgctgccaaacatgtgcaggaaacatgacagagtgtcctggccactttggccacattgaactggccaagcctgtgtttcacgtgggcttcctggtgaagacaatgaaagttttgcgctgtgtctgcttcttctgctccaaactgcttgtggactctaacaacccaaagatcaaggatatcctggctaagtccaagggacagcccaagaagcggctcacacatgtctacgacctttgcaagggcaaaaacatatgcgagggtggggaggagatggacaacaagttcggtgtggaacaacctgagggtgacgaggatctgaccaaagaaaagggccatggtggctgtgggcggtaccagcccaggatccggcgttctggcctagagctgtatgcggaatggaagcacgttaatgaggactctcaggagaagaagatcctgctgagtccagagcgagtgcatgagatcttcaaacgcatctcagatgaggagtgttttgtgctgggcatggagccccgctatgcacggccagagtggatgattgtcacagtgctgcctgtgcccccgctctccgtgcggcctgctgttgtgatgcagggctctgcccgtaaccaggatgacctgactcacaaactggctgacatcgtgaagatcaacaatcagctgcggcgcaatgagcagaacggcgcagcggcccatgtcattgcagaggatgtgaagctcctccagttccatgtggccaccatggtggacaatgagctgcctggcttgccccgtgccatgcagaagtctgggcgtcccctcaagtccctgaagcagcggttgaagggcaaggaaggccgggtgcgagggaacctgatgggcaaaagagtggacttctcggcccgtactgtcatcacccccgaccccaacctctccattgaccaggttggcgtgccccgctccattgctgccaacatgacctttgcggagattgtcacccccttcaacattgacagacttcaagaactagtgcgcagggggaacagtcagtacccaggcgccaagtacatcatccgagacaatggtgatcgcattgacttgcgtttccaccccaagcccagtgaccttcacctgcagaccggctataaggtggaacggcacatgtgtgatggggacattgttatcttcaaccggcagccaactctgcacaaaatgtccatgatggggcatcgggtccgcattctcccatggtctacctttcgcttgaatcttagcgtgacaactccgtacaatgcagactttgacggggatgagatgaacttgcacctgccacagtctctggagacgcgagcagagatccaggagctggccatggttcctcgcatgattgtcaccccccagagcaatcggcctgtcatgggtattgtgcaggacacactcacagcagtgcgcaaattcaccaagagagacgtcttcctggagcggggtgaagtgatgaacctcctgatgttcctgtcgacgtgggatgggaaggtcccacagccggccatcctaaagccccggcccctgtggacaggcaagcaaatcttctccctcatcatacctggtcacatcaattgtatccgtacccacagcacccatcccgatgatgaagacagtggcccttacaagcacatctctcctggggacaccaaggtggtggtggagaatggggagctgatcatgggcatcctgtgtaagaagtctctgggcacgtcagctggctccctggtccacatctcctacctagagatgggtcatgacatcactcgcctcttctactccaacattcagactgtcattaacaactggctcctcatcgagggtcatactattggcattggggactccattgctgattctaagacttaccaggacattcagaacactattaagaaggccaagcaggacgtaatagaggtcatcgagaaggcacacaacaatgagctggagcccaccccagggaacactctgcggcagacgtttgagaatcaggtgaaccgcattcttaacgatgcccgagacaagactggctcctctgctcagaaatccctgtctgaatacaacaacttcaagtctatggtcgtgtccggagctaaaggttccaagattaacatctcccaggtcattgctgtcgttggacagcagaacgtcgagggcaagcggattccatttggcttcaagcaccggactctgcctcacttcatcaaggatgactacgggcctgagagccgtggctttgtggagaactcctacctagccggcctcacacccactgagttctttttccacgccatggggggtcgtgaggggctcattgacacggctgtcaagactgctgagactggatacatccagcggcggctgatcaagtccatggagtcagtgatggtgaagtacgacgcgactgtgcggaactccatcaaccaggtggtgcagctgcgctacggcgaagacggcctggcaggcgagagcgttgagttccagaacctggctacgcttaagccttccaacaaggcttttgagaagaagttccgctttgattataccaatgagagggccctgcggcgcactctgcaggaggacctggtgaaggacgtgctgagcaacgcacacatccagaacgagttggagcgggaatttgagcggatgcgggaggatcgggaggtgctcagggtcatcttcccaactggagacagcaaggtcgtcctcccctgtaacctgctgcggatgatctggaatgctcagaaaatcttccacatcaacccacgccttccctccgacctgcaccccatcaaagtggtggagggagtcaaggaattgagcaagaagctggtgattgtgaatggggatgacccactaagtcgacaggcccaggaaaatgccacgctgctcttcaacatccacctgcggtccacgttgtgttcccgccgcatggcagaggagtttcggctcagtggggaggccttcgactggctgcttggggagattgagtccaagttcaaccaagccattgcgcatcccggggaaatggtgggggctctggctgcgcagtcccttggagaacctgccacccagatgaccttgaataccttccactatgctggtgtgtctgccaagaatgtgacgctgggtgtgccccgacttaaggagctcatcaacatttccaagaagccaaagactccttcgcttactgtcttcctgttgggccagtccgctcgagatgctgagagagccaaggatattctgtgccgtctggagcatacaacgttgaggaaggtgactgccaacacagccatctactatgaccccaacccccagagcacggtggtggcagaggatcaggaatgggtgaatgtctactatgaaatgcctgactttgatgtggcccgaatctccccctggctgttgcgggtggagctggatcggaagcacatgactgaccggaagctcaccatggagcagattgctgaaaagatcaatgctggttttggtgacgacttgaactgcatctttaatgatgacaatgcagagaagctggtgctccgtattcgcatcatgaacagcgatgagaacaagatgcaagaggaggaagaggtggtggacaagatggatgatgatgtcttcctgcgctgcatcgagtccaacatgctgacagatatgaccctgcagggcatcgagcagatcagcaaggtgtacatgcacttgccacagacagacaacaagaagaagatcatcatcacggaggatggggaattcaaggccctgcaggagtggatcctggagacggacggcgtgagcttgatgcgggtgctgagtgagaaggacgtggaccccgtacgcaccacgtccaatgacattgtggagatcttcacggtgctgggcattgaagccgtgcggaaggccctggagcgggagctgtaccacgtcatctcctttgatggctcctatgtcaattaccgacacttggctctcttgtgtgataccatgacctgtcgtggccacttgatggccatcacccgacacggagtcaaccgccaggacacaggaccactcatgaagtgttcctttgaggaaacggtggacgtgcttatggaagcagccgcacacggtgagagtgaccccatgaagggggtctctgagaatatcatgctgggccagctggctccggccggcactggctgctttgacctcctgcttgatgcagagaagtgcaagtatggcatggagatccccaccaatatccccggcctgggggctgctggacccaccggcatgttctttggttcagcacccagtcccatgggtggaatctctcctgccatgacaccttggaaccagggtgcaacccctgcctatggcgcctggtcccccagtgttgggagtggaatgaccccaggggcagccggcttctctcccagtgctgcgtcagatgccagcggcttcagcccaggttactcccctgcctggtctcccacaccgggctccccggggtccccaggtccctcaagcccctacatcccttcaccaggtggtgccatgtctcccagctactcgccaacgtcacctgcctacgagccccgctctcctgggggctacacaccccagagtccctcttattcccccacttcaccctcctactcccctacctctccatcctattctccaaccagtcccaactatagtcccacatcacccagctattcgccaacgtcacccagctactcaccgacctctcccagctactcacccacctctcccagctactcgcccacctctcccagctattcgcccacctctcccagctactcacccacttcccctagctattcgcccacttcccctagctactcgccaacgtctcccagctactcgccgacatctcccagctactcgccaacttcacccagctattctcccacttctcccagctactcacctacctctccaagctattcacccacctcccccagctactcacccacttccccaagttactcacccaccagcccgaactattctccaaccagtcccaattacaccccaacatcacccagctacagcccgacatcacccagctattcccctactagtcccaactacacacctaccagccctaactacagcccaacctctccaagctactctccaacatcacccagctattccccgacctcaccaagttactccccttccagcccacgatacacaccacagtctccaacctataccccaagctcacccagctacagccccagttcgcccagctacagcccaacctcacccaagtacaccccaaccagtccttcttatagtcccagctccccagagtataccccaacctctcccaagtactcacctaccagtcccaaatattcacccacctctcccaagtactcgcctaccagtcccacctattcacccaccaccccaaaatactccccaacatctcctacttattccccaacctctccagtctacaccccaacctctcccaagtactcacctactagccccacttactcgcccacttcccccaagtactcgcccaccagccccacctactcgcccacctcccccaaaggctcaacctactctcccacttcccctggttactcgcccaccagccccacctacagtctcacaagcccggctatcagcccggatgacagtgacgaggagaactgagggcacgtggggtgcggcagcgggctagggcccagggcagcttgcccgtgctgccgtgcagttcttgcctccctcacggggcgtcacccccagcccagctccgttgtacataaataccttgtgacagagctcccggtgaacttctggatcccgtttctgatgcagattcttgtcttgttctccacttgtgctgttagaactcactggcccagtggtgttctacctcctaccccacccaccccctgcctgtccccaaattgaagatccttccttgcctgtggcttgatgcggggcgggtaaagggtattttaacttaggggtagttcctgctgtgagtggttacagctgatcctcgggaagaacaaagctaaagctgccttttgtctgttattttatttttttgaagtttaaataaagtttactaattttgacc

SEQ ID NO: 2356 - protein, 1970 aa, Homo sapiens
MHGGGPPSGDSACPLRTIKRVQFGVLSPDELKRMSVTEGGIKYPETTEGGRPKLGGLMDPRQGVIERTGRCQTCAGNMTECPGHFGHIELAKPVFHVGFLVKTMKVLRCVCFFCSKLLVDSNNPKIKDILAKSKGQPKKRLTHVYDLCKGKNICEGGEEMDNKFGVEQPEGDEDLTKEKGHGGCGRYQPRIRRSGLELYAEWKHVNEDSQEKKILLSPERVHEIFKRISDEECFVLGMEPRYARPEWMIVTVLPVPPLSVRPAVVMQGSARNQDDLTHKLADIVKINNQLRRNEQNGAAAHVIAEDVKLLQFHVATMVDNELPGLPRAMQKSGRPLKSLKQRLKGKEGRVRGNLMGKRVDFSARTVITPDPNLSIDQVGVPRSIAANMTFAEIVTPFNIDRLQELVRRGNSQYPGAKYIIRDNGDRIDLRFHPKPSDLHLQTGYKVERHMCDGDIVIFNRQPTLHKMSMMGHRVRILPWSTFRLNLSVTTPYNADFDGDEMNLHLPQSLETRAEIQELAMVPRMIVTPQSNRPVMGIVQDTLTAVRKFTKRDVFLERGEVMNLLMFLSTWDGKVPQPAILKPRPLWTGKQIFSLIIPGHINCIRTHSTHPDDEDSGPYKHISPGDTKVVVENGELIMGILCKKSLGTSAGSLVHISYLEMGHDITRLFYSNIQTVINNWLLIEGHTIGIGDSIADSKTYQDIQNTIKKAKQDVIEVIEKAHNNELEPTPGNTLRQTFENQVNRILNDARDKTGSSAQKSLSEYNNFKSMVVSGAKGSKINISQVIAVVGQQNVEGKRIPFGFKHRTLPHFIKDDYGPESRGFVENSYLAGLTPTEFFFHAMGGREGLIDTAVKTAETGYIQRRLIKSMESVMVKYDATVRNSINQVVQLRYGEDGLAGESVEFQNLATLKPSNKAFEKKFRFDYTNERALRRTLQEDLVKDVLSNAHIQNELEREFERMREDREVLRVIFPTGDSKVVLPCNLLRMIWNAQKIFHINPRLPSDLHPIKVVEGVKELSKKLVIVNGDDPLSRQAQENATLLFNIHLRSTLCSRRMAEEFRLSGEAFDWLLGEIESKFNQAIAHPGEMVGALAAQSLGEPATQMTLNTFHYAGVSAKNVTLGVPRLKELINISKKPKTPSLTVFLLGQSARDAERAKDILCRLEHTTLRKVTANTAIYYDPNPQSTVVAEDQEWVNVYYEMPDFDVARISPWLLRVELDRKHMTDRKLTMEQIAEKINAGFGDDLNCIFNDDNAEKLVLRIRIMNSDENKMQEEEEVVDKMDDDVFLRCIESNMLTDMTLQGIEQISKVYMHLPQTDNKKKIIITEDGEFKALQEWILETDGVSLMRVLSEKDVDPVRTTSNDIVEIFTVLGIEAVRKALERELYHVISFDGSYVNYRHLALLCDTMTCRGHLMAITRHGVNRQDTGPLMKCSFEETVDVLMEAAAHGESDPMKGVSENIMLGQLAPAGTGCFDLLLDAEKCKYGMEIPTNIPGLGAAGPTGMFFGSAPSPMGGISPAMTPWNQGATPAYGAWSPSVGSGMTPGAAGFSPSAASDASGFSPGYSPAWSPTPGSPGSPGPSSPYIPSPGGAMSPSYSPTSPAYEPRSPGGYTPQSPSYSPTSPSYSPTSPSYSPTSPNYSPTSPSYSPTSPSYSPTSPSYSPTSPSYSPTSPSYSPTSPSYSPTSPSYSPTSPSYSPTSPSYSPTSPSYSPTSPSYSPTSPSYSPTSPSYSPTSPSYSPTSPSYSPTSPNYSPTSPNYTPTSPSYSPTSPSYSPTSPNYTPTSPNYSPTSPSYSPTSPSYSPTSPSYSPSSPRYTPQSPTYTPSSPSYSPSSPSYSPTSPKYTPTSPSYSPSSPEYTPTSPKYSPTSPKYSPTSPKYSPTSPTYSPTTPKYSPTSPTYSPTSPVYTPTSPKYSPTSPTYSPTSPKYSPTSPTYSPTSPKGSTYSPTSPGYSPTSPTYSLTSPAISPDDSDEEN

SEQ ID NO: 2357 - DNA, 575 bp, Homo sapiens
tccacatcttcatatttatttccacagtgttaacatggaatagacttagcaaccattgcagagaaaaaaaaaatctctcattggtttatgagttaaatcctgtaacaatgaatttcaaccattcgaagtcttctgctgcttaacatttactgaatcaaaggctgaagtaaatggactctcatctaggtctcagaaatcacacagctggcctcgtgatgtatttacgatgggatttaacttctaatacaaggcaagtttgacagttacagccaatgaagtgcacgactctgtacatggatttcttgacctaacattcaaaaggacatttcatagtactagtttaattctgatctctctctagaaggcagaaaccacatcccacactcctatgcaatttgttattttggtattgtaaagtaaatgaataagaaggggtggaggcataaagaaaatctagtttctggctgggcagggtggttcacgcttgtaatcccgcactttgggaggccaagcgggtggatccgaggtcaggaaatgagatcacctggcccacaggtgaaacccgttctacaaaa

SEQ ID NO: 2358 - DNA, 1994 bp, Homo sapiens
gctgccaccgctcctgccactgcagtgctcgagccccgtgcaggggagcttgcgggaggatcgaccgacagacggacgcacgccgaggcactgcgcccccagccccgcgccggtgccaccgcagcccgaccccggccgccagtccagccgcccctcgcccggtgcctaggtgcccggccccacaccgccagctgctcggcgcccgggtccgccatgcgctccgccgctgtcctggctcttctgctctgcgccgggcaagtcactgcgctccctgtgaacagccctatgaataaaggggataccgaggtgatgaaatgcatcgttgaggtcatctccgacacactttccaagcccagccccatgcctgtcagccaggaatgttttgagacactccgaggagatgaacggatcctttccattctgagacatcagaatttactgaaggagctccaagacctcgctctccaaggcgccaaggagagggcacatcagcagaagaaacacagcggttttgaagatgaactctcagaggttcttgagaaccagagcagccaggccgagctgaaagaggcggtggaagagccatcatccaaggatgttatggagaaaagagaggattccaaggaggcagagaaaagtggtgaagccacagacggagccaggccccaggccctcccggagcccatgcaggagtccaaggctgaggggaacaatcaggcccctggggaggaagaggaggaggaggaggaggccaccaacacccaccctccagccagcctccccagccagaaatacccaggcccacaggccgagggggacagtgagggcctctctcagggtctggtggacagagagaagggcctgagtgcagagccagggtggcaggcaaagagagaagaggaggaggaggaggaggaggaggctgaggctggagaggaggctgtccccgaggaagaaggccccactgtagtgctgaacccccacccgagccttggctacaaggagatccggaaaggcgagagtcggtcggaggctctggctgtggatggagctgggaagcctggggctgaggaggctcaggaccccgaagggaagggagaacaggagcactcccagcagaaagaggaggaggaggagatggcagtggtcccgcaaggcctcttccggggtgggaagagcggagagctggagcaggaggaggagcggctctccaaggagtgggaggactccaaacgctggagcaagatggaccagctggccaaggagctgacggctgagaagcggctggaggggcaggaggaggaggaggacaaccgggacagttccatgaagctctccttccgggcccgggcctacggcttcaggggccctgggccgcagctgcgacgaggctggaggccatcctcccgggaggacagccttgaggcgggcctgcccctccaggtccgaggctaccccgaggagaagaaagaggaggagggcagcgcaaaccgcagaccagaggaccaggagctggagagcctgtcggccattgaagcagagctggagaaagtggcccaccagctgcaggcactacggcggggctgagacaccggctggcagggctggccccagggcaccctgtggccctggctctgctgtccccttggcaggtcctggccagatggcccggacgctgcttccggtagggaggcagcctccagcctgcccaagcccaggccaccctatcgccccctacgcgccttgtctcctactcctgactcctacctgccctggaacatcctttgcagggcagccccacaactttaaacattgacgattccttctctgaacacaggcagctttctagaagtttcccttcctccatcctatccactgggcacaactgcaataacttctgaccttttggtgaaagctgagaactcctgactgtaacatattctgtatgaactttatctaaagaaaaataaatctgttctgggctctttcctctg

SEQ ID NO: 2359 - protein, 457 aa, Homo sapiens
MRSAAVLALLLCAGQVTALPVNSPMNKGDTEVMKCIVEVISDTLSKPSPMPVSQECFETLRGDERILSILRHQNLLKELQDLALQGAKERAHQQKKHSGFEDELSEVLENQSSQAELKEAVEEPSSKDVMEKREDSKEAEKSGEATDGARPQALPEPMQESKAEGNNQAPGEEEEEEEEATNTHPPASLPSQKYPGPQAEGDSEGLSQGLVDREKGLSAEPGWQAKREEEEEEEEEAEAGEEAVPEEEGPTVVLNPHPSLGYKEIRKGESRSEALAVDGAGKPGAEEAQDPEGKGEQEHSQQKEEEEEMAVVPQGLFRGGKSGELEQEEERLSKEWEDSKRWSKMDQLAKELTAEKRLEGQEEEEDNRDSSMKLSFRARAYGFRGPGPQLRRGWRPSSREDSLEAGLPLQVRGYPEEKKEEEGSANRRPEDQELESLSAIEAELEKVAHQLQALRRG

SEQ ID NO: 2360 - DNA, 4999 bp, Homo sapiens
ggaagcccgggagtgagagaaagcggctccgggggcatagcgggccagtaagggccgctcctcctttgaagaggttttgcgtctctttccgccggtggcgtcggcgctcacgcaggggcgggtcccggtagcgccaggcggtgcagggcgggaaggggattcgtggcgacggcggcggcaagggacagcaggagcagtggtgctgtcagcgcggccgtcggagacatgggagacccggggtcggagataatagaatctgtccctccagctggccctgaggcatctgagtcaacaacggatgaaaatgaagacgacattcagtttgtcagtgaaggaccattacgacctgttcttgaatacattgatctggtcagcagtgatgatgaagagcctagcacctcttatactgatgagaatattaaacgtaaagaccatattgattatcagaaggataaagttgctttaactctggctcgtctagcccgccatgttgaagtggagaaacagcagaaagaagagaagaatagagcattcagagaaaaaattgattttcagcatgctcatgggttacaagaattggaatttattcgaggacattctgatacagaagcagcaagactgtgtgtggaccagtggctaaaaatgccaggactcaaaacaggcacaattaattgtggaacaaaaagttcattccgaagaggaggccacacgtgggtgtctgggaaaccaactttatgtcctataatgcactgtaacaaggagtttgacaatgggcaccttctcttaggacatttgaaaaggttcgatcactctccatgtgatccaacaattacactacatggacctttcttcagctcctttgcttgtgtagtatgttataaaaaatttgttactcaacaacaatatagagatcacctttttgataaggaagccacagatgatggacataacaacaaccttcttcctcagattattcagtgttttgcatgtccaaattgcttccttctttttagcagaaaggaggagtgttcaaagcatatgtctggaaagaatcatttccatcagagtttcaaactgggtgataacaaaggaattgcacatccaatatctttcccatcttttgcaaagaaacttttgatctctctgtgcaaagatgttccctttcaagttaagtgtgtggcctgccacaagacactgcgttcccacatggagctcactgcccatttcagagttcattgtcgaaatgctggacctgtagctgtagctgagaagagcattacccaggttgcagagaaattcatattaagaggttattgtccagattgcaatcaagtctttgtggatgaaaccagcacccaaaatcataagcagaattcaggacacaaagtccgagtcattaactcagtggaagaatcagtcttactctattgccacagcagcgaagggaacaaggatccttcttctgacttgcatttattgttggatcaatcaaaattttcatcacttaaaagaaccatgtctattaaagaatctagctcactggagtgcattgccattccaaaaaagaagatgaatttaaaagataaaagccatgaaggtgttgcttgtgtccagaaagaaaaatcagtagttaaaacctggttctgtgaatgcaatcagcgattcccaagtgaagatgcagtagaaaagcatgttttctcagcaaacacaatgggttataaatgtgtggtctgtggaaaggtatgtgatgattcaggggtcattcgtttacacatgagccggattcacggaggggcacatttaaataactttcttttctggtgtcggacatgcaaaaaggagttaacaaggaaagatactatcatggcacatgtgactgaatttcataatggacacagatatttttatgagatggatgaggtagaaggtgaaactttgccatcatcctctacaacattggataatttgactgctaacaagccttcatcagctattactgttattgatcattccccggcaaatagttctccgaggggtaaatggcaatgccggatttgtgaagatatgtttgattcccaggaatatgtaaaacagcactgcatgtctttggcaagccacaagtttcatagatacagctgtgctcactgcagaaagccttttcataagatagaaacattgtaccgacattgccaagatgagcatgacaatgagataaagattaaatacttctgtgggctttgtgatcttatctttaatgtggaagaagcatttctgagtcattatgaggagcaccacagcatagattatgtatttgtgtcagaaaaaactgaaacttcaattaaaaccgaagatgattttccagtaatagagaccagtaaccagttaacttgtggttgccgtgagagttacatctgtaaagtcaacagaaaagaagattatagcagatgtctccaaatcatgctggataaaggaaaactgtggtttcgctgcagtttatgttcggcaacagcacagaatttaaccgacatgaacactcatatccatcaagtgcacaaagaaaagagtgatgaggaggagcagcagtatgtaatcaagtgtggcacctgcaccaaagcatttcatgatcctgagagtgcacagcagcatttccatagaaaacattgcttcttacagaaacccagtgtggctcattttggatctgaaaaatcaaacctgtacaagtttactgctagtgcctcacatacagagagaaaactgaaacaggcaataaactattcaaaaagtttagacatggagaaaggagttgagaatgacctaagctatcagaatataggaggaaacaccaattggaagcctccgctcaactgtaagatttataactacctgaacaggattggatgcttcttccttcatcctcgctgtagtaaaagaaaagatgctgctgattttgccatatgtatgcatgctggccgtctagatgaacaactacccaagcaaattcctttcaccatcctctcaggagatcaaggttttctggagctagagaatcaatttaagaagactcagaggccagctcatatactaaaccctcaccacttagagggagatatgatgtgtgccttgttaaatagcatatctgataccaccaaagaatgtgacagtgatgataacatgggtgccaaaaatacttcaataggagaagaatttatatccacagaagatgtggaattagaagaagctattagaagaagtcttgaggaaatgtaattaaagatattaccacacaacatcaagtggccttgaagagactgagataacgaattcttgagtttgttttctaaaggagaccagaaatccactattacaaatgtatttgaaaacatgtttttgctttcatatgttcaaaatttgatctttgttttgtatttttgtgctaatgtgcaaacatgtacagaagaaatagaatacatgttcatgcaaatataaattatgtattctaatataggtgtaacagtttcccagttaactttgaatttatatatttagatttaaaggattaaaaaaaaggaaagctcttgacagttgtttcccaaatagcattagttctttaattttatttgtactgtacaaatgatgctagtttatttttttagcagtgaaaatgaatataaaaaaggtgacataggtcaagttttccataaattctacttctcatgtggcactattatataatacctttgagatctttgtttatgtttattagaagagggtaatggaaactgatcatggaaacatttaaaattttatcagcaatgttctttgtgggtgccatgcatatgtaaattattgctttaattagagcagcacattgctaaaataaaaaatacaccttaatttttaagaaataatttaaatgaaacaatttccattccttttacctgcttagacttttatgtgacttgtatggtctcctggttaaagggaatggtgtcagaatatttgcataaaattatttttcataacagtccttttttatatattggtgtaaacataatattcttcaagaaataatgttgaaagcctactcaggaataatcttccttaactctttaaatttttatttcatgtgaagtgttttcagtttagttattcactgaattgtcagtttccttcatttggtattacatatttaattcttaaatattgaggccccattgtgagtaataaaaaatacgacataagtagaagactaagaagggcttgtcatattatctttgtgtatatgcttcatgttatttaaccagaaatgtcttatctctaaaaatttttagtagtaattatttaccaaacttaaaaacatttctataaatataaagcttttctttatatttaagacaaaatataaaggctagaatttggttccttctctgtaacactaaatattttagtgtgaaattgaatttttttattactatagtcttttcaatctataatttgtgtttttaatttcttgatatgtcacttctgttcctccctgcttgcattttttaaaaactagacattgtggcttgagaatttatcaatcatctttccgaaatgaccacattgtgcttttagtttgtatgtttaagtggtcaagcaaggctctaggaggtagtcactgagctggaccttaaacacatctgcaggagctcacaaaatgggagcaaaagaggcattccagaaagaagagtagttaagcagatgtgggggcagggcaagaggagacagcaccttgttgccagagattctacacaaaggtgtgatggacactgatgctctattaagaagcttttgtggtgtgtgtggtagagaataattaaggcttctgataagacaggaaagggatatttcatcatgactgttaagaaaaggtaactgggttgtttaatgttttaattgataattgtcactgatcgtatttctacttgttaaataattaaaaatcatcttaaaattc

SEQ ID NO: 2361 - protein, 1013 aa, Homo sapiens
MGDPGSEIIESVPPAGPEASESTTDENEDDIQFVSEGPLRPVLEYIDLVSSDDEEPSTSYTDENIKRKDHIDYQKDKVALTLARLARHVEVEKQQKEEKNRAFREKIDFQHAHGLQELEFIRGHSDTEAARLCVDQWLKMPGLKTGTINCGTKSSFRRGGHTWVSGKPTLCPIMHCNKEFDNGHLLLGHLKRFDHSPCDPTITLHGPFFSSFACVVCYKKFVTQQQYRDHLFDKEATDDGHNNNLLPQIIQCFACPNCFLLFSRKEECSKHMSGKNHFHQSFKLGDNKGIAHPISFPSFAKKLLISLCKDVPFQVKCVACHKTLRSHMELTAHFRVHCRNAGPVAVAEKSITQVAEKFILRGYCPDCNQVFVDETSTQNHKQNSGHKVRVINSVEESVLLYCHSSEGNKDPSSDLHLLLDQSKFSSLKRTMSIKESSSLECIAIPKKKMNLKDKSHEGVACVQKEKSVVKTWFCECNQRFPSEDAVEKHVFSANTMGYKCVVCGKVCDDSGVIRLHMSRIHGGAHLNNFLFWCRTCKKELTRKDTIMAHVTEFHNGHRYFYEMDEVEGETLPSSSTTLDNLTANKPSSAITVIDHSPANSSPRGKWQCRICEDMFDSQEYVKQHCMSLASHKFHRYSCAHCRKPFHKIETLYRHCQDEHDNEIKIKYFCGLCDLIFNVEEAFLSHYEEHHSIDYVFVSEKTETSIKTEDDFPVIETSNQLTCGCRESYICKVNRKEDYSRCLQIMLDKGKLWFRCSLCSATAQNLTDMNTHIHQVHKEKSDEEEQQYVIKCGTCTKAFHDPESAQQHFHRKHCFLQKPSVAHFGSEKSNLYKFTASASHTERKLKQAINYSKSLDMEKGVENDLSYQNIGGNTNWKPPLNCKIYNYLNRIGCFFLHPRCSKRKDAADFAICMHAGRLDEQLPKQIPFTILSGDQGFLELENQFKKTQRPAHILNPHHLEGDMMCALLNSISDTTKECDSDDNMGAKNTSIGEEFISTEDVELEEAIRRSLEEM

SEQ ID NO: 2362 - DNA, 5360 bp, Homo sapiens
ttgaggtgcattgaaatgttccaagctgttacttaccttaacatgttcttgaggtaccatggcatggattaaaaggaaatttggtaagtggcctccacttaaacgacttactagggaagctatgtgaaattatttaaaagggcgaggggatcaaatagtacttatccttcatgcaaaagttgtacagaagtcatatggaatgaaaaaggttttttgccctcccccttgtgtatatcttatgggcagtggatggaagaaaataaaattacaaatgaaatgcgatggttgttctgaacaaggctctcatccatgtgcatttattgggataggaaatagtgaccaagaaatgcagcagctaaacttggaaggaaagaactattgcacagccaaaacattgtacatatctgattcagacaagcaaaagcacttcatgttgtctgtaaaggtgttctatggcaacggtgatgacattggtgtgttcctcagcaagtcgtccaaaccttccaaaaagaagcagtcattgaaaaatgctgacttatgcattggctcaggaacaaaggtggctctgtttaatcgactacgatcccagacagttagtaccagatacttgcatgtagaaggagggaattttcatgccagttcacagcagtggggagcatttacattattcttggatgatgatggatcagaaggagaagaattcacagtcagagatggctacattcattatggacaaacagtcaagcttgtgtgctcagttactggcatggcactcccaagattgataattaggaaagttgataagcagaccacattattggatgcagatgatcctgtgtcacaactccataaatgtgcatttgaccttgaggatacagaaagaatgtacttatgcctttctcaagaaagaataattcaatttcaggccactccatgcccaacagaaccaaataaagagatgataaatgatggtgcttcctgggcaatcattagcacacataaggcgaagtatacattttatgagagaatgggccctgtccttgccctggtcatgcctatgcctgtcgtagagagccttaagttgaatggcggtggggacgaagcaatgcttgaacttacaggacagaatttcactccaaatttacgagtgtggtttggggatgtagaagctgaaactatgtacaggtgtggagagagtatgctccgtgttgtcccagacgttctgcattctgagaaggttggagatagttcccagcaaccagtccaggtttcagtaactttggtccgaaatgatggaatcatatattccaccagccttacctttacctacacaccagaagcagggccgcggccacattgcagtgtagcaggcgcaatccttaaggccagttcaagccacgtgccccctaatgaattaaacacaaacagcgatggaagttacacaaatgccagcacaaattcaaccagtgtcacatcatctacaccaacagtggtatcctgaactaccgtctttttgctaagactcaaacggcttgagtgcagcaaaaagttgacaaaaaaggaaaaaaaaatgaacagtcttttgtggtttattgggaaacttttcataccaggtgatactattctaaaaccccgttgtctccctgcaagtgctgatttgaaatgcagaagccacagtaaaaaaaaaaaaaaaaaaaaaaaaaaaagaaaaaaaaatcaaaatgtataaatattggaaatcaagtttttcagctgttttgttggttggttggttggtttttgtttggttttgtttaaagggacaagaagtaaataatgtggctggaatacaagttgaacaaactagaagacacaaatctaacatagtttttatggaccaaggaacttgtatattgtataagctttagtaaaaggtacattttcaccatacctttttttatatcacggtattatagtacaccttgttaccaataggttgttctcttccccaccctcctttgagctttgctctaaaatacattctggttccaagcctgaccatccttgtttaatctatcatactcttccaggtttttttttttggtctaaggctggaacttttttctttttttttcagctgaagtcttatgactttttcatgagtcaaaattgtttggatttcacgaagtcaaatcttgcaaaggcctgcatattttttttaagattatatgaagtctgtgcaaaaagctttaaaaaattgcctctgccttgcctgcatacatgcaatgtatgtaacttagtctctcttctcagacactgttgggtagttatttctgtgttttctttttttaaaaaaaaatatggacttattgtggtttatctgagaggttctaacattcacatgcaatttggtgtggcatttagctattatgagttattggcgcgaacttgtttgatatttgaagtgtctctccccttttcccatgacgtaatacataggtgtgttccaggatttgttcaggtttttccccccctcctaatcttgtacataacttgtattttgtgtaagttaaacattttatttgaacttggaatgttcccagtgatttcattcagcagggtattttctgccttgttggcaagtagcaaaaaatatgggaagtatttgctaccagttgttagatggtgccccttattggtagaatcaggaaaatgtccgcaaaagcatgttttattatctttacttttttggggggttggagggggtagcctagccagacatcatgtaatcttaaaacataagatgcttttattagatgatcaactaaaaatagctggaagacagtactttagaaacaaaatagttagtaagatatataatgcaaatgtaacttatgttttcatttttttctctgccttttttttttgttttttttctttttttccagtactgagcatctccacaaatgtctcctactcagaaaatgtttcttttctttcagttgagatttggtgcattcagggttgtaggttggccttgcttgctaacccgccggttttaccgtgctttattcctgaactttgtttatgcctttgtttggttcttctgaaattgcagcagactcattgggctacatttagtacaggaaccacgtgtgtaatgttatacaacacagtcagtaatacaatcatccctcttagagtaaaaactacctctagattgtgtaagctttttactgtccataaaacaggagccacagtaccttatgaatgcaaaactgtaacttcctacagtgtttccccacagaacattgtctttctggtgtctgggctgtttttgaaaaagtttccattaatagactttttagaaattattattagtagcattttttttccagctttgcgtcttcatcactcactcaagtgtcagactatgcactgtaaatatcttcctaacatctttaaatcgccttttcctcagttttcaaggggaaggtcatttgtaaagcacgttaggtggttaaatcagttattgcggttttctcttacagcaagcctttttaatcacccccaggctgcattttattctatatcgccttttttcttcaaatctgctccaatcatccacttctctcttataagctattcctgcctcacacctaaatctgtttcagtgatcaagggcagaactcattgtggccttatctttctttgttgtaattgttcactgtctctttcttacagaccacttattctgagtagtagttattcctccctatggagtcatggcaggaatcattacacagtgcttttgttcagagcatggacatgttccaggtgctgctttgctttaacggccacaagtttcctccacttctcaggtttggtatttagtaaggaatcaattaaattaaccaataacaaaagagatacttttgaagaacaaactattctttacccattttgtagctcaaaaataatttttcaagttcatgaccttattaaaatgaacttgtgtttttttaacaaacgtctattttattttgatagtttctttccgaagataattgaaatattatactgtaacccttttcttttcttttttgaaaagtccaagaatgtacttatacaggatttttccccacctatttttggccattctcataccacagacaaaagagtgaatgattgtcattgtagcttattgtttatcagtagttcttttgtagctgcttacattttttctttcatggtttgtgaatcatttcagtatgtaatttataggaaccttgtcctctggtatagtagactgtgtgccctcctccaggatggcattattagacatgctggtcatttaccctcagaaagactctcttatagaatggtgagtgcttcagttatagtatgtttgaattttaaaaaattcctgtttagaatgtatctatgctctcatgactatgcagtttctaacatacacatagaagctgagtctctgatccaatatgtttttatttgttccattaatttatcacatagattgggaaggcaagctaaaagccttaaaaatgccctttatattttgagtgatttcagcgttgaacacagtatactatctaaatttgctgctcactttcttaaactgttgcaattaaaggcatgtttatacatgactaatcgtgaaatgtttgtcactcttactgcacagacttatctgcaatcaaactggttagtttttttgttttgttttgttttattgtttttaatgaatctggtaccatctgtgctttcacaaaaaacttccaatgccatttttgagaactaacctaacagtcatgctaaccagaaaatccactggggaggaggttcctttgaaacaaaatgctgttcagttagtaaccaagttactttgattgcaaaagcagctgtgtttctgataagtactgaacaaatgtgtgtaattttctgtgccagacttatgactttgttttcaagcactgtaatgtgggatggatggttagaaacaataatatatagggtttctgttaaccctttcaggactcaactgtatctccttttgttaattttcccctgtgttgtgataaattgtttgccagcattcagtactgtgttggtgcagatgaggtttatatctcattttagcttatttcttgtacctttcagcatgcctacgcattcagtccttaaggggtttattttacaaactgtgcgcctgaagtttattagcaataagatagaaaatgagcaagtttataccataattttgagaaaaaaagaatctgctcagttccatatttcatccgtgaaaaacttgcaatacgagcagtttcaaggaataaataaaaaggaaatgaaaccattgt

SEQ ID NO: 2363 - protein, 420 aa, Homo sapiens
MGSGWKKIKLQMKCDGCSEQGSHPCAFIGIGNSDQEMQQLNLEGKNYCTAKTLYISDSDKQKHFMLSVKVFYGNGDDIGVFLSKSSKPSKKKQSLKNADLCIGSGTKVALFNRLRSQTVSTRYLHVEGGNFHASSQQWGAFTLFLDDDGSEGEEFTVRDGYIHYGQTVKLVCSVTGMALPRLIIRKVDKQTTLLDADDPVSQLHKCAFDLEDTERMYLCLSQERIIQFQATPCPTEPNKEMINDGASWAIISTHKAKYTFYERMGPVLALVMPMPVVESLKLNGGGDEAMLELTGQNFTPNLRVWFGDVEAETMYRCGESMLRVVPDVLHSEKVGDSSQQPVQVSVTLVRNDGIIYSTSLTFTYTPEAGPRPHCSVAGAILKASSSHVPPNELNTNSDGSYTNASTNSTSVTSSTPTVVS

SEQ ID NO: 2364 - DNA, 2110 bp, Homo sapiens
ctgaggcccagcccccttcgcccgtttccatcacgagtgccgccagcatgtctgacaaactgccctacaaagtcgccgacatcggcctggctgcctggggacgcaaggccctggacattgctgagaacgagatgccgggcctgatgcgtatgcgggagcggtactcggcctccaagccactgaagggcgcccgcatcgctggctgcctgcacatgaccgtggagacggccgtcctcattgagaccctcgtcaccctgggtgctgaggtgcagtggtccagctgcaacatcttctccacccaggaccatgcggcggctgccattgccaaggctggcattccggtgtatgcctggaagggcgaaacggacgaggagtacctgtggtgcattgagcagaccctgtacttcaaggacgggcccctcaacatgattctggacgacgggggcgacctcaccaacctcatccacaccaagtacccgcagcttctgccaggcatccgaggcatctctgaggagaccacgactggggtccacaacctctacaagatgatggccaatgggatcctcaaggtgcctgccatcaatgtcaatgactccgtcaccaagagcaagtttgacaacctctatggctgccgggagtccctcatagatggcatcaagcgggccacagatgtgatgattgccggcaaggtagcggtggtagcaggctatggtgatgtgggcaagggctgtgcccaggccctgcggggtttcggagcccgcgtcatcatcaccgagattgaccccatcaacgcactgcaggctgccatggagggctatgaggtgaccaccatggatgaggcctgtcaggagggcaacatctttgtcaccaccacaggctgtattgacatcatccttggccggcactttgagcagatgaaggatgatgccattgtgtgtaacattggacactttgacgtggagatcgatgtcaagtggctcaacgagaacgccgtggagaaggtgaacatcaagccgcaggtggaccggtatcggttgaagaatgggcgccgcatcatcctgctggccgagggtcggctggtcaacctgggttgtgccatgggccaccccagcttcgtgatgagtaactccttcaccaaccaggtgatggcgcagatcgagctgtggacccatccagacaagtaccccgttggggttcatttcctgcccaagaagctggatgaggcagtggctgaagcccacctgggcaagctgaatgtgaagttgaccaagctaactgagaagcaagcccagtacctgggcatgtcctgtgatggccccttcaagccggatcactaccgctactgagagccaggtctgcgtttcaccctccagctgctgtccttgcccaggccccacctctcctccctaagagctaatggcaccaactttgtgactggtttgtcagtgtcccccatcgactctctggggctgatcacttagtttttggcctctgctgcagccgtcatactgttccaaatgtggcagcgggaacagagtaccctcttcaagccccggtcatgatggaggtcccagccacagggaaccatgagctcagtggtcttggaacagctcactaagtcagtccttccttagcctggaagccagtagtggagtcacaaagcccatgtgttttgccatctaggccttcacctggtctgtggacttatacctgtgtgcttggtttacaggtccagtggttcttcagcccatgacagatgagaaggggctatattgaagggcaaagaggaactgttgtttgaattttcctgagagcctggcttagtgctgggccttctcttaaacctcattacaatgaggttagtacttttagtccctgttttacaggggttagaatagactgttaaggggcaactgagaaagaacagagaagtgacagctaggggttgagaggggccagaaaaacatgaatgcaggcagatttcgtgaaatctgccaccactttataaccagatggttcctttcacaaccctgggtcaaaaagagaataatttggcctataatgttaaaagaaagcaggaaggtgggtaaataaaaatcttggtgcctgg

SEQ ID NO: 2365 - protein, 432 aa, Homo sapiens
MSDKLPYKVADIGLAAWGRKALDIAENEMPGLMRMRERYSASKPLKGARIAGCLHMTVETAVLIETLVTLGAEVQWSSCNIFSTQDHAAAAIAKAGIPVYAWKGETDEEYLWCIEQTLYFKDGPLNMILDDGGDLTNLIHTKYPQLLPGIRGISEETTTGVHNLYKMMANGILKVPAINVNDSVTKSKFDNLYGCRESLIDGIKRATDVMIAGKVAVVAGYGDVGKGCAQALRGFGARVIITEIDPINALQAAMEGYEVTTMDEACQEGNIFVTTTGCIDIILGRHFEQMKDDAIVCNIGHFDVEIDVKWLNENAVEKVNIKPQVDRYRLKNGRRIILLAEGRLVNLGCAMGHPSFVMSNSFTNQVMAQIELWTHPDKYPVGVHFLPKKLDEAVAEAHLGKLNVKLTKLTEKQAQYLGMSCDGPFKPDHYRY

SEQ ID NO: 2366 - DNA, 3297 bp, Homo sapiens
gctccatggtcggcgcccacagcccgcgacggcctgtcttgcgctccacttccttcacatcctcctccgcctcctcgttttcaggcgccgccggcggcgctgtgtggaggcccgcgagctgaaattcgcggtgcgacgggagggagtggagaaggaggtgagggggcccaggatcgcggggcgccctgaggcaaggggacgccggcgggccgaagcgcagcccgccgcccgcaggctcggctccgccactgccgccctcccggtctcctcgcctcggccgccgaggcagggagagaatgagccccgggacccgccgggggacggcccgggccaggcccgggatctagacggccgtagggggaagggagccgccctccccacggcgccttttcggaactgccgtggactcgaggacgctggtcgccggcctcctagggctgtgctgttttgttttgaccctcgcattgtgcagaattaaagtgcagtaaaatgtccactaggaccccattgccaacggtgaatgaacgagacactgaaaaccacacgtcacatggagatgggcgtcaagaagttacctctcgtaccagccgctcaggagctcggtgtagaaactctatagcctcctgtgcagatgaacaacctcacatcggaaactacagactgttgaaaacaatcggcaaggggaattttgcaaaagtaaaattggcaagacatatccttacaggcagagaggttgcaataaaaataattgacaaaactcagttgaatccaacaagtctacaaaagctcttcagagaagtaagaataatgaagattttaaatcatcccaatatagtgaagttattcgaagtcattgaaactgaaaaaacactctacctaatcatggaatatgcaagtggaggtgaagtatttgactatttggttgcacatggcaggatgaaggaaaaagaagcaagatctaaatttagacagattgtgtctgcagttcaatactgccatcagaaacggatcgtacatcgagacctcaaggctgaaaatctattgttagatgccgatatgaacattaaaatagcagatttcggttttagcaatgaatttactgttggcggtaaactcgacacgttttgtggcagtcctccatacgcagcacctgagctcttccagggcaagaaatatgacgggccagaagtggatgtgtggagtctgggggtcattttatacacactagtcagtggctcacttccctttgatgggcaaaacctaaaggaactgagagagagagtattaagagggaaatacagaattcccttctacatgtctacagactgtgaaaaccttctcaaacgtttcctggtgctaaatccaattaaacgcggcactctagagcaaatcatgaaggacaggtggatcaatgcagggcatgaagaagatgaactcaaaccatttgttgaaccagagctagacatctcagaccaaaaaagaatagatattatggtgggaatgggatattcacaagaagaaattcaagaatctcttagtaagatgaaatacgatgaaatcacagctacatatttgttattggggagaaaatcttcagagctggatgctagtgattccagttctagcagcaatctttcacttgctaaggttaggccgagcagtgatctcaacaacagtactggccagtctcctcaccacaaagtgcagagaagtgtttcttcaagccaaaagcaaagacgctacagtgaccatgctggaccagctattccttctgttgtggcgtatccgaaaaggagtcagaccagcactgcagatagtgacctcaaagaagatggaatttcctcccggaaatcaagtggcagtgctgttggaggaaagggaattgctccagccagtcccatgcttgggaatgcaagtaatcctaataaggcggatattcctgaacgcaagaaaagctccactgtccctagtagtaacacagcatctggtggaatgacacgacgaaatacttatgtttgcagtgagagaactacagctgatagacactcagtgattcagaatggcaaagaaaacagcactattcctgatcagagaactccagttgcttcaacacacagtatcagtagtgcagccaccccagatcgaatccgcttcccaagaggcactgccagtcgtagcactttccacggccagccccgggaacggcgaaccgcaacatataatggccctcctgcctctcccagcctgtcccatgaagccacaccattgtcccagactcgaagccgaggctccactaatctctttagtaaattaacttcaaaactcacaaggagtcgcaatgtatctgctgagcaaaaagatgaaaacaaagaagcaaagcctcgatccctacgcttcacctggagcatgaaaaccactagttcaatggatcccggggacatgatgcgggaaatccgcaaagtgttggacgccaataactgcgactatgagcagagggagcgcttcttgctcttctgcgtccacggagatgggcacgcggagaacctcgtgcagtgggaaatggaagtgtgcaagctgccaagactgtctctgaacggggtccggtttaagcggatatcggggacatccatagccttcaaaaatattgcttccaaaattgccaatgagctaaagctgtaacccagtgattatgatgtaaattaagtagcaattaaagtgttttcctgaacactgatggaaatgtatagaataatatttaggcaataacgtctgcatcttctaaatcatgaaattaaagtctgaggacgagagcacgcctgggagcgaaagctggccttttttctacgaatgcactacattaaagatgtgcaacctatgcgccccctgccctacttccgttaccctgagagtcggcgtgtggccccatctccatgtgcctcccgtctgggtgggtgtgagagtggacggtatgtgtgtgaagtggtgtatatggaagcatctccctacactggcagccagtcattactagtacctctgcgggagatcatccggtgctaaaacattacagttgccaaggaggaaaatactgaatgactgctaagaattaaccttaagaccagttcatagttaatacaggtttacagttcatgcctgtggttttgtgtttgttgttttgtgtttttttagtgcaaaaggtttaaatttatagttgtgaacattgcttgtgtgtgtttttctaagtagattcacaagataattaaaaattcactttttctcagtaaaaaaaaaaaaaaaaaa

SEQ ID NO: 2367 - protein, 713 aa, Homo sapiens
MSTRTPLPTVNERDTENHTSHGDGRQEVTSRTSRSGARCRNSIASCADEQPHIGNYRLLKTIGKGNFAKVKLARHILTGREVAIKIIDKTQLNPTSLQKLFREVRIMKILNHPNIVKLFEVIETQKTLYLIMEYASGGKVFDYLVAHGRMKEKEARSKFRQIVSAVQYCHQKRIVHRDLKAENLLLDADMNIKIADFGFSNEFTVGGKLDTFCGSPPYAAPELFQGKKYDGPEVDVWSLGVILYTLVSGSLPFDGQNLKELRERVLRGKYRIPFYMSTDCENLLKRFLVLNPIKRGTLEQIMKDRWINAGHEEDELKPFVEPELDISDQKRIDIMVGMGYSQEEIQESLSKMKYDEITATYLLLGRKSSEVRPSSDLNNSTGQSPHHKVQRSVSSSQKQRRYSDHAGPGIPSVVAYPKRSQTSTADSDLKEDGISSRKSTGSAVGGKGIAPASPMLGNASNPNKADIPERKKSSTVPSSNTASGGMTRRNTYVCSERTTDDRHSVIQNGKENSTIPDQRTPVASTHSISSAATPDRIRFPRGTASRSTFHGQPRERRTATYNGPPASPSLSHEATPLSQTRSRGSTTLFSKLTSKLTRSRNVSAKQKDENKEAKPRSLRFTWSMKTTSSMDPGDMMREIRKVLDANNCDYEQRERFLLFCVHGDGHAENLVQWEMEVCKLPRLSLNGVRFKRISGTSIAFKNIASKIANELKL

SEQ ID NO: 2368 - DNA, 5032 bp, Homo sapiens
gctgagcgggttggcatctggggcagcgggctcgctccaggccgtcgggggccgctcgccagcgtcgcccgctgtgttgggagcgcgggccgtgggcgtcgctcggccttgtccgcggcgtccccgctgccggccacggcgctcagcgcttgtgctctgtattgcaggtctaccccgagccccggagcgagagcgagtgcctgagcaacatccgcgagttcctgcgcggctgcggggcttccctgcggctggagacgtttgatgcaaatgatttgtatcaggggcagaattttaacaaggtcctcagttccttagtgactctaaataaagtaacagcagacatcgggctggggagtgactccgtgtgtgcccggccctcgtctcaccgcataaagtcttttgactcccttggatcacagtctttgcacactcggacttcaaaactgttccagggccagtatcggagtttggacatgaccgataatagcaacaatcaactggtagtaagagcaaagtttaacttccagcagaccaatgaggacgagctttccttctcaaaaggagacgtcatccatgtcacccgtgtggaagagggaggctggtgggagggcacactcaacggccggaccggctggttccccagcaactacgtgcgcgaggtcaaggccagcgagaagcctgtgtctcccaaatcaggaacactgaagagccctcccaaaggatttgatacgactgccataaacaaaagctattacaatgtggtgctacagaatattttagaaacagaaaatgaatattctaaagaacttcagactgtgctttcaacgtacctacggccattgcagaccagtgagaagttaagttcagcaaacatttcatatttaatgggaaatctagaagaaatatgttctttccagcaaatgctcgtacagtctttagaagaatgcaccaagttgcccgaagctcagcagagagtcggaggctgctttttaaacctgatgccacagatgaaaaccctgtacctcacgtattgtgccaatcacccttctgcagtgaatgtcctcacggaacacagtgaggagttgggggagttcatggagaccaaaggtgccagcagccctgggattctcgtgctgaccacgggcctgagcaaacccttcatgcgcctggataaataccctacgctgctcaaagagctcgagagacacatggaggattatcatacagatagacaagatattcaaaaatccatggctgccttcaaaaacctttcagcccaatgtcaagaagtccggaagaggaaagagcttgagctgcagatcctgacggaagccatccggaactgggagggcgatgacattaaaactctgggcaacgtcacttacatgtcccaggtcctgattcagtgtgccggaagtgaggaaaagaatgaaagatatcttctactcttcccaaatgttttgctaatgttgtctgccagtcctaggatgagtggctttatctatcagggaaagcttccaacgacaggaatgacaatcacaaagcttgaggacagtgaaaatcatagaaatgcatttgaaatatcagggagcatgattgagcggatattagtgtcgtgcaacaaccagcaggatctgcaggaatgggtggagcacctacagaagcaaacgaaggtcacgtctgtgggaaaccccaccataaagcctcattcagtgccatctcataccctcccctcccacccggtcactccgtccagcaagcacgcagacagcaagcccgcgccgctgacgcccgcctaccacacgctgccccacccctcccaccacggcaccccgcacaccaccatcaactggggacccctggagcctccgaaaacacccaagccctggagcctgagctgcctgcggcccgcgcctcccctccggccctcagctgctctctgctacaaggaggatcttagtaagagccctaagaccatgaaaaagctgctgcccaagcgcaaacctgaacggaagccttcagatgaggagttcgcgtcccggaaaagcacagctgctttggaagaagatgctcagattctgaaagtcattgaagcttactgcaccagcgccaaaacaaggcaaacactcaattcaagttcacgcaaagaatctgctccacaagttttgcttccagaagaagagaaaattatagtggaagaaactaaaagtaatggtcagacagtgatagaagaaaagagtcttgtggataccgtatatgcattaaaggatgaagttcaagaattaagacaggacaacaaaaagatgaagaaatctctagaggaagaacagagagcccgcaaagacctggagaagctggtgaggaaagtcctgaagaacatgaatgatcctgcctgggatgagaccaatctataagggacgtcctcagttctttctgttgaagaccagttctgaggtgaagctgggcacccctgacccaagtcggggtgcactcaggaccacagggcagggctgggtggggcgccaccttgctctctgtatatagaaaagctggagcttattctgcgaatggagacgatcaaaccatgactgatgaatccagacaggagggattgactctgaggacctgagctacatcaatccactctgtgaacatctcagttacctcattctgcaataagttcagtgactgactaaaagtcttgtttttccagactttgaattgaatatataaatattatatatacatgtttcttgtaaatatcccattttgaatgcatacctgtggtggttctgtccgggctaatccccatgctagaatgtcctttccagctacgtgaataagaagtcccatgcccgcacccaccggaagcagaagcctggtggatgcctggttcgttccgcagcaccagggcctccaccgtgctgtggcagcaccccccatgtcggtatttctaaataaccttatttatacctgcagagatacacttcagtcccattcagaagtcttctcttaaagcagcattacagtcccagacctgcgggtttctgagggcaacttgctggctgacagactcagtcttgacctcaaggaaggcccatacggcactgccgcatccacctagaggtgtttgctcttgtccgctgtctgagtactgtgattctcagatgagtttgctgcgttttgggaggacacagacggttctgtataggctagttcagtaacaacaaaatacactgttttgtcttccctcaaagagagatcttactagaacctgtaaatagaatgtattatttattataagtcactgcagctgatgaaaacagatggaggccatgctgcaggctgatactgatgggtggagttttgtcatcaggccagcctcatcccgaggtctcctccaccattggccgtagccagcaggcttcagtgctcaccgaaagtaaaatcccctccttcagcaagaataaagcaatatacaccttaggttccactaagtaacataggcataagcagggaacgtttcccccactgtgttccagtgcagaggagacgaagcctgtcctcaccgcggctcgctgggcccaggctggctctggaaagcctgtgcggtcctgggcaggaagcccggcccgtggagcaggttttcgttctgcttcagcaataaataagggtgaccacagggactttgcttttggtttcctttcctgtgaaaaggttggttttaaagtgagatacacttttccgtagaacaagtgttctatctttaaaaacccaaattgcagcaccgtggattactggtctcagaacaactcattgcgcatcagatttgactctctgattttctgtctattggccaaattgccctttaactgcacctgaatcctttgtgtactgatgcctttgagctgggcaccttgggagagtgttgtgttgctgtttacggttcttccttgcccttgctaattacagtctctggtgcccagcaagcccctttggcttccttccgtgactggtcacgttgtctgcctgggctcagcgtggacctgccccatgctgcagaacctggcctcacctggacttttcactagaattgccagcttcctcaacttagcagatcattcactcatgcgggcacaagcaaagatcaacactttcttttttggtaagcttgagttttacaagttattttttggtgatgcgtaagacattgcagtgggaaaccattcaacttgagtttattggagtttgctgttgtagcaggttttaactcaggaacaactcttgtctgatctctccgcccctctgccgggaggcgacattaactgtcctctcggagccggtagcgttgctgtccgagtccccaggacggatctcctgcagacctgccttaatgctcagatcgaagtatttcacaagaatacttgtgtttttaacagcccttcccctggacggtgcggccatgagggcctcatgttacggcattgccttttctttctgtggatccagtatcttcctcggctttttagggagcaggaaaaatgcgtctgagagcaactctttttaaaaacctgccctgttgtatataactgtgtctgtttcaccgtgtgacctcccaagggggtgggaacttgatataaacgtttaaaggggccacgatttgcccgagggttactcctttgctctcaccttgtatggatgaggagatgaagccatttcttatcctgtagatgtgaagcactttcagttttcagcgatgttggaatgtagcatcagaagctcgttccttcacactcagtggcgtctgtgcttgtccacatgcgctgggcgtctgggaccttgaatgcctgccctggttgtgtggactccttaatgccaatcatttcttcacttctctgggacacccagggcgcctgttgacaagtgtggagaaactcctaatttaaatgtcacagacaatgtcctagtgttgactactacaatgttgatgctacactgttgtaattattaaactgattatttttcttatgtc

SEQ ID NO: 2369 - protein, 646 aa, Homo sapiens
MTDNSNNQLVVRAKFNFQQTNEDELSFSKGDVIHVTRVEEGGWWEGTLNGRTGWFPSNYVREVKASEKPVSPKSGTLKSPPKGFDTTAINKSYYNVVLQNILETENEYSKELQTVLSTYLRPLQTSEKLSSANISYLMGNLEEICSFQQMLVQSLEECTKLPEAQQRVGGCFLNLMPQMKTLYLTYCANHPSAVNVLTEHSEELGEFMETKGASSPGILVLTTGLSKPFMRLDKYPTLLKELERHMEDYHTDRQDIQKSMAAFKNLSAQCQEVRKRKELELQILTEAIRNWEGDDIKTLGNVTYMSQVLIQCAGSEEKNERYLLLFPNVLLMLSASPRMSGFIYQGKLPTTGMTITKLEDSENHRNAFEISGSMIERILVSCNNQQDLQEWVEHLQKQTKVTSVGNPTIKPHSVPSHTLPSHPVTPSSKHADSKPAPLTPAYHTLPHPSHHGTPHTTINWGPLEPPKTPKPWSLSCLRPAPPLRPSAALCYKEDLSKSPKTMKKLLPKRKPERKPSDEEFASRKSTAALEEDAQILKVIEAYCTSAKTRQTLNSSSRKESAPQVLLPEEEKIIVEETKSNGQTVIEEKSLVDTVYALKDEVQELRQDNKKMKKSLEEEQRARKDLEKLVRKVLKNMNDPAWDETNL

SEQ ID NO: 2370 - DNA, 5304 bp, Homo sapiens
ggcggcggcggcggcggcgggggccgcgggccgggccgccgctccgaggtgaaggcgcgcgcccctccccgcctgcctcccgggccgcagcgatgaattccgccgagcaaaccgttacgtggctcatcactctgggggtgctggagtcgcccaaaaaaaccatctcggacccggagggctttctgcaggcgtcgctgaaggatggggtggtcctctgcaggctgctggagcgcctgctccccgggaccatcgagaaagtctaccccgagccccggagcgagagcgagtgcctgagcaacatccgcgagttcctgcgcggctgcggggcttccctgcggctggagacgtttgatgcaaatgatttgtatcaggggcagaattttaacaaggtcctcagttccttagtgactctaaataaagtaacagcagacatcgggctggggagtgactccgtgtgtgcccggccctcgtctcaccgcataaagtcttttgactcccttggatcacagtctttgcacactcggacttcaaaactgttccagggccagtatcggagtttggacatgaccgataatagcaacaatcaactggtagtaagagcaaagtttaacttccagcagaccaatgaggacgagctttccttctcaaaaggagacgtcatccatgtcacccgtgtggaagagggaggctggtgggagggcacactcaacggccggaccggctggttccccagcaactacgtgcgcgaggtcaaggccagcgagaagcctgtgtctcccaaatcaggaacactgaagagccctcccaaaggatttgatacgactgccataaacaaaagctattacaatgtggtgctacagaatattttagaaacagaaaatgaatattctaaagaacttcagactgtgctttcaacgtacctacggccattgcagaccagtgagaagttaagttcagcaaacatttcatatttaatgggaaatctagaagaaatatgttctttccagcaaatgctcgtacagtctttagaagaatgcaccaagttgcccgaagctcagcagagagtcggaggctgctttttaaacctgatgccacagatgaaaaccctgtacctcacgtattgtgccaatcacccttctgcagtgaatgtcctcacggaacacagtgaggagttgggggagttcatggagaccaaaggtgccagcagccctgggattctcgtgctgaccacgggcctgagcaaacccttcatgcgcctggataaataccctacgctgctcaaagagctcgagagacacatggaggattatcatacagatagacaagatattcaaaaatccatggctgccttcaaaaacctttcagcccaatgtcaagaagtccggaagaggaaagagcttgagctgcagatcctgacggaagccatccggaactgggagggcgatgacattaaaactctgggcaacgtcacttacatgtcccaggtcctgattcagtgtgccggaagtgaggaaaagaatgaaagatatcttctactcttcccaaatgttttgctaatgttgtctgccagtcctaggatgagtggctttatctatcagggaaagcttccaacgacaggaatgacaatcacaaagcttgaggacagtgaaaatcatagaaatgcatttgaaatatcagggagcatgattgagcggatattagtgtcgtgcaacaaccagcaggatctgcaggaatgggtggagcacctacagaagcaaacgaaggtcacgtctgtgggaaaccccaccataaagcctcattcagtgccatctcataccctcccctcccacccggtcactccgtccagcaagcacgcagacagcaagcccgcgccgctgacgcccgcctaccacacgctgccccacccctcccaccacggcaccccgcacaccaccatcaactggggacccctggagcctccgaaaacacccaagccctggagcctgagctgcctgcggcccgcgcctcccctccggccctcagctgctctctgctacaaggaggatcttagtaagagccctaagaccatgaaaaagctgctgcccaagcgcaaacctgaacggaagccttcagatgaggagttcgcgtcccggaaaagcacagctgctttggaagaagatgctcagattctgaaagtcattgaagcttactgcaccagcgccaaaacaaggcaaacactcaattcaacatggcaaggcactgacctgatgcataatcacgtcttggctgatgatgaccaaccaagcctagactccctggggcgtcgcagtagcctttctcgtttggagccttcagacctctcggaagactctgactatgacagtatatggacagcccatagttacagaatgggttctacatctcgtaagagctgttgctcatatatctctcaccagaactaatgcacttctgagcttttcttaacaaatgcttgttgtatcgcagcctgcttttcttagatgttttcttgctgttccttgtctcttttatgtgatattttaacaacttttgagagtgttcctgatatttcccattgtactttgtggaggcttaactgccgatgcgagtatacattcgaatgactgactattggagggaggtggtgtgttcacgtgagcctacatccgagggtgctcttcgtaaggggtagttgttgttttatagctccaaatggtttttttattctcagtgtagcaactgtttgatttctttctggatacagctgtatgaacacttttctattttatactgaaatcacacaggtttgtgatctaagtgccagaaccatggaggagactctggccttatctgtagggacctaaattttttaagtgctatgaacactgatcaagtagttgtggagagatgagaagaatatatgcagcaaaggtgctgtgagcccagttccaacggctgtgttctggtaatcgtgcagaacagcatgtgggctctgggccttggcaggtgcacagacgggcgggcgtcacgtgtgttcagagcttgtctccacctcacggctctgtgctcttctgtgtgctgcgttgtggccgtgaagtgggagctctcctttccaaaggcagagcttactgtcatggctcagatgttcactcgcatcttcaccccaaacttccctgaattgcagtgatttctgttataaggcacatagcaagcctgtaccactctacagtaaaatctctacactaacagtttaaagcccgaaagctgaagcattcagcctctgcaagtgtagactactggactgtagtagaggcatttggaatacttacaaagtcaagtgctgtggcttcagttcccccggctccccacccctgacatccatacttatgttgtctggaagagccatggacacatcattattttcagcaaccagctgcagtgaaactccatttacagcaaccccatagtataaaaccacaatgcctcattgtaatgggatattgaagttcattgaagaattactaggttgccatgtggctcacttatttaaaaaaaaaaaaaaaaaactcacccgttttcctgggatttgttgtaaggagttttcactggcctcactcagaccaatttctgcttcaaaaagcactgaatgtgacctgttgcattcagttgtagcatcaaatccacacctagtcattgcttgaggggccaaattgtgttctgtcccatgcacgctctatttggtgttaaaatggaaccttacggttgtgttttaagtattcattgaaaccagcttcagaaaacaagatgccatagtaaattgagaataacattttttccttcttcagggtggctgtaattccaggtggccgtgatttctttcttccccactgcccactccttcgccaaacccacgtattcagtgttctgatcttgtttgtgcagagtgaactctgatgcagtatcagtcttgtcctgggagccgggtcctgctgctcacaagcccagagctgccagggagctcctggcagtagcacgttgtttagaaagttgggtggcttcattcagcatggaacaagctaatggcacaggagacatcagggcagctgttaattccaaatatttgttcccaagtagctactgaactgctcacaccattggaagattttgtattttcataccaattagtaaaaataagaacattgaggagcagtcagagcccagtgttaatctccggcagagatggggtttatgtatgttcagccagatagtaaatgggatttttggagaaataagataactacaaagtttctatacttactataagtggatttagaagcgattttggttttgtattacatacggtagtcctctgcgtcagggagcacttttttgtttgcctcgagactactcattagcgcactggctaagctgcctttgccttctcgtaggcgtgggttgcctgtgtcatgggctgtgtagaccacaacactcaaacacagttgctgcacttggattttcctttaataccaagtatcatttggttatcttactgggacattttcattgatattctatacaccaaagttttgacggtttaccatcattccattttgtaccagttaaaggcattttgatgatgctttttcttgatgctaagatcactgcagaagaataacctgaccttttctttgcatttgttttgaatgtctaacaccattagcttttgtgatctggttaagaagtattagtgccacaagcctgaaaagacagttctcctgtggcagtggcgatgtggcatccagagggccattgtttctacttttgtgggacttcagtcatgctgataatagaatcttctgttcatacaattctgtaatatttatttgtacagttagtattctaatgaaaggatgaagagtctgaactagaaggtaggtttaagccatcaccaggcctttgcaaatggcctaaatggtgttccctttgaaataacgcttgccacaagtatataataagctatattaattgtgttttgcataaaattgccaaaacacagtaatgtgtatatagtggtataagatcttgaaaaaaatctctataattgtgctctttatctgtgaatgggaaaagccatttttagtaggtgactaccatttgaaaaactcaattggatgtatatctgaatgttgcattgtattgtacagtatgcatattattgtttgtggttgcatatggcaatgaagtgtttgttttatattaaaaaaaacctgttatgtacagttgaaataaattttgcatttgctagcc

SEQ ID NO: 2371 - protein, 782 aa, Homo sapiens
MNSAEQTVTWLITLGVLESPKKTISDPEGFLQASLKDGVVLCRLLERLLPGTIEKVYPEPRSESECLSNIREFLRGCGASLRLETFDANDLYQGQNFNKVLSSLVTLNKVTADIGLGSDSVCARPSSHRIKSFDSLGSQSLHTRTSKLFQGQYRSLDMTDNSNNQLVVRAKFNFQQTNEDELSFSKGDVIHVTRVEEGGWWEGTLNGRTGWFPSNYVREVKASEKPVSPKSGTLKSPPKGFDTTAINKSYYNVVLQNILETENEYSKELQTVLSTYLRPLQTSEKLSSANISYLMGNLEEICSFQQMLVQSLEECTKLPEAQQRVGGCFLNLMPQMKTLYLTYCANHPSAVNVLTEHSEELGEFMETKGASSPGILVLTTGLSKPFMRLDKYPTLLKELERHMEDYHTDRQDIQKSMAAFKNLSAQCQEVRKRKELELQILTEAIRNWEGDDIKTLGNVTYMSQVLIQCAGSEEKNERYLLLFPNVLLMLSASPRMSGFIYQGKLPTTGMTITKLEDSENHRNAFEISGSMIERILVSCNNQQDLQEWVEHLQKQTKVTSVGNPTIKPHSVPSHTLPSHPVTPSSKHADSKPAPLTPAYHTLPHPSHHGTPHTTINWGPLEPPKTPKPWSLSCLRPAPPLRPSAALCYKEDLSKSPKTMKKLLPKRKPERKPSDEEFASRKSTAALEEDAQILKVIEAYCTSAKTRQTLNSTWQGTDLMHNHVLADDDQPSLDSLGRRSSLSRLEPSDLSEDSDYDSIWTAHSYRMGSTSRKSCCSYISHQN

SEQ ID NO: 2372 - DNA, 2455 bp, Homo sapiens
gaggccgctatggcgaacgttccgtgggcagaggtctgcgagaaattccaggcggcgctcgctctgtcgcgggtggaactgcataaaaatccggagaaggaaccatacaagtccaaatacagcgcccgggcgctactggaagaggtcaaggcgctgctcggccctgcgcctgaggacgaggatgagcggcctgaggccgaggacggcccgggtgccggtgaccacgccctggggctgccggctgaggtggtggagcccgaggggcccgtcgcccagcgagcggtgaggctggcagtcatcgagttccacctcggggtgaaccacatcgacacggaggagctgtcggcgggggaggagcacctggtgaaatgcctgcggctgctgcgcaggtaccggctctcgcacgactgcatctctctctgcatccaggcgcagaataacctgggtatcttgtggtctgaaagagaagaaattgaaactgcacaggcttacctagagtcatcagaagcactatataatcagtatatgaaagaggttgggagtcctcctcttgatcctactgagcgttttcttcctgaagaagagaaacttactgaacaagagagatcaaaaagatttgaaaaggtttatactcataacctatattacctagctcaagtctaccagcatctggaaatgtttgagaaggctgctcactattgccatagtacactaaaacgccagcttgagcacaatgcctaccatcctatagagtgggctatcaatgctgctaccttgtcacagttttacatcaataagctatgctttatggaggccaggcactgtttatcagctgctaatgtcatttttggtcaaactggaaagatctcagccacagaagacactcctgaagctgaaggagaagtgccagagctttatcatcaaagaaagggggaaatagcaaggtgctggatcaaatactgtttgactctcatgcagaatgcccaactctccatgcaggacaacataggagagcttgatcttgataaacagtctgaacttagagctttaaggaaaaaagaactagatgaggaggaaagcattcggaaaaaagctgtgcagtttggaaccggtgaactgtgtgatgccatctctgcagtagaagagaaagtgagctacttgagacctttagattttgaagaagccagagaacttttcttattgggtcagcactatgtctttgaggcaaaagagttctttcagattgatggttatgtcactgaccatattgaagttgtccaagaccacagtgctctgtttaaggtgcttgcattctttgaaactgacatggagagacggtgcaagatgcataaacgcagaatagccatgctagagcccctaactgtagacctgaatccacagtattatctgttggtcaacagacagatccagtttgaaattgcacatgcttactatgatatgatggatttgaaggttgccattgctgacaggctaagggatcctgattcacacattgtaaaaaaaataaataatcttaataagtcagcactgaagtactaccagctcttcttagactccctgagagacccaaataaagtattccctgagcatataggggaagatgttcttcgccctgccatgttagctaagtttcgagttgcccgtctctatggcaaaatcattactgcagatcccaagaaagagctggaaaatttggcaacatcattggaacattacaaatttattgttgattactgtgaaaagcatcctgaggccgcccaggaaatagaagttgagctagaacttagtaaagagatggttagtcttctcccaacaaaaatggagagattcagaaccaagatggccctgacttaatccttgtttttaaagaaaggaaatgtgcaatattgaagtgatctttttccctagtcagacaggcccaattccattgtgatgtttacctttatagccaggtgagtgcagtttgaacttgagatacagtcaactgagtgtttgctaggatcctaaggaacataaagttaattaaaaacttacacctaattatgtaaattgccttgttaaagacatgtgatttgtattttagatgcttgtttcctattaaaatacagacatttctaccctcagtttctaaatgtagactatttgttggctagtacttgatagattccttgtaagaaaaaatgctgggtaatgtacctggtaacaagcctgttaatatattaagattgaaaaagtaacttctatagttactccttctaaaatatttgacttcctaaattccccccacccaaaatctttcccttttgaaaatactaaaaactaagttatgttattataaagtgtaaaatggtttgtcttaattataggagaaaaaggccttgttagaaataaaataaactgacttatttcactaatgaaaaaaaaaaaaaaaaaa

SEQ ID NO: 2373 - protein, 621 aa, Homo sapiens
MANVPWAEVCEKFQAALALSRVELHKNPEKEPYKSKYSARALLEEVKALLGPAPEDEDERPEAEDGPGAGDHALGLPAEVVEPEGPVAQRAVRLAVIEFHLGVNHIDTEELSAGEEHLVKCLRLLRRYRLSHDCISLCIQAQNNLGILWSEREEIETAQAYLESSEALYNQYMKEVGSPPLDPTERFLPEEEKLTEQERSKRFEKVYTHNLYYLAQVYQHLEMFEKAAHYCHSTLKRQLEHNAYHPIEWAINAATLSQFYINKLCFMEARHCLSAANVIFGQTGKISATEDTPEAEGEVPELYHQRKGEIARCWIKYCLTLMQNAQLSMQDNIGELDLDKQSELRALRKKELDEEESIRKKAVQFGTGELCDAISAVEEKVSYLRPLDFEEARELFLLGQHYVFEAKEFFQIDGYVTDHIEVVQDHSALFKVLAFFETDMERRCKMHKRRIAMLEPLTVDLNPQYYLLVNRQIQFEIAHAYYDMMDLKVAIADRLRDPDSHIVKKINNLNKSALKYYQLFLDSLRDPNKVFPEHIGEDVLRPAMLAKFRVARLYGKIITADPKKELENLATSLEHYKFIVDYCEKHPEAAQEIEVELELSKEMVSLLPTKMERFRTKMALT

SEQ ID NO: 2374 - DNA, 6578 bp, Homo sapiens
ggtgaacagctcaaatccattttttacatcacagaccaaagccaatgggaatcctgcttgttcggcccagttgcagcatgtctcgccacccatttttccagctcatttagcaagtgtgtcaactccattgttgtcctcaatggaaagtgtcataaatccaaatataacttctcaggataaaaatgaacaaggtggtatgttatgttcccaaatggaaaatttacctagtactgccttgccagcacaaatggaagatctaaccaaaacagttctgcctttgaatattgacagtggctcagatcctttccttcctttacctgcagaaagtagttcaatgtctctcttcccttcaccagcagatagtgggactaattctgttttttcccaactggaaaataatacaaatcattattcctcacagattgaaggaaacactaattcctcctttctaaaggggggtaatggtgaaaatgcagtttttccttcacaagtgaatgttgcaaataacttcagtagcaccaatgcccaacagtctgcacctgaaaaagttaaaaaagaccgtgggcggggcccaaatgggaaggaaagaaaacctaagcacaacaaaagggctaaatggcctgcaattatcagagatgggaaatttatctgtagcaggtgttacagggcttttactaatcccagatcactgggtgggcacttatccaagcgatcttactgtaaaccactggatggagccgaaattgctcaagaacttctacagagtaatggacagccttctcttcttgccagcatgattctctccacaaatgcagtaaatttgcagcagccacaacaatctaccttcaatccagaagcatgttttaaagatccatcatttctacagcttcttgctgaaaatcgctcgccagcatttttaccaaatacatttcctcgatctggtgtgactaactttaataccagtgtcagtcaagaaggtagtgaaattattaaacaggctttggaaactgctggcattcccagtacatttgagggtgccgaaatgctttctcatgtttcaacaggttgtgtctctgatgcatcacaagtaaatgcaacggtgatgccaaatccaactgtaccacccctgttgcacactgtatgccatccaaacaccttgctgaccaaccagaataggacgtcaaactccaaaacttcctccattgaggaatgtagcagcttgcctgtttttccaacgaatgacttactactgaagactgttgaaaatggtttgtgctctagttcatttcctaattctggtgggccatcacaaaattttaccagtaacagttctcgtgtttctgttataagtggtcctcagaacacaagatccagtcatttaaataaaaagggaaacagtgcttctaagagaagaaagaaagttgctcctccactaattgcacctaacgcttcccaaaacttggtaacaagtgacttaacaacaatgggactcatagcaaagagtgttgaaatcccaactactaaccttcattcaaatgtaattccaacttgtgaacctcagagtttggtggaaaatctaacacagaaattaaataatgttaacaatcagttatttatgactgatgtaaaagagaatttcaaaaccagtcttgagtcccatacagtgttagcccctttaacattaaaaactgaaaatggtgattcccaaatgatggctttgaattcatgcacaacttcagtaaattctgatttgcagatttctgaagacaatgttatacaaaactttgaaaagactcttgaaattattaaaactgctatgaattctcaaatacttgaggtaaaaagtggatctcagggtgctggtgaaacttcacaaaatgctcaaataaattataacattcagcttccttcagtaaacactgtgcaaaataacaaattacccgattcttctccgttttcctcctttataagtgtcatgccaacaaaaagtaacattcctcagtctgaagtatcacataaggaggatcaaatacaggaaattttagaaggcttacagaaattaaaattagaaaatgacctatccactccagcatcccaatgtgtactgataaatacatcagtgacactgactcccacgcctgttaaatcaactgcagatatcacagttattcagccagtttctgaaatgataaacattcaatttaatgacaaagttaataaaccctttgtgtgtcaaaaccaaggctgtaactacagtgctatgacaaaggatgcactatttaagcactatggtaaaattcatcaatacactccagaaatgattcttgaaattaagaagaatcaattgaaatttgctccctttaaatgtgtagtacctacatgtacaaaaacatttacaagaaattctaacctccgggcacactgtcagttggtgcatcattttacaactgaagaaatggtaaagttaaaaattaaaaggccttatggaagaaaatctcagagtgaaaatgtgccggcctcacgaagtacacaagtgaaaaaacagctagctatgacagaggaaaataaaaaggaatctcagcctgctttagaattgagagcagagacccaaaatacccacagtaatgtagcagtgatcccagaaaaacaacttatagaaaaaaaaagtcctgacaaaacagaaagttctttacaagtgattacagttacttcagaacaatgtaatacaaatgcactcacaaacacacaaaccaaaggacggaagattaggaggcataaaaaagaaaaggaggagaaaaaacgaaagaagccagtttcccaatcccttgagtttccaacaagatacagtccttacagaccttatcgatgtgttcaccagggatgctttgctgcctttacgatacagcaaaatttgattctccattaccaggctgtacacaaatcagatctacctgcattttcagcagaggtcgaagaggaaagtgaagctggtaaagaaagtgaagaaactgaaactaaacaaactttgaaagaatttcgatgtcaggtaagtgactgttctcgaattttccaagcaattactggcctaatacaacactacatgaaacttcatgaaatgactcctgaagaaattgaaagtatgactgcttcagtggatgttgggaagtttccatgtgaccagttagagtgtaaatcttcatttactacatatttgaactatgttgttcatctagaggcagaccacgggattggactaagggcaagtaaaacagaagaagatggtgtatacaaatgtgattgtgaaggctgtgaccgtatatatgcaacccggtcgaatctcctccgacacatttttaataagcataatgacaaacataaggctcatttgattcgtccaagaagattaacaccaggccaggaaaatatgtcaagcaaggcaaaccaagaaaaatcaaagtctaaacatcgggggacgaagcacagcagatgtggaaaggaaggaataaaaatgcccaagaccaaacgaaagaaaaaaaataatttagaaaacaagaatgcaaagattgtgcagattgaagaaaataagccttattctctgaaacgtgggaagcatgtatattctataaaggctagaaatgatgccctgtctgagtgtacaagcagatttgtaacccagtatccatgtatgataaagggatgtacttcagttgttacaagtgaaagcaatataattagacattataagtgccataaattatctaaggcatttacatcacaacaccgaaatcttcttattgtattcaaacggtgttgcaactcacaagtaaaggaaacgtctgagcaagaaggtgctaagaatgatgtgaaagattctgacacgtgtgtatcagagagcaatgataattcaagaacaacagctacagtttcacaaaaggaagttgaaaaaaatgaaaaagatgaaatggatgaactaacagaattgtttattacaaaattaataaatgaagatagcacaagtgtagagacccaagctaatacttcttcaaatgtaagtaatgattttcaggaagataacctctgccagtcagaaagacaaaaagcaagtaatttgaagagagttaataaggaaaaaaatgtctcacaaaataaaaaaaggaaagttgaaaaagctgaaccagcatcagcagctgagttaagtagcgtgcgtaaagaagaagaaactgctgttgccattcaaaccattgaggagcatcctgcatcttttgactggagctcttttaagccaatgggatttgaagtatcatttctgaagtttcttgaggagtctgcagtgaagcagaagaaaaatactgacaaagaccatccgaatactggaaacaaaaaaggatcccattcaaattcaagaaaaaatattgataagactgctgtgactagtggaaatcatgtatgtccttgtaaagaaagcgaaacgtttgtacagtttgccaatccatcacagcttcagtgcagtgataatgtaaaaattgttttagacaagaatcttaaagattgcactgagcttgtcttaaagcaacttcaggaaatgaaacctaccgtcagtctgaaaaaacttgaagtacattcaaatgatccagatatgtctgttatgaaagatatcagtataggtaaagccacaggcagaggtcagtactgataattaatgtagtataaatacatcatttaccattttattttaaataggaagccatcaagcatgctagaattgtgaaactttcattatatttttttgttgttgacatgaattaacctggccaaaaacaaaaaagaaaaaaaaaacatgacatttgtcatgtaaaacttttttttatccctatgggacttgaggaacagaatcagtacttcagttattgtaaatagtgagctaaacctcaaatttctatcacccagttgcccttttcatgaactaaacaattatctgtgtgattggtatgtttcaccaggtcactgctcatgtataacagtactctttatttgtagataccttttttgtatatatttattattgtaaatcatgtgctgccaccagcagtctgtaagtctaaactattaaatgacacatttatatttggaattttaatttttaactaagcgatcaagttttttaaattgttcttttattgttttaaattaagaactttttgaactaaaaccagaaactctgccatagttcattgatttttacatgaaacatttatttacaagatgatatcaagattacttttcacaaaataggcacattatatcaacactttgctctgctttgtaaatttgccatccaggattttggggtggtattcatgtgaaattaaagcagattctctagcagtttcctatagctacagtttttttttttcattgcttctaattggatatagttactatgagtccatgaaatacaatggaaatgtgaataaagaatttactacattgaagattttaaacatttggtattaaaaaaaaatcctttgtgaatgtgatagaaaactagtagtgtggagcagtgtaaatatttgaggtggtgatttgtgaagtagcccagtattgccttaaataaaatcacatttcatttcttgttttatacatgtgatcttataaagattttttgttttgttttgttttccattttctgagatttatagattggtgtatagctttaaactgtataaagttttgtggaaagatttttttaaacatttttataaatcttaaaattgatatcatcaaagtgagcccatcttgtgtttataaaatacaagagtccttaacatttataattacatagataaaacactttctataaggaagttggatgttttgattttactgtttatagatgttagattgtacagatttgtctgtatttctcaccatatctaatgatacttttttcattagattggtcttcaagaacagtattagttataattattttggttattcagtatatagttagctcttacagtttagctttattcaccatatttatactgtggattcacagcgagaggtagaggttattccaggagagttgatgaccttcatttaaagtccaactaaaatcagtagtagaaacataagaaaacatctttgcaatatttacttttgtttctgtttgccgtaaatagtaacattgtttttttttattttgtgtttgttataaaacagttgcattcacaatattattggcctgagatattgatgatattgtgatggtatgaaaatgtgtacattccctgtgcaacatcagatttgcaggaaaaatgaagcacttactgaaatcgctggtactctgaataaataagcatggtcaaggagtgaactattttcttttggaaatttctttttaatttttattattaaagtattttatttttagggccttttgggttttattgaatagttcatttcacctgtttaagacttactaccaataagcataaaacctgacacgttaaaatccctgccctttggtgagcccactgttatttattaaaataaaagttattttatgggtgatt

SEQ ID NO: 2375 - protein, 1563 aa, Homo sapiens
VNSSNPFFTSQTKANGNPACSAQLQHVSPPIFPAHLASVSTPLLSSMESVINPNITSQDKNEQGGMLCSQMENLPSTALPAQMEDLTKTVLPLNIDSGSDPFLPLPAESSSMSLFPSPADSGTNSVFSQLENNTNHYSSQIEGNTNSSFLKGGNGENAVFPSQVNVANNFSSTNAQQSAPEKVKKDRGRGPNGKERKPKHNKRAKWPAIIRDGKFICSRCYRAFTNPRSLGGHLSKRSYCKPLDGAEIAQELLQSNGQPSLLASMILSTNAVNLQQPQQSTFNPEACFKDPSFLQLLAENRSPAFLPNTFPRSGVTNFNTSVSQEGSEIIKQALETAGIPSTFEGAEMLSHVSTGCVSDASQVNATVMPNPTVPPLLHTVCHPNTLLTNQNRTSNSKTSSIEECSSLPVFPTNDLLLKTVENGLCSSSFPNSGGPSQNFTSNSSRVSVISGPQNTRSSHLNKKGNSASKRRKKVAPPLIAPNASQNLVTSDLTTMGLIAKSVEIPTTNLHSNVIPTCEPQSLVENLTQKLNNVNNQLFMTDVKENFKTSLESHTVLAPLTLKTENGDSQMMALNSCTTSVNSDLQISEDNVIQNFEKTLEIIKTAMNSQILEVKSGSQGAGETSQNAQINYNIQLPSVNTVQNNKLPDSSPFSSFISVMPTKSNIPQSEVSHKEDQIQEILEGLQKLKLENDLSTPASQCVLINTSVTLTPTPVKSTADITVIQPVSEMINIQFNDKVNKPFVCQNQGCNYSAMTKDALFKHYGKIHQYTPEMILEIKKNQLKFAPFKCVVPTCTKTFTRNSNLRAHCQLVHHFTTEEMVKLKIKRPYGRKSQSENVPASRSTQVKKQLAMTEENKKESQPALELRAETQNTHSNVAVIPEKQLIEKKSPDKTESSLQVITVTSEQCNTNALTNTQTKGRKIRRHKKEKEEKKRKKPVSQSLEFPTRYSPYRPYRCVHQGCFAAFTIQQNLILHYQAVHKSDLPAFSAEVEEESEAGKESEETETKQTLKEFRCQVSDCSRIFQAITGLIQHYMKLHEMTPEEIESMTASVDVGKFPCDQLECKSSFTTYLNYVVHLEADHGIGLRASKTEEDGVYKCDCEGCDRIYATRSNLLRHIFNKHNDKHKAHLIRPRRLTPGQENMSSKANQEKSKSKHRGTKHSRCGKEGIKMPKTKRKKKNNLENKNAKIVQIEENKPYSLKRGKHVYSIKARNDALSECTSRFVTQYPCMIKGCTSVVTSESNIIRHYKCHKLSKAFTSQHRNLLIVFKRCCNSQVKETSEQEGAKNDVKDSDTCVSESNDNSRTTATVSQKEVEKNEKDEMDELTELFITKLINEDSTSVETQANTSSNVSNDFQEDNLCQSERQKASNLKRVNKEKNVSQNKKRKVEKAEPASAAELSSVRKEEETAVAIQTIEEHPASFDWSSFKPMGFEVSFLKFLEESAVKQKKNTDKDHPNTGNKKGSHSNSRKNIDKTAVTSGNHVCPCKESETFVQFANPSQLQCSDNVKIVLDKNLKDCTELVLKQLQEMKPTVSLKKLEVHSNDPDMSVMKDISIGKATGRGQY

SEQ ID NO: 2376 - DNA, 1948 bp, Homo sapiens
gtaggagtccgcggcagcctccgggtaagccaagcgccgcgcagtgctgagttcccgcacgccgcagagccatggagatcggcaccgagatcagccgcaagatccggagtgccattaaggggaaattacaagaattaggagcttatgttgatgaagaacttcctgattacattatggtgatggtggccaacaagaaaagtcaggaccaaatgacagaggatctgtccctgtttctagggaacaacacaattcgattcaccgtatggcttcatggtgtattagataaacttcgctctgttacaactgaaccctctagtctgaagtcttctgataccaacatctttgatagtaacgtgccttcaaacaagagcaatttcagtcggggagatgagaggaggcatgaagctgcagtgccaccacttgccattcctagcgcgagacctgaaaaaagagattccagagtttctacaagttcgcaggagtcaaaaaccacaaatgtcagacagacttacgatgatggagctgcaacccgactaatgtcaacagtgaaacctttgagggagccagcaccctctgaagatgtgattgatattaagccagaaccagatgatctcattgacgaagacctcaactttgtgcaggagaatcccttatctcagaaaaaaacctacagtgacacttacatatggttcttctcgcccttctattgaaatttatcgaccacctgcaagtagaaatgcagatagtggtgttcatttaaacaggttgcaatttcaacagcagcagaatagtattcatgctgccaagcagcttgatatgcagagtagttgggtatatgaaacaggacgtttgtgtgaaccagaggtgcttaacagcttagaagaaacgtatagtccgttctttagaaacaactcggagaaaatgagtatggaggatgaaaactttcggaagagaaagttgcctgtggtaagttcagttgttaaagtaaaaaaattcaatcatgatggagaagaggaggaagaagatgatgattacgggtctcgaacaggaagcatctccagcagtgtgtctgtgcctgcaaagcctgaaaggagaccttctcttccaccttctaaacaagctaacaagaatctgattttgaaggctatatctgaagctcaagaatccgtaacaaaaacaactaactactctacagttccacagaaacagacacttccagttgctcccagaactcgaacttctcaagaagaattgctagcagaagtggtccagggacaaagtaggacccccagaataagtccccccattaaagaagaggaaacaaaaggagattctgtagaaaaaaatcaagctgagatgagtgaactgagtgtggcacagaaaccagaaaaacttttggagcgctgcaagtactggcctgcttgtaaaaatggggatgagtgtgcctaccatcaccccatctcaccctgcaaagccttccccaattgtaaatttgctgaaaaatgtttgtttgttcacccaaattgtaaatatgatgcaaagtgtactaaaccagattgtcccttcactcatgtgagtagaagaattccagtactgtctccaaaaccagttgcaccaccagcaccaccttccagtagtcagctctgccgttacttccctgcttgtaagaagatggaatgtcccttctatcatccaaaacattgtaggtttaacactcaatgtacaagaccggactgcacattctaccatcccaccattaatgtcccaccacgacatgccttgaaatggattcgacctcaaaccagcgaatagcacccagtcctgcctggcagaagatcatgcagtttggaagttttcatgtactgatgaaagatactctacagaacttgtcaaatctttgaaacttggaatatattgctttcataatatgaagttttattgcctatct

SEQ ID NO: 2377 - protein, 401 aa, Homo sapiens
MISLTKTSTLCRRIPYLRKKPTVTLTYGSSRPSIEIYRPPASRNADSGVHLNRLQFQQQQNSIHAAKQLDMQSSWVYETGRLCEPEVLNSLEETYSPFFRNNSEKMSMEDENFRKRKLPVVSSVVKVKKFNHDGEEEEEDDDYGSRTGSISSSVSVPAKPERRPSLPPSKQANKNLILKAISEAQESVTKTTNYSTVPQKQTLPVAPRTRTSQEELLAEVVQGQSRTPRISPPIKEEETKGDSVEKNQAEMSELSVAQKPEKLLERCKYWPACKNGDECAYHHPISPCKAFPNCKFAEKCLFVHPNCKYDAKCTKPDCPFTHVSRRIPVLSPKPVAPPAPPSSSQLCRYFPACKKMECPFYHPKHCRFNTQCTRPDCTFYHPTINVPPRHALKWIRPQTSE

SEQ ID NO: 2378 - DNA, 1432 bp, Homo sapiens
gctgttcggcctgcgtcgctccgggagctgccgacggacggagcgcccccgcccccgcccggccgcccgcccgccgccgccatgcccttctccaacagccacaacgcactgaagctgcgcttcccggccgaggacgagttccccgacctgagcgcccacaacaaccacatggccaaggtgctgacccccgagctgtacgcggagctgcgcgccaagagcacgccgagcggcttcacgctggacgacgtcatccagacaggcgtggacaacccgggccacccgtacatcatgaccgtgggctgcgtggcgggcgacgaggagtcctacgaagtgttcaaggatctcttcgaccccatcatcgaggaccggcacggcggctacaagcccagcgatgagcacaagaccgacctcaaccccgacaacctgcagggcggcgacgacctggaccccaactacgtgctgagctcgcgggtgcgcacgggccgcagcatccgtggcttctgcctccccccgcactgcagccgcggggagcgccgcgccatcgagaagctcgcggtggaagccctgtccagcctggacggcgacctggcgggccgatactacgcgctcaagagcatgacggaggcggagcagcagcagctcatcgacgaccacttcctcttcgacaagcccgtgtcgcccctgctgctggcctcgggcatggcccgcgactggcccgacgcccgcggtatctggcacaatgacaataagaccttcctggtgtgggtcaacgaggaggaccacctgcgggtcatctccatgcagaaggggggcaacatgaaggaggtgttcacccgcttctgcaccggcctcacccagattgaaactctcttcaagtctaaggactatgagttcatgtggaaccctcacctgggctacatcctcacctgcccatccaacctgggcaccgggctgcgggcaggtgtgcatatcaagctgcccaacctgggcaagcatgagaagttctcggaggtgcttaagcggctgcgacttcagaagcgaggcacaggcggtgtggacacggctgcggtgggcggggtcttcgacgtctccaacgctgaccgcctgggcttctcagaggtggagctggtgcagatggtggtggacggagtgaagctgctcatcgagatggagcagcggctggagcagggccaggccatcgacgacctcatgcctgcccagaaatgaagcccggcccacacccgacaccagccctgctgcttcctaacttattgcctgggcagtgcccaccatgcacccctgatgttcgccgtctggcgagcccttagccttgctgtagagacttccgtcacccttggtagagtttatttttttgatggctaagatactgctgatgctgaaataaactagggttttggcctgcctgcgtctg

SEQ ID NO: 2379 - protein, 381 aa, Homo sapiens
MPFSNSHNALKLRFPAEDEFPDLSAHNNHMAKVLTPELYAELRAKSTPSGFTLDDVIQTGVDNPGHPYIMTVGCVAGDEESYEVFKDLFDPIIEDRHGGYKPSDEHKTDLNPDNLQGGDDLDPNYVLSSRVRTGRSIRGFCLPPHCSRGERRAIEKLAVEALSSLDGDLAGRYYALKSMTEAEQQQLIDDHFLFDKPVSPLLLASGMARDWPDARGIWHNDNKTFLVWVNEEDHLRVISMQKGGNMKEVFTRFCTGLTQIETLFKSKDYEFMWNPHLGYILTCPSNLGTGLRAGVHIKLPNLGKHEKFSEVLKRLRLQKRGTGGVDTAAVGGVFDVSNADRLGFSEVELVQMVVDGVKLLIEMEQRLEQGQAIDDLMPAQK

SEQ ID NO: 2380 - DNA, 3410 bp, Homo sapiens
gcaccaggcgcccagtggagccgtttgggagaattgcctgcgccacgcagcggggccggacaggcggtaaggatctgattaggctttcgaacttgagtttgactgatgtcttctgtgtggtgtccgctaaatcccacagcatataggatcagtcgcattggttataaggtttgcttctggctgggtgcggtggctcatgcctgtaatccaacattgggaggccaaggcaggcggaccacctgaagtcgggagcttgagtccagccactgtctgggtactgccagccatcgggcccaggtctctggggttgtcttaccgcagtgagtaccacgcggtactacagagaccggctgcccgtgtgcccggcaggtggagccgccgcatcagcggcctcggggaatggaagcggagaacgcgggcagctattcccttcagcaagctcaagctttttatacgtttccatttcaacaactgatggctgaagctcctaatatggcagttgtgaatgaacagcaaatgccagaagaagttccagccccagctcctgctcaggaaccagtgcaagaggctccaaaaggaagaaaaagaaaacccagaacaacagaaccaaaacaaccagtggaacccaaaaaacctgttgagtcaaaaaaatctggcaagtctgcaaaaccaaaagaaaaacaagaaaaaattacagacacatttaaagtaaaaagaaaagtagaccgttttaatggtgtttcagaagctgaacttctgaccaagactctccccgatattttgaccttcaatctggacattgtcattattggcataaacccgggactaatggctgcttacaaagggcatcattaccctggacctggaaaccatttttggaagtgtttgtttatgtcagggctcagtgaggtccagctgaaccatatggatgatcacactctaccagggaagtatggtattggatttaccaacatggtggaaaggaccacgcccggcagcaaagatctctccagtaaagaatttcgtgaaggaggacgtattctagtacagaaattacagaaatatcagccacgaatagcagtgtttaatggaaaatgtatttatgaaatttttagtaaagaagtttttggagtaaaggttaagaacttggaatttgggcttcagccccataagattccagacacagaaactctctgctatgttatgccatcatccagtgcaagatgtgctcagtttcctcgagcccaagacaaagttcattactacataaaactgaaggacttaagagatcagttgaaaggcattgaacgaaatatggacgttcaagaggtgcaatatacatttgacctacagcttgcccaagaggatgcaaagaagatggctgttaaggaagaaaaatatgatccaggttatgaggcagcatatggtggtgcttacggagaaaatccatgcagcagtgaaccttgtggcttctcttcaaatgggctaattgagagcgtggagttaagaggagaatcagctttcagtggcattcctaatgggcagtggatgacccagtcatttacagaccaaattccttcctttagtaatcactgtggaacacaagaacaggaagaagaaagccatgcttaagaatggtgcttctcagctctgcttaaatgctgcagttttaatgcagttgtcaacaagtagaacctcagtttgctaactgaagtgttttattagtattttactctagtggtgtaattgtaatgtagaacagttgtgtggtagtgtgaaccgtatgaacctaagtagtttggaagaaaaagtagggtttttgtatactagcttttgtatttgaattaattatcattccagctttttatatactatatttcatttatgaagaaattgattttcttttgggagtcacttttaatctgtaattttaaaatacaagtctgaatatttatagttgattcttaactgtgcataaacctagatataccattatcccttttatacctaagaagggcatgctaataattaccactgtcaaagaggcaaaggtgttgatttttgtatataagttaagcctcagtggagtctcatttgttagtttttagtggtaactaagggtaaactcagggttccctgagctatatgcacactcagacctctttgctttaccagtggtgtttgtgagttgctcagtagtaaaaactggcccttacctgacagagccctggctttgacctgctcagccctgtgtgttaatcctctagtagccaattaactactctggggtggcaggttccagagaatcgagtagaccttttgccactcatctgtgttttacttgagacatgtaaatatgatagggaaggaactgaatttctccattcatatttataaccattctagttttatcttccttggctttaagagtgtgccatggaaagtgataagaaatgaacttctaggctaagcaaaaagatgctggagatatttgatactctcatttaaactggtgctttatgtacatgagatgtactaaaataagtaatatagaatttttcttgctaggtaaatccagtaagccaataattttaaagattctttatctgcatcattgctgtttgttactataaattaaatgaacctcatggaaaggttgaggtgtatacctttgtgattttctaatgagttttccatggtgctacaaataatccagactaccaggtctggtagatattaaagctgggtactaagaaatgttatttgcatcctctcagttactcctgaatattctgatttcatacgtacccagggagcatgctgttttgtcaatcaatataaaatatttatgaggtctcccccacccccaggaggttatatgattgctcttctctttataataagagaaacaaattcttattgtgaatcttaacatgctttttagctgtggctatgatggattttattttttcctaggtcaagctgtgtaaaagtcatttatgttatttaaatgatgtactgtactgctgtttacatggacgttttgtgcgggtgctttgaagtgccttgcatcagggattaggagcaattaaattattttttcacgggactgtgtaaagcatgtaactaggtattgctttggtatataactattgtagctttacaagagattgttttatttgaatggggaaaataccctttaaattatgacggacatccactagagatgggtttgaggattttccaagcgtgtaataatgatgtttttcctaacatgacagatgagtagtaaatgttgatatatcctatacatgacagtgtgagactttttcattaaataatattgaaagattttaaaattcatttgaaagtctgatggcttttacaataaaagatattaagaattgtta

SEQ ID NO: 2381 - protein, 410 aa, Homo sapiens
MEAENAGSYSLQQAQAFYTFPFQQLMAEAPNMAVVNEQQMPEEVPAPAPAQEPVQEAPKGRKRKPRTTEPKQPVEPKKPVESKKSGKSAKPKEKQEKITDTFKVKRKVDRFNGVSEAELLTKTLPDILTFNLDIVIIGINPGLMAAYKGHHYPGPGNHFWKCLFMSGLSEVQLNHMDDHTLPGKYGIGFTNMVERTTPGSKDLSSKEFREGGRILVQKLQKYQPRIAVFNGKCIYEIFSKEVFGVKVKNLEFGLQPHKIPDTETLCYVMPSSSARCAQFPRAQDKVHYYIKLKDLRDQLKGIERNMDVQEVQYTFDLQLAQEDAKKMAVKEEKYDPGYEAAYGGAYGENPCSSEPCGFSSNGLIESVELRGESAFSGIPNGQWMTQSFTDQIPSFSNHCGTQEQEEESHA

SEQ ID NO: 2382 - DNA, 2233 bp, Homo sapiens
tcccacgctcccattttaccgaggtggatctgaggcccagagtgggcaaagggcttgccaaggtcgcagagcgcgcagaggattagaaccctgattccgtccagcacctgcggagttggagacgcccacaggaaacgcccacctgaccgggtgagtgagggggcgggcgagccggaggggtggagtttattcgcgccccgctccgccaccagggcttgggggcggggccttcctgcaacctttgcggctccaacatggctccgcggctgtgcagcatctctgtgacggcgcggcggctgctggggggcccggggcctcgcgctggggacgttgcgtctgcagctgcggcgcgtttctattccaaggacaatgaaggcagctggttccgctccctctttgttcacaaagtggatccccggaaggatgcccactccaccctgctgtccaagaaggaaaccagcaacctctataagatccagtttcacaatgtaaagcctgaatacctggatgcctacaacagcctcacggaggctgtgctgcccaagcttcacctggatgaggactacccatgctcactcgtgggcaactggaacacgtggtatggggagcaggaccaggcagtgcacctgtggcgattctcaggtggctacccagccctcatggactgcatgaacaagctcaaaaacaataaggagtacctggagttccgaagggagcggacgcagatgctgctgtccaggagaaaccagctgctccttgagttcagcttctggaatgagccacagcccagaatgggtcccaacatctatgagctgaggacatacaagctcaagccaggaaccatgatcgagtgggggaacaactgggctcgggccatcaagtaccggcaggagaaccaggaggcagtgggcggcttcttctcacagataggagagctctacgtggtgcaccatctctgggcctataaagacctgcagtctcgggaggagactcgaaacgctgcctggaggaagagaggctgggatgaaaatgtctactatacagtccccctggtgcgacacatggagtctaggatcatgatccccttgaagatctcgcctctgcagtgatgctgcctacacctccacctccttccccttctccctcaggcaaccccgacagacagtggcactcctggtcctgctgtcttggttttgtcttggctctgggaggactctgaggggcagtgctcagttcagacaagggggaactgaaggctgacaagttctgaggattacagctctgcccaggccctttctactttccctgcctgcctccctccccctgctagaagtagtttctgatttccctgaatgaaagatagtgatcttttaggccttcatatatcttctaaaattcctcatctcaaggccaccagtccccagttatcacccttggaaatcctctgtttagcttagttgcacaaaaggtagtatgtccagtggctagaggtggggtgggaagagaggaggccaggccaggccctcaggaattccctggtttccactgggccacccacttgctggacagtctgagccaagtccctcctgctggagaaaagcctggaactgccaaaacaaaaaaacaaatacaaacaaacctcgtcaccacggtcaggaggaggttcagacattctgcccagaggggctggggaaagggatgggagccaggaaagatttaggggcaggagacagacacgtaacaggaactcggaaggtagaacttagaattcagaacttgggtttcaattgtagaatttggaatctggaatacagaattgggaagaagaacagagatgacaaaagaccacttgaagagaggttcctaatactagacagatggagagtggcttggctgtttccccctgcatattggggttgaaaacttaaatgtgtagttccagtccttctatgcagagtctctcctgccctccctccttcctgcaggcaaatatacaagctagaccctgttccctcaccctgtatcctgtctcccctaattgacattctatcagcccaaccctcattctgcagggccacctggtgtgtggaggtggcgggaggggtcagtgactctgggggtctcctcagtgacccccatacctcatcatgaacccttgggtagcttgattctgcctaccatccaggaaaacttgtgctggaattgctgatggaaacaattaaatatttactat

SEQ ID NO: 2383 - protein, 284 aa, Homo sapiens
MAPRLCSISVTARRLLGGPGPRAGDVASAAAARFYSKDNEGSWFRSLFVHKVDPRKDAHSTLLSKKETSNLYKIQFHNVKPEYLDAYNSLTEAVLPKLHLDEDYPCSLVGNWNTWYGEQDQAVHLWRFSGGYPALMDCMNKLKNNKEYLEFRRERTQMLLSRRNQLLLEFSFWNEPQPRMGPNIYELRTYKLKPGTMIEWGNNWARAIKYRQENQEAVGGFFSQIGELYVVHHLWAYKDLQSREETRNAAWRKRGWDENVYYTVPLVRHMESRIMIPLKISPLQ

SEQ ID NO: 2384 - DNA, 2291 bp, Homo sapiens
ggcacgaggcagcgctggccgcagtctgacaggaaagggacggagccaagatggcggcggccgacggcgacgactcgctgtaccccatcgcggtgctcatagacgaactccgcaatgaggacgttcagcttcgcctcaacagcatcaagaagctgtccaccatcgccttggcccttggggttgaaaggacccgaagtgagcttctgcctttccttacagataccatctatgatgaagatgaggtcctcctggccctggcagaacagctgggaaccttcactaccctggtgggaggcccagagtacgtgcactgcctgctgccaccgctggagtcgctggccacagtggaggagacagtggtgcgggacaaggcagtggagtccttacgggccatctcacacgagcactcgccctctgacctggaggcgcactttgtgccgctagtgaagcggctggcgggcggcgactggttcacctcccgcacctcggcctgcggcctcttctccgtctgctacccccgagtgtccagtgctgtgaaggcggaacttcgacagtacttccggaacctgtgctcagatgacacccccatggtgcggcgggccgcagcctccaagctgggggagtttgccaaggtgctggagctggacaacgtcaagagtgagatcatccccatgttctccaacctggcctctgacgagcaggactcggtgcggctgctggcggtggaggcgtgcgtgaacatcgcccagcttctgccccaggaggatctggaggccctggtgatgcccactctgcgccaggccgctgaagacaagtcctggcgcgtccgctacatggtggctgacaagttcacagagctccagaaagcagtggggcctgagatcaccaagacagacctggtccctgccttccagaacctgatgaaagactgtgaggccgaggtgagggccgcagcctcccacaaggtcaaagagttctgtgaaaacctctcagctgactgtcgggagaatgtgatcatgtcccagatcttgccctgcatcaaggagctggtgtccgatgccaaccaacatgtcaagtctgccctggcctcagtcatcatgggtctctctcccatcttgggcaaagacaacaccatcgagcacctcttgcccctcttcctggctcagctgaaggatgagtgccctgaggtacggctgaacatcatctctaacctggactgtgtgaacgaggtgattggcatccggcagctgtcccagtccctgctccctgccattgtggagctggctgaggacgccaagtggcgggtgcggctggccatcattgagtacatgcccctcctggctggacagctgggagtggagttctttgatgagaaacttaactccttgtgcatggcctggcttgtggatcatgtatatgccatccgcgaggcagccaccagcaacctgaagaagctagtggaaaagtttgggaaggagtgggcccatgccacaatcatccccaaggtcttggccatgtccggagaccccaactacctgcaccgcatgactacgctcttctgcatcaatgtgctgtctgaggtctgtgggcaggacatcaccaccaagcacatgctacccacggttctgcgcatggctggggacccggttgccaatgtccgcttcaatgtggccaagtctctgcagaagatagggcccatcctggacaacagcaccttgcagagtgaagtcaagcccatcctagagaagctgacccaggaccaggatgtggacgtcaaatactttgcccaggaggctctgactgttctgtctctcgcctgatgctggaagaggagcaaacactggcctctggtgtccaccctccaacccccacaagtccctctttggggagacactggggggcctttggctgtcactccctgtgcatggtctgaccccaggccccttcccccagcacggttcctcctctccccagcctgggaagatgtctcactgtccacctcccaacgggctaggggagcacggggttggacaggacagtgaccttgggaggaaggggctactccgcccacgtcagggagagatgtgagcatcccgggtcactggatcctgctgctgtaatgggaacccctcccccatttacttctccacctcccgtcctccccatcattggtttttttttgtgtgtcaactgtgccgtttttattttattccttttattttcccccttttcacagagaaataaaggtctagaagtaaaaaaaaaaaaaaaaaaaaaaaaaaaaaaaaaaa

SEQ ID NO: 2385 - protein, 589 aa, Homo sapiens
MAAADGDDSLYPIAVLIDELRNEDVQLRLNSIKKLSTIALALGVERTRSELLPFLTDTIYDEDEVLLALAEQLGTFTTLVGGPEYVHCLLPPLESLATVEETVVRDKAVESLRAISHEHSPSDLEAHFVPLVKRLAGGDWFTSRTSACGLFSVCYPRVSSAVKAELRQYFRNLCSDDTPMVRRAAASKLGEFAKVLELDNVKSEIIPMFSNLASDEQDSVRLLAVEACVNIAQLLPQEDLEALVMPTLRQAAEDKSWAVRYMVADKFTELQKAVGPEITKTDLVPAFQNLMKDCEAEVRAAASHKVKEFCENLSADCRENVIMSQILPCIKELVSDANQHVKSALASVIMGLSPILGKDNTIEHLLPLFLAQLKDECPEVRLNIISNLDCVNEVIGIRQLSQSLLPAIVELAEDAKWRVRLAIIEYMPLLAGQLGVEFFDEKLNSLCMAWLVDHVYAIREAATSNLKKLVEKFGKEWAHATIIPKVLAMSGDPNYLHRMTTLFCINVLSEVCGQDITTKHMLPTVLRMAGDPVANVRFNVAKSLQKIGPILDNSTLQSEVKPILEKLTQDQDVDVKYFAQEALTVLSLA

SEQ ID NO: 2386 - DNA, 541 bp, Homo sapiens
  misc_feature (10)..(11): n is a, c, g, or t
  misc_feature (60)..(60): n is a, c, g, or t
  misc_feature (94)..(94): n is a, c, g, or t
  misc_feature (148)..(148): n is a, c, g, or t
  misc_feature (157)..(157): n is a, c, g, or t
  misc_feature (194)..(194): n is a, c, g, or t
  misc_feature (196)..(196): n is a, c, g, or t
  misc_feature (206)..(206): n is a, c, g, or t
  misc_feature (214)..(214): n is a, c, g, or t
  misc_feature (228)..(228): n is a, c, g, or t
  misc_feature (232)..(232): n is a, c, g, or t
  misc_feature (311)..(311): n is a, c, g, or t
  misc_feature (313)..(313): n is a, c, g, or t
  misc_feature (371)..(371): n is a, c, g, or t
  misc_feature (487)..(487): n is a, c, g, or t
  misc_feature (500)..(500): n is a, c, g, or t
  misc_feature (531)..(531): n is a, c, g, or t
tttttttttnnacttttccaatgagtttttattagcaggtaagtaatgatttaggatccnggggtggggatcactgggtaccagggcccccttnaccatcctgggagaaggatggaggacagaggaaagggagatgcagccagttcanatcttcccnggaaacgtgccttcagcccgttgctcatcccagtctntnacccaggatntggggcanagggactggtacanacgntggtaccattcgcacacagagatatcgcctcctttagcggtcattgccttctgacagcggtggaagtccagggtagttntnccagcagtttctagtctggttctggttggggaagcggctttcaaaaggggcggtcttntagttcttgattttggtctccatgtcttccgccatggtgctgaatcctaaaggcaccccggattcaacctgcagctcaattttgaccctcagcaaagacaccacagtcggctcgtnttcgaatttcctncagccccggggatcccctagtttttaggagncggcccccac

SEQ ID NO: 2387 - DNA, 658 bp, Homo sapiens
gccggacggacgctcgtcttcgcccgccatggccgagagcgactgggacacggtgacggtgctgcgcaagaagggccctacggccgcccaggccaaatccaagcaggctatcttagcggcacagagacgaggagaagatgtggagacttccaagaaatgggctgctggccagaacaaacaacattctattaccaagaacacggccaagctggaccgggagacagaggagctgcaccatgacagggtgaccctggaggtgggcaaggtgatccagcaaggtcggcagagcaaggggcttacgcagaaggacctggccacgaaaatcaatgagaagccacaggtgatcgcggactatgagagcggacgggccatacccaataaccaggtgcttggcaaaatcgagcgggccattggcctcaagctccggggaaaggacattggaaagcccatcgagaaggggcctagggcgaaatgaacacaaagcctcgaaatcagtgcgctccagctgatctcgttccgccggttccccttggccgccagttccgttctcctcacgggccgaacggaacaaggggtccagcttgcgggggaccctccccagcccattcctgctgtcaaacaaacaaaaccttgcaaagcgaaaaaaaaaaaaaaaaaa

SEQ ID NO: 2388 - protein, 148 aa, Homo sapiens
MAESDWDTVTVLRKKGPTAAQAKSKQAILAAQRRGEDVETSKKWAAGQNKQHSITKNTAKLDRETEELHHDRVTLEVGKVIQQGRQSKGLTQKDLATKINEKPQVIADYESGRAIPNNQVLGKIERAIGLKLRGKDIGKPIEKGPRAK

SEQ ID NO: 2389 - DNA, 538 bp, Homo sapiens
gccggacggacgctcgtcttcgcccgccatggccgagagcgactgggacacggtgacggtgctgcgcaagaagggccctacggccgcccaggccaaatccaagcaggctatcttagcggcacagagacgaggagaagatgtggagacttccaagaaatgggctgctggccagaacaaacaacattctattaccaagaacacggccaagctggaccgggagacagaggagctgcaccatgacagggtgaccctggaggtgggcaaggtgatccagcaaggtcggcagagcaaggggcttacgcagaaggacctggccacgaaaatcaatgagaagccacaggtgatcgcggactatgagagcggacgggccatacccaataaccaggtgcttggcaaaatcgagcgggccattggtgagtgtccctccacccttcgccgggtccgctgaacagggaggctacccgctcccagctggggttggtgagagtgggactcgggggaagaagatggccctgggggtcccctgttctctgaattc

SEQ ID NO: 2390 - protein, 139 aa, Homo sapiens
MAESDWDTVTVLRKKGPTAAQAKSKQAILAAQRRGEDVETSKKWAAGQNKQHSITKNTAKLDRETEELHHDRVTLEVGKVIQQGRQSKGLTQKDLATKINEKPQVIADYESGRAIPNNQVLGKIERAIGECPSTLRRVR

SEQ ID NO: 2391 - DNA, 1521 bp, Homo sapiens
ggatccacgtcccacgggccggacccgcggccgcgttcggaaatcagcctgagcctgagtaccgctaaggctttaatcacgggtcccgagagccctaagtcttctctttgcttgctgatctcgtaccttaatgtgcaaaagaatcacgttgggaactgaaaattcagaatcctgggcctcactcccagaggatctgatctacatgtgtggagatgcccaggaatctgctttattctcttttgtcctcccacctgtccccccatttcagcacctcggtaacctctgccaaagtggctgtgaatggcgttcagctgcattaccagcagactggagagggagatcacgcagtcctgctacttcctgggatgttaggaagtggagagactgattttggacctcagctcaagaacctcaataagaagctcttcacggtggtcgcctgggatcctcgaggctatggacattccaggcccccagatcgcgatttcccagcagacttttttgaaagggatgcaaaagatgctgttgatttgatgaaggcgctgaagtttaagaaggtttctctgctggggtggagtgatgggggcataaccgcactcattgctgctgcaaaatatccatcttacatccacaagatggtgatctggggcgccaacgcctacgtcactgacgaagacagcatgatatatgagggcatccgagatgtttccaaatggagtgagagaacaagaaagcctctagaagccctctatgggtatgactactttgccagaacctgtgaaaagtgggtggatggcataagacagtttaaacatctcccagatggtaacatctgccggcacctgctgccccgggtccagtgccccgccttgattgtgcacggtgagaaggatcctctggtcccacggtttcatgccgacttcattcataagcacgtgaaaggctcacggctgcatttgatgccagaaggcaaacacaacctgcatttgcgttttgcagatgaattcaacaagttagcagaagacttcctacaatgagaatgcacactccagtcttggtggttccttcgtgtggggcttgatcgtgttgctgcctgttaacatgatgcctttgaaactctccgcctttgaaactttctacccctcccttcaatcttatcctaaccaaatgagaataatgacatattgaaaacagcctctagcttcaggctgggcacggtggctcacagctataatctcagcactttgggaggctgaggtgggagaattgcctgagcccaggagttcaagaccagcttgtgcaatatagggagactccggctctacaaaaaagagtttttcaaaattagccaggcgaagtggcacacatctgtggtcccaggtgctcaggaagctgaggtgggaggatcacttgagcccaattcaaagctgcagtgagctgtaattgcatcactgcactccaacctgggcaacagagtaagaccttgtcttaaaaaaaaataaaaacataaaaaaaaaaaaa

SEQ ID NO: 2392 - protein, 274 aa, Homo sapiens
MPRNLLYSLLSSHLSPHFSTSVTSAKVAVNGVQLHYQQTGEGDHAVLLLPGMLGSGETDFGPQLKNLNKKLFTVVAWDPRGYGHSRPPDRDFPADFFERDAKDAVDLMKALKFKKVSLLGWSDGGITALIAAAKYPSYIHKMVIWGANAYVTDEDSMIYEGIRDVSKWSERTRKPLEALYGYDYFARTCEKWVDGIRQFKHLPDGNICRHLLPRVQCPALIVHGEKDPLVPRFHADFIHKHVKGSRLHLMPEGKHNLHLRFADEFNKLAEDFLQ

SEQ ID NO: 2393 - DNA, 545 bp, Homo sapiens
gctcactgctcactgtctatccccacgaaatttagttttatcagtagtcttaaagtgttgatctcaaacaagtacattagaaaaatcatgtttcttctctctcatcttacttttctcttctcagatttctcccttcctagaacattctctctgtttagcactaatgttcacctcgtattttttggaagtgcaaaaatctcaatttgtgtctgtttacagctctctctcctcactgctcacagcaaggggttctgtatcagtggatttcattttgtagctgctgagatgttaaggcaagcctcagcatctgcccccgctgggtgcacaatgctgcttcctcgaagagaagacacagagtccaagtggcaggacttgaggttggcttccactctgccttagaagttaattttccaaagtacattacaaatctctgaggccattaggggaaaaggaaggggtgtggtttgtctttgaaattacggttaatacttttagacagtaagtccggctggttgcagggctatttgcccgacagcatcagcctg

SEQ ID NO: 2394 - DNA, 555 bp, Homo sapiens
ttctgttttttctggtggcagggggtggcgttttaaacttgggggcttggaggggctgaggtcaaagggcagcgggtctttcactggctagaaagggaatagaaaggctgaaggaaaaccatatctggataaagtttaagttcactgagcatgacctaagactactgggagaaagttaatttccagcactcattttaccaaacctatgtaaccctgatcagggatccctgagttagctccagagctggaacagacagggcaaagggactgagcctccaaccctgagcagtggccaggcactcgacatgacaagctggaagagcctgaagaacgagctctcagaggagaaagaagggaaagagcctccacgactcctccagacgctcagtccagggccgccaaggtcagccaccctccccgctgtctctatctgtggccctgccaccagtcactcaacccgactttttggtctagagtaagagcagcagctgtaccccaatggcacagcaaagcaaatccccctacaggcaccatgcaaggccagcacaggcagct

SEQ ID NO: 2395 - DNA, 2887 bp, Homo sapiens
agatatctccggcgccgcccgccattttgactccagtgtctcgtttgcagtcggcgctttaggggaactgtcttcctccgcaggcgcgaggctgggtacagggtctattgtctgtggttgactccgtactttggtctgaggccttcgggagctttcccgaggcagttagcagaagccgcagcggccgcccccgcccgtctcctctgtccctgggcccgggagggaccaacttggcgtcacgcccctcagcggtcgccactctcttctctgttgttgggtccgcatcgtattcccggaatcagacggtgccccatagatggccagctttcccccgagggtcaacgagaaagagatcgtgagattacgtactataggtgaacttttagctcctgcagctccttttgacaagaaatgtggtcgtgaaaattggactgttgcttttgctccagatggttcatactttgcttggtcacaaggacatcgcacagtaaagcttgttccgtggtcccagtgccttcagaactttctcttgcatggcaccaagaatgttaccaattcaagcagtttaagattgccaagacaaaatagtgatggtggtcagaaaaataagcctcgtgaacatattatagactgtggagatatagtctggagtcttgcttttgggtcatcagttccagaaaaacagagtcgctgtgtaaatatagaatggcatcgcttcagatttggacaagatcagctacttcttgctacagggttgaacaatgggcgtatcaaaatatgggatgtatatacaggaaaactcctccttaacttggtagatcatactgaagtggtcagagatttaacttttgctccagatggaagcttgatcctggtgtcagcttcaagagacaaaactctcagagtatgggacctgaaagatgatggaaacatgatgaaagtattgagggggcatcagaattgggtgtacagctgtgcattctctcctgactcttctatgctgtgttcagtcggagccagtaaagcagttttcctttggaatatggataaatacaccatgatacggaaactagaaggacatcaccatgatgtggtagcttgtgacttttctcctgatggagcattactggctactgcatcttatgatactcgagtatatatctgggatccacataatggagacattctgatggaatttgggcacctgtttcccccacctactccaatatttgctggaggagcaaatgaccggtgggtacgatctgtatcttttagccatgatggactgcatgttgcaagccttgctgatgataaaatggtgaggttctggagaattgatgaggattatccagtgcaagttgcacctttgagcaatggtctttgctgtgccttctctactgatggcagtgttttagctgctgggacacatgacggaagtgtgtatttttgggccactccacggcaggtccctagcctgcaacatttatgtcgcatgtcaatccgaagagtgatgcccacccaagaagttcaggagctgccgattccttccaagcttttggagtttctctcgtatcgtatttagaagattctgccttccctagtagtagggactgacagaatacacttaacacaaacctcaagctttactgacttcaattatctgtttttaaagacgtagaagatttatttaatttgatatgttcttgtactgcattttgatcagttgagcttttaaaatattatttatagacaatagaagtatttctgaacatatcaaatataaatttttttaaagatctaactgtgaaaacatacatacctgtacatatttagatataagctgctatatgttgaatggacccttttgcttttctgatttttagttctgacatgtatatattgcttcagtagagccacaatatgtatctttgctgtaaagtgcaaggaaattttaaattctgggacactgagttagatggtaaatactgacttacgaaagttgaattgggtgaggcgggcaaatcacctgaggtcagcagtttgagactagcctggcaaacatgatgaaaccctgtctctactaaaaatacaaaaaaaaaaaaaattagccaggcgtggtggtgcacacctgtagtcctagctacttgggaggctgaggcaggagaattgcttgaacccaggaggtggaggttgcagtaagccaagatcacaccactgcactccaacctggacaacagagcgagactccatctcaaaaaaaaaaaaaaattgtgttgcctcatacgaaatgtatttggttttgttggagagtgtcagactgatctggaagtgaaacacagtttatgtacagggaaaaggattttattatccttaggaatgtcatccaagacgtagagcttgaatgtgacgttatttaaaaacaacaacaaagaaggcagagccaggatataactagaaaaaggatgtctttttttttttttttactccccctctaaacactgctgctgccttaattttagaaagcagcttactagtttacccttgtggtataaagtattataaattgttgtgaatttgaagaatccgtctactgtattattgctaaatattttgtttatactaagggacaattattttaagaccatggatttaaaaaaaaaaaaaaaaactctgtttctgcaggggatgatattggtgagttgccaaagaagcaatacagcatatctgcttttgccttctgttgtttatcttacctgcagatattaagaatgtatgcattatgtaaaatgctcaattatatatttttgttgagttttttaattaaagacttgtaaaaaaaaaaaaaaaaaaaaaaaaaaaaaaaaaaaaaaaaaaaaaaaaaaaaaaa

SEQ ID NO: 2396 - protein, 421 aa, Homo sapiens
MASFPPRVNEKEIVRLRTIGELLAPAAPFDKKCGRENWTVAFAPDGSYFAWSQGHRTVKLVPWSQCLQNFLLHGTKNVTNSSSLRLPRQNSDGGQKNKPREHIIDCGDIVWSLAFGSSVPEKQSRCVNIEWHRFRFGQDQLLLATGLNNGRIKIWDVYTGKLLLNLVDHTEVVRDLTFAPDGSLILVSASRDKTLRVWDLKDDGNMMKVLRGHQNWVYSCAFSPDSSMLCSVGASKAVFLWNMDKYTMIRKLEGHHHDVVACDFSPDGALLATASYDTRVYIWDPHNGDILMEFGHLFPPPTPIFAGGANDRWVRSVSFSHDGLHVASLADDKMVRFWRIDEDYPVQVAPLSNGLCCAFSTDGSVLAAGTHDGSVYFWATPRQVPSLQHLCRMSIRRVMPTQEVQELPIPSKLLEFLSYRI

SEQ ID NO: 2397 - DNA, 4243 bp, Homo sapiens
agatatctccggcgccgcccgccattttgactccagtgtctcgtttgcagtcggcgctttaggggaactgtcttcctccgcaggcgcgaggctgggtacagggtctattgtctgtggttgactccgtactttggtctgaggccttcgggagctttcccgaggcagttagcagaagccgcagcggccgcccccgcccgtctcctctgtccctgggcccgggagggaccaacttggcgtcacgcccctcagcggtcgccactctcttctctgttgttgggtccgcatcgtattcccggaatcagacggtgccccatagatggccagctttcccccgagggtcaacgagaaagagatcgtgagattacgtactataggtgaacttttagctcctgcagctccttttgacaagaaatgtggtcgtgaaaattggactgttgcttttgctccagatggttcatactttgcttggtcacaaggacatcgcacagtaaagcttgttccgtggtcccagtgccttcagaactttctcttgcatggcaccaagaatgttaccaattcaagcagtttaagattgccaagacaaaatagtgatggtggtcagaaaaataagcctcgtgaacatattatagactgtggagatatagtctggagtcttgcttttgggtcatcagttccagaaaaacagagtcgctgtgtaaatatagaatggcatcgcttcagatttggacaagatcagctacttcttgctacagggttgaacaatgggcgtatcaaaatatgggatgtatatacaggaaaactcctccttaacttggtagatcatactgaagtggtcagagatttaacttttgctccagatggaagcttgatcctggtgtcagcttcaagagacaaaactctcagagtatgggacctgaaagatgatggaaacatgatgaaagtattgagggggcatcagaattgggtgtacagctgtgcattctctcctgactcttctatgctgtgttcagtcggagccagtaaagcagtggtggcagcaatattggtgtgattgaggttatgctggcaccactcgcacacaggcgcacaatggtgttagctgggcagaaagagtggcatctctggctaccgggctgggggcgacctttaccataggatgaagtaaccttgcattcggctgcaaggtgtactgtacgtacacaggtgctggtcgatgtccactttctgcttttctttctttctttttttcttttttaaagtaatttcccccacagtaaaatacactgactcctgagtaaattgattttccagttttatggaattgggagtctgacaagtgaaaccaatttaatgtaaagtatttggctttcaaatggtttctctgtgctattttttggaattctttcagattccagagatatcttacgtctttgattcaatttaaaatttgtacttattttcttttagaaataatgtattgtgtctgtgcagaaaaaaaaaaaaccaaaaaggattgctttactccaagaggagagattgtcttaggataaacctccaagctcacatttaatataacagactgaagtaaacattagaatcctgtttagagctattctgcacagttaactactgatctttagaatctaaaattgtatatgaacttattcttaaataattgaaccgttttatattcaaatgacttatgatcgtggttagtttgggaaaaataagatggttaaattttgatttattgaaatgtaattgtattattttcataaaatagcattttcattttgtaatgtggtttaacatccttgttgtttgccaaagaaatttcatttggctgtgaatattctatttgcttgcagtatctgtttctcttcctaggctcaagttggtgacccaagcctattgtaaacaagtgattatctcaaagggagatgccaatggagtaacaatttgttaaccttacgttttctgtctgtatatttttttaaaaatctggtagtttctggaaaaaaaagagaagggggtttgtagtacttaaccctatttatttccgtatattttagttaattagtttttggaataaatggatttcagtatagctttgtggttaaattgcattgcctttattttatgtttaggcttatttttaaattaacatttaacagaaacatttgaaatagaatttgcatgtctgccttaattaacttaaagactgattttaatctgactatgacactgagcatattctttaaattactcataatttataatgcttaatataatcttaattaaatttagcagttttagtataagatgtgccattttgtcctctgtatgtctgaatgaagctataacatttgcctttttattgcaggttttcctttggaatatggataaatacaccatgatacggaaactagaaggacatcaccatgatgtggtagcttgtgacttttctcctgatggagcattactggctactgcatcttatgatactcgagtatatatctgggatccacataatggagacattctgatggaatttgggcacctgtttcccccacctactccaatatttgctggaggagcaaatgaccggtgggtacgatctgtatcttttagccatgatggactgcatgttgcaagccttgctgatgataaaatggtgaggttctggagaattgatgaggattatccagtgcaagttgcacctttgagcaatggtctttgctgtgccttctctactgatggcagtgttttagctgctgggacacatgacggaagtgtgtatttttgggccactccacggcaggtccctagcctgcaacatttatgtcgcatgtcaatccgaagagtgatgcccacccaagaagttcaggagctgccgattccttccaagcttttggagtttctctcgtatcgtatttagaagattctgccttccctagtagtagggactgacagaatacacttaacacaaacctcaagctttactgacttcaattatctgtttttaaagacgtagaagatttatttaatttgatatgttcttgtactgcattttgatcagttgagcttttaaaatattatttatagacaatagaagtatttctgaacatatcaaatataaatttttttaaagatctaactgtgaaaacatacatacctgtacatatttagatataagctgctatatgttgaatggacccttttgcttttctgatttttagttctgacatgtatatattgcttcagtagagccacaatatgtatctttgctgtaaagtgcaaggaaattttaaattctgggacactgagttagatggtaaatactgacttacgaaagttgaattgggtgaggcgggcaaatcacctgaggtcagcagtttgagactagcctggcaaacatgatgaaaccctgtctctactaaaaatacaaaaaaaaaaaaaattagccaggcgtggtggtgcacacctgtagtcctagctacttgggaggctgaggcaggagaattgcttgaacccaggaggtggaggttgcagtaagccaagatcacaccactgcactccaacctggacaacagagcgagactccatctcaaaaaaaaaaaaaaattgtgttgcctcatacgaaatgtatttggttttgttggagagtgtcagactgatctggaagtgaaacacagtttatgtacagggaaaaggattttattatccttaggaatgtcatccaagacgtagagcttgaatgtgacgttatttaaaaacaacaacaaagaaggcagagccaggatataactagaaaaaggatgtctttttttttttttttactccccctctaaacactgctgctgccttaattttagaaagcagcttactagtttacccttgtggtataaagtattataaattgttgtgaatttgaagaatccgtctactgtattattgctaaatattttgtttatactaagggacaattattttaagaccatggatttaaaaaaaaaaaaaaaaactctgtttctgcaggggatgatattggtgagttgccaaagaagcaatacagcatatctgcttttgccttctgttgtttatcttacctgcagatattaagaatgtatgcattatgtaaaatgctcaattatatatttttgttgagttttttaattaaagacttgtaaaaaaaaaaaaaaaaaaaaaaaaaaaaaaaaaaaaaaaaaaaaaaaaaaaaaaa

SEQ ID NO: 2398 - protein, 244 aa, Homo sapiens
MASFPPRVNEKEIVRLRTIGELLAPAAPFDKKCGRENWTVAFAPDGSYFAWSQGHRTVKLVPWSQCLQNFLLHGTKNVTNSSSLRLPRQNSDGGQKNKPREHIIDCGDIVWSLAFGSSVPEKQSRCVNIEWHRFRFGQDQLLLATGLNNGRIKIWDVYTGKLLLNLVDHTEVVRDLTFAPDGSLILVSASRDKTLRVWDLKDDGNMMKVLRGHQNWVYSCAFSPDSSMLCSVGASKAVVAAILV

SEQ ID NO: 2399 - DNA, 2447 bp, Homo sapiens
agatatctccggcgccgcccgccattttgactccagtgtctcgtttgcagtcggcgctttaggggaactgtcttcctccgcaggcgcgaggctgggtacagggtctattgtctgtggttgactccgtactttggtctgaggccttcgggagctttcccgaggcagttagcagaagccgcagcggccgcccccgcccgtctcctctgtccctgggcccgggagggaccaacttggcgtcacgcccctcagcggtcgccactctcttctctgttgttgggtccgcatcgtattcccggaatcagacggtgccccatagatggccagctttcccccgagggtcaacgagaaagagatcggaaaactcctccttaacttggtagatcatactgaagtggtcagagatttaacttttgctccagatggaagcttgatcctggtgtcagcttcaagagacaaaactctcagagtatgggacctgaaagatgatggaaacatgatgaaagtattgagggggcatcagaattgggtgtacagctgtgcattctctcctgactcttctatgctgtgttcagtcggagccagtaaagcagttttcctttggaatatggataaatacaccatgatacggaaactagaaggacatcaccatgatgtggtagcttgtgacttttctcctgatggagcattactggctactgcatcttatgatactcgagtatatatctgggatccacataatggagacattctgatggaatttgggcacctgtttcccccacctactccaatatttgctggaggagcaaatgaccggtgggtacgatctgtatcttttagccatgatggactgcatgttgcaagccttgctgatgataaaatggtgaggttctggagaattgatgaggattatccagtgcaagttgcacctttgagcaatggtctttgctgtgccttctctactgatggcagtgttttagctgctgggacacatgacggaagtgtgtatttttgggccactccacggcaggtccctagcctgcaacatttatgtcgcatgtcaatccgaagagtgatgcccacccaagaagttcaggagctgccgattccttccaagcttttggagtttctctcgtatcgtatttagaagattctgccttccctagtagtagggactgacagaatacacttaacacaaacctcaagctttactgacttcaattatctgtttttaaagacgtagaagatttatttaatttgatatgttcttgtactgcattttgatcagttgagcttttaaaatattatttatagacaatagaagtatttctgaacatatcaaatataaatttttttaaagatctaactgtgaaaacatacatacctgtacatatttagatataagctgctatatgttgaatggacccttttgcttttctgatttttagttctgacatgtatatattgcttcagtagagccacaatatgtatctttgctgtaaagtgcaaggaaattttaaattctgggacactgagttagatggtaaatactgacttacgaaagttgaattgggtgaggcgggcaaatcacctgaggtcagcagtttgagactagcctggcaaacatgatgaaaccctgtctctactaaaaatacaaaaaaaaaaaattagccaggcgtggtggtgcacacctgtagtcctagctacttgggaggctgaggcaggagaattgcttgaacccaggaggtggaggttgcagtaagccaagatcacaccactgcactccaacctggacaacagagcgagactccatctcaaaaaaaaaaaaaaattgtgttgcctcatacgaaatgtatttggttttgttggagagtgtcagactgatctggaagtgaaacacagtttatgtacagggaaaaggattttattatccttaggaatgtcatccaagacgtagagcttgaatgtgacgttatttaaaaacaacaacaaagaaggcagagccaggatataactagaaaaaggatgtctttttttttttttttactccccctctaaacactgctgctgccttaattttagaaagcagcttactagtttacccttgtggtataaagtattataaattgttgtgaatttgaagaatccgtctactgtattattgctaaatattttgtttatactaagggacaattattttaagaccatggatttaaaaaaaaaaaaaaaaactctgtttctgcaggggatgatattggtgagttgccaaagaagcaatacagcatatctgcttttgccttctgttgtttatcttacctgcagatattaagaatgtatgcattatgtaaaatgctcaattatatatttttgttgagttttttaattaaagacttgtaaaaaaaaaaaaaaaaaaaaaaaaaaaaaaaaaaaaaaaaaaaaaaaaaaaaaaa

SEQ ID NO: 2400 - protein, 275 aa, Homo sapiens
MASFPPRVNEKEIGKLLLNLVDHTEVVRDLTFAPDGSLILVSASRDKTLRVWDLKDDGNMMKVLRGHQNWVYSCAFSPDSSMLCSVGASKAVFLWNMDKYTMIRKLEGHHHDVVACDFSPDGALLATASYDTRVYIWDPHNGDILMEFGHLFPPPTPIFAGGANDRWVRSVSFSHDGLHVASLADDKMVRFWRIDEDYPVQVAPLSNGLCCAFSTDGSVLAAGTHDGSVYFWATPRQVPSLQHLCRMSIRRVMPTQEVQELPIPSKLLEFLSYRI

SEQ ID NO: 2401 - DNA, 2051 bp, Homo sapiens
tcatttcatgttatgttttcatttcccctctgtctgagagattgctctgatgtctttccttccataagtcctacggagatcgagcttacctcatttttctcccaggcctaggagctcaattaccaggatcactttcttccccagggtgtactacagacctccacatgttggacagtaggattcagcagagaatgagtcccacatcctcttttcatccataagccactcttcccaactactcttccgccttccattgtccctatgtctactttactgctcaatctggattttggggaacctcctcccaaaaaggcattagaaggaaatgccaagcaccgaaattttgtcaagaagcggaggctcttagaacggagaggctttctgagtaaaaagaaccaaccccctagcaaggcgcctaagttgcactctgaaccttcaaagaaaggggagactcctacggtcgatggcacttggaagaccccttccttcccaaaaaagaagacagctgcttccagcaatgggtcaggacagcccctggacaagaaagctgcagtgtcttggttgacccctgccccttcaaaaaaggctgattctgttgctgctaaagtagatttgctgggggagttccagagtgcccttccaaagatcaatagccacccaacccgctctcagaagaagagctcccagaagaaatcctctaaaaagaaccatcctcagaagaatgccccacagaactccacccaagctcattcagagaataaatgctccggagcatcccagaagttgccacggaagatggtggcaattgactgtgagatggtgggcacaggaccaaaggggcatgttagttccttggctcgatgtagcattgtcaactacaacggagatgtgctttatgacgagtacattcttcccccctgccacattgtggactaccgaaccaggtggagtggtatccggaagcagcacatggtgaatgccacacccttcaagattgctcgaggccagatcttgaagatactcacagggaagatagtggtggggcatgccatccacaacgacttcaaagcccttcagtactttcaccccaaatccctcacccgtgacacctcccatatcccccccctcaaccggaaggctgactgcccggagaatgccaccatgtctctgaagcatctcaccaagaagctgctaaaccgggatatccaggttgggaagagcggacattcctctgtggaagatgcccaggccaccatggagctatataagttggttgaagtcgagtgggaagagcacctagcccggaatccccctacagactagtggcaatggggacgctggtgatatgaggaggcagaggcagcacccaggagaaacagggcagtggaccaatggacagctccaccagctccacatctttggaagctagatttggggagagagaagctctaccccagacttaatacccattgaaatttcacctcaggtgttgtgtcctgtgtctggttaagtgtcccatggaaggggaaagccttcacgtcagaacccaaccctataccttttacttcttaaatggtgctaaccacaggtgtcccagggtgctctgtgccagttaagatttttaactttcaaggggcagggcatactgggaaatgtagtttcccaaactgccttatcacttgggtggacatatgtctccttttatgccttttggtcttgagtaattaacagcatcctcttccacgctcagaagtgttctggttggggccaggcatggtggctcacgcctgtagtcccaacacttagggaggccgaggcgggcggatcacctgagatcaggagttcaagaccagcctggccaacatggcgaattcccgttctctactaaaaatacaaaaaatgtgtggggtgtggtggcaggagcctgtaatcctagctactcaggaggctgaggcaggagaatcgcttgagcccaggaggcggagattgcagtgagccgagatcgtgtcactgcactccagcctgggtgacaagagtgagactccgtctcc

SEQ ID NO: 2402 - protein, 353 aa, Homo sapiens
MSTLLLNLDFGEPPPKKALEGNAKHRNFVKKRRLLERRGFLSKKNQPPSKAPKLHSEPSKKGETPTVDGTWKTPSFPKKKTAASSNGSGQPLDKKAAVSWLTPAPSKKADSVAAKVDLLGEFQSALPKINSHPTRSQKKSSQKKSSKKNHPQKNAPQNSTQAHSENKCSGASQKLPRKMVAIDCEMVGTGPKGHVSSLARCSIVNYNGDVLYDEYILPPCHIVDYRTRWSGIRKQHMVNATPFKIARGQILKILTGKIVVGHAIHNDFKALQYFHPKSLTRDTSHIPPLNRKADCPENATMSLKHLTKKLLNRDIQVGKSGHSSVEDAQATMELYKLVEVEWEEHLARNPPTD

SEQ ID NO: 2403 - DNA, 1233 bp, Homo sapiens
atggtccgtccgcgccgtgccccgtaccgctccggcgccgggggccccctcgggggtcgcggccgccctccgcggcccctcgtggtgcgcgccgtccgctcgcgctcctggcctgccagcccccgaggcccgcagcctccgcggatccgggcccgctcggcccctcccatggaaggtgctcgggtcttcggggcactgggtcccatcggtccctcctcacctgggctcaccctcgggggtctggccgtgagcgagcaccggctcagcaacaagctgctggcttggagcggcaagcgcagaccctactctgactccactgcaaagctgaagcggaccctgccctgccaagcctacgtgaaccaaggcgagaacctggagaccgaccagtggccgcagaagctgatcatgcagctgatccctcagcagctgctgaccaccctgggccccctgttccggaactcccagttggcacagttccacttcaccaacagagactgcgactcgctcaaggggctctgccgcatcatgggcaacggcttcgcgggctgcatgctgttcccccacatctccccctgtgaggtgcgcgtgctcatgctcctgtactcgtccaagaagaagatcttcatgggcctcatcccctacgaccagagcggcttcgtcagtgccatccggcaggtcatcaccacccgcaagcaggcagtgggacctggtggtgtcaactcaggcccagtccagatcgtcaacaacaagtttctggcatggagtggtgtcatggagtggcaggagcccaggcctgagcccaacagtcggtccaagaggtggctgccatcccacgtctacgtgaaccagggggagatcctgaggaccgagcagtggccaaggaagctgtacatgcagctcatcccgcagcagctgctgaccaccctagtgccgctgttccggaactcgcgcctggtccagttccacttcaccaaggacctggagacactgaagagcctgtgccggatcatggacaatggcttcgccggctgcgtgcacttttcctacaaagcatcgtgtgagatccgcgtgcttatgctcctgtactcttcagagaagaaaatcttcattggcctcatcccccatgaccagggcaactttgtcaacggcatccggcgtgtcattgccaaccagcagcaggtcctgcagcggaacctggagcaggagcaacagcaacgagggatgggggggtag

SEQ ID NO: 2404 - protein, 410 aa, Homo sapiens
MVRPRRAPYRSGAGGPLGGRGRPPRPLVVRAVRSRSWPASPRGPQPPRIRARSAPPMEGARVFGALGPIGPSSPGLTLGGLAVSEHRLSNKLLAWSGKRRPYSDSTAKLKRTLPCQAYVNQGENLETDQWPQKLIMQLIPQQLLTTLGPLFRNSQLAQFHFTNRDCDSLKGLCRIMGNGFAGCMLFPHISPCEVRVLMLLYSSKKKIFMGLIPYDQSGFVSAIRQVITTRKQAVGPGGVNSGPVQIVNNKFLAWSGVMEWQEPRPEPNSRSKRWLPSHVYVNQGEILRTEQWPRKLYMQLIPQQLLTTLVPLFRNSRLVQFHFTKDLETLKSLCRIMDNGFAGCVHFSYKASCEIRVLMLLYSSEKKIFIGLIPHDQGNFVNGIRRVIANQQQVLQRNLEQEQQQRGMGG

SEQ ID NO: 2405 - DNA, 830 bp, Homo sapiens
  misc_feature (2)..(2): n is a, c, g, or t
  misc_feature (4)..(5): n is a, c, g, or t
  misc_feature (12)..(12): n is a, c, g, or t
  misc_feature (15)..(15): n is a, c, g, or t
  misc_feature (125)..(125): n is a, c, g, or t
  misc_feature (262)..(262): n is a, c, g, or t
  misc_feature (394)..(394): n is a, c, g, or t
  misc_feature (397)..(397): n is a, c, g, or t
  misc_feature (400)..(400): n is a, c, g, or t
  misc_feature (415)..(415): n is a, c, g, or t
  misc_feature (437)..(437): n is a, c, g, or t
  misc_feature (448)..(448): n is a, c, g, or t
  misc_feature (456)..(456): n is a, c, g, or t
  misc_feature (462)..(462): n is a, c, g, or t
  misc_feature (473)..(473): n is a, c, g, or t
  misc_feature (483)..(483): n is a, c, g, or t
  misc_feature (492)..(492): n is a, c, g, or t
  misc_feature (507)..(507): n is a, c, g, or t
  misc_feature (513)..(513): n is a, c, g, or t
  misc_feature (518)..(518): n is a, c, g, or t
  misc_feature (522)..(522): n is a, c, g, or t
  misc_feature (538)..(547): n is a, c, g, or t
  misc_feature (551)..(551): n is a, c, g, or t
  misc_feature (555)..(555): n is a, c, g, or t
  misc_feature (557)..(557): n is a, c, g, or t
  misc_feature (560)..(560): n is a, c, g, or t
  misc_feature (569)..(575): n is a, c, g, or t
  misc_feature (577)..(580): n is a, c, g, or t
  misc_feature (583)..(585): n is a, c, g, or t
  misc_feature (587)..(591): n is a, c, g, or t
  misc_feature (595)..(616): n is a, c, g, or t
  misc_feature (618)..(783): n is a, c, g, or t
  misc_feature (785)..(827): n is a, c, g, or t
cngnngggtttnctnctctgttggtgggtgaggatgcccctcgccgggctgaactggagatgtggttacagggtcatccagagtttgctgttgatccccgatttctagcgtttatggaggatcgnagaaaacagaagtggaaaagatgtaaaaaaaataataaggcagaattgaactgtttgggaatggaaccagtacagacagctaactctagaaatgggaaaaagggtcatcacactgaaacggtgttcaaccgggtttngccagggcctattgcaccagagagcagcaagaagcgggcccgtaggatgcgaccagacctttctaagatgatggccctcatgcagggtggaagcactgggtccctatctctgcatacacgtcccaacacagnagnagnggcctacagcttgtngtcatctttgggtcacaggagngccacttctgnatcttggncttttntgccaattggngatgggtggngaccatcancccccccattttagnttcaantgggnttancaggtggctgtcaaannnnnnnnnntttncccngnttncttgccaannnnnnntnnnnccnnntnnnnnccannnnnnnnnnnnnnnnnnnnnncnnnnnnnnnnnnnnnnnnnnnnnnnnnnnnnnnnnnnnnnnnnnnnnnnnnnnnnnnnnnnnnnnnnnnnnnnnnnnnnnnnnnnnnnnnnnnnnnnnnnnnnnnnnnnnnnnnnnnnnnnnnnnnnnnnnnnnnnnnnnnnnnnnnnnnnnnnnnnnnnnnnnnncnnnnnnnnnnnnnnnnnnnnnnnnnnnnnnnnnnnnnnnnnnnccc

SEQ ID NO: 2406 - DNA, 1125 bp, Homo sapiens
cccccatgtgacagtgacggggtccccgctccaggagacgctcgagtctgcgtcccggccctcagcactgtccactgtttcggtgccagcagagaccagcaggcccgggacagttggtgtttggccgtgccgctgtctaacttggtgtgcagagtgaattgccgctgccggagcggagagaggcggagcggccaggagagaggggatttctgtcagcgccggcctcgggagctcggagacatgaacggcttcacgcctgacgagatgagccgcggcggggatgcggccgccgcagtggccgcagtggtcgctgccgcggccgccgccgcctcggcggggaacgggaccggcgcgggcaccggggctgaggtgccgggcgcgggggcggtctcagcggctgggcccccgggggcggccgggccgggccccgggcaactgtgctgcctgcgggaggatggtgagcggtgcggccgggcggcaggcaacgccagcttcagcaagaggatccagaagagcatctcccagaagaaggtgaagatcgagctggataagagcgcaaggcatctttacatatgtgattatcataaaaacttaattcagagtgttcgaaacagaagaaagagaaaagggagtgatgatgatggaggtgattcacctgttcaagatattgataccccagaggttgatttataccaattacaagtaaatacacttaggagatacaaaagacacttcaagctaccaaccagaccaggacttaataaagcacaacttgttgagatagttggttgccactttaggtctattccagtgaatgaaaaagacaccttaacatatttcatctactcagtgaagaatgacaagaacaaatcagatctcaaggttgatagtggtgttcactaggagacgtggaattgagactaataacttggatgttaacactgtttactgttttttcacatgtagaaatgttctttgtgtattttttctacagaggattttctctgattttattttctttgtttctgactctaataattagttggaaactcatataaaatgagctttcctaaattaaatctattttaaataaaggttattactattaaaaaaaaaaaaaaaaaa

SEQ ID NO: 2407 - protein, 220 aa, Homo sapiens
MNGFTPDEMSRGGDAAAAVAAVVAAAAAAASAGNGTGAGTGAEVPGAGAVSAAGPPGAAGPGPGQLCCLREDGERCGRAAGNASFSKRIQKSISQKKVKIELDKSARHLYICDYHKNLIQSVRNRRKRKGSDDDGGDSPVQDIDTPEVDLYQLQVNTLRRYKRHFKLPTRPGLNKAQLVEIVGCHFRSIPVNEKDTLTYFIYSVKNDKNKSDLKVDSGVH

SEQ ID NO: 2408 - DNA, 3150 bp, Homo sapiens
ttcaacctggacgtggaaaagctcgcagtgtacagcggccccaagggcagctacttcggctacgccgtggacttccacatacccgacgcccgcacagcgagtgtcttggtgggggcgcccaaagccaacaccagccagcccgatatcgtggaagggggagccgtctattactgtccttggcccgcggaggggtctgcgcagtgcaggcagataccgtttgacaccaccaacaacagaaagatcagagttaatggaaccaaagaacctatcgagttcaaatccaatcagtggtttggagcaacagtgaaagctcacaaaggaaaagttgtggcctgtgctcctttatatcactggagaactcttaaaccgacaccagaaaaaggaccagttggcacctgctatgtagcaattcagaacttcagcgcttatgccgagttctctccttgcggaaacagcaatgctgatccggaaggccagggttactgccaagcaggatttagtctggatttttataagaatggagaccttattgtgggaggacctgggagtttctactggcaaggacaagtgatcactgccagtgttgcagatatcattgcaaattactcattcaaggatatcctcaggaaactggcaggagaaaagcagacggaagtggctccagcttcctatgatgacagttaccttggatactcagttgctgctggggagtttactggggattctcagcaagaattggttgctggaattccaagaggagcacagaattttggatatgtttccatcattaactcctacgatatgacgtttattcagaatttcacgggagaacagatggcatcttattttggatataccgttgtcgtatcagatgttaacagtgatggactggatgatgtcctggttggggcacctctctttatggaacgtgaatttgagagcaaccccagagaagtagggcaaatctacctgtatttgcaagtgagctctctcctcttcagagacccccagatcctcactggcaccgagacgtttgggagattcggtagtgctatggcacacttaggagacctgaaccaagatggctacaatgacattgccatcggagtgccttttgcaggcaaggatcaaagaggcaaagtgctcatttataatgggaacaaagatggcttaaacaccaagccttcccaagttctgcaaggagtgtgggcctcacatgctgtcccttccggatttggctttactttaagaggagattcagacatagacaagaatgattacccagatttgattgtgggtgcatttggaacaggaaaagtcgctgtttacagagcaagaccggttgtgactgtagatgcccagcttctgctgcacccaatgattatcaatcttgaaaataaaacttgccaggttccagactctatgacatctgctgcctgcttttctttaagagtatgtgcatctgtcacaggccagagcattgcaaacacaatagtcttgatggcagaggtgcaattagattccctgaaacagaaaggagctattaaacggacgctcttccttgataaccatcaggctcatcgcgtcttccctcttgtgataaaaaggcagaaatcccaccagtgccaggatttcatcgtttaccttcgagatgaaactgaattccgagataaattatctccaatcaacattagtttgaattacagtttggacgaatccacctttaaagaaggcctggaagtgaaaccaatattgaactactacagagaaaacattgttagtgaacaggctcacattctggtggactgtggagaagacaatctgtgtgttcctgacttgaagctgtcggctagaccagataagcatcaggtaatcattggagatgaaaatcaccttatgctcataataaatgcaagaaatgaaggggaaggagcatatgaagctgaactctttgtaatgataccagaagaggcagattatgttggaatcgaacgcaacaacaagggatttcgaccactgagctgtgagtacaagatggaaaatgtaaccaggatggtggtgtgtgaccttgggaaccctatggtgtctggaacaaattattccctgggcctccgatttgcagttccacgtcttgagaaaacaaacatgagcattaacttcgatctccaaatcagaagttccaacaaggacaatccagacagcaattttgtgagcctgcaaatcaacatcactgctgtagcgcaggtggaaataagaggagtgtcacaccctccgcagattgttctgcccattcataactgggaaccagaagaggagccccacaaagaggaggaggttggaccattggtggaacatatttatgagctgcacaatattggaccaagtaccatcagtgacaccatcctggaggtgggctggcctttctctgcccgggatgaatttcttctctatattttccatattcaaactctgggacctctgcagtgccaaccaaatcctaatatcaatccacaggatataaagcctgctgcctccccagaggacacccctgagctcagcgcctttttgcgaaactctactattcctcatcttgtcaggaagagggatgtacatgtggtcgaattccacagacagagccctgcaaaaatactgaattgtacaaatatcgagtgtttacaaatctcctgtgcagtgggacgactcgaaggaggagaaagcgcagtcctgaaagtcaggtcacgattatgggcccacaccttcctccagagaaaaaatgatccctatgctcttgcatccctggtgtcctttgaagttaagaagatgccttatacagatcagccagcaaaactcccagaaggaagcatagcaattaagacatcagttatttgggcaactccgaatgtttccttctcaatcccattatgggtaataatactagcaatacttcttggattgttggttctcgccattttaaccttagctttatggaagtgtggattctttgacagagccagacctcctcaggaggacatgaccgacagggaacagctgacaaatgacaagacccctgaggcatgacaagaaaaaaaaaagaagaccaaagacctgaaacactggtcctgttcaaagaaaaagaaagaacatgaggcc

SEQ ID NO: 2409 - protein, 1025 aa, Homo sapiens
FNLDVEKLAVYSGPKGSYFGYAVDFHIPDARTASVLVGAPKANTSQPDIVEGGAVYYCPWPAEGSAQCRQIPFDTTNNRKIRVNGTKEPIEFKSNQWFGATVKAHKGKVVACAPLYHWRTLKPTPEKGPVGTCYVAIQNFSAYAEFSPCGNSNADPEGQGYCQAGFSLDFYKNGDLIVGGPGSFYWQGQVITASVADIIANYSFKDILRKLAGEKQTEVAPASYDDSYLGYSVAAGEFTGDSQQELVAGIPRGAQNFGYVSIINSYDMTFIQNFTGEQMASYFGYTVVVSDVNSDGLDDVLVGAPLFMEREFESNPREVGQIYLYLQVSSLLFRDPQILTGTETFGRFGSAMAHLGDLNQDGYNDIAIGVPFAGKDQRGKVLIYNGNKDGLNTKPSQVLQGVWASHAVPSGFGFTLRGDSDIDKNDYPDLIVGAFGTGKVAVYRARPVVTVDAQLLLHPMIINLENKTCQVPDSMTSAACFSLRVCASVTGQSIANTIVLMAEVQLDSLKQKGAIKRTLFLDNHQAHRVFPLVIKRQKSHQCQDFIVYLRDETEFRDKLSPINISLNYSLDESTFKEGLEVKPILNYYRENIVSEQAHILVDCGEDNLCVPDLKLSARPDKHQVIIGDENHLMLIINARNEGEGAYEAELFVMIPEEADYVGIERNNKGFRPLSCEYKMENVTRMVVCDLGNPMVSGTNYSLGLRFAVPRLEKTNMSINFDLQIRSSNKDNPDSNFVSLQINITAVAQVEIRGVSHPPQIVLPIHNWEPEEEPHKEEEVGPLVEHIYELHNIGPSTISDTILEVGWPFSARDEFLLYIFHIQTLGPLQCQPNPNINPQDIKPAASPEDTPELSAFLRNSTIPHLVRKRDVHVVEFHRQSPAKILNCTNIECLQISCAVGRLEGGESAVLKVRSRLWAHTFLQRKNDPYALASLVSFEVKKMPYTDQPAKLPEGSIAIKTSVIWATPNVSFSIPLWVIILAILLGLLVLAILTLALWKCGFFDRARPPQEDMTDREQLTNDKTPEA

SEQ ID NO: 2410 - DNA, 1445 bp, Homo sapiens
attttgtggaatagagttgatcgctgtctcctccgcaaagcattttaactcgaataagcaaatgccgcctctgtttgaacgttttggtatttacaagagagaaatcattttacctaagagaactaattgaattggcagcatccttgaaatacctccggacaaggatctgggggtgggggtggaaaagcaactgcgaaatagcagacggagaaattcctttggaagttattccgtagcataagagctgaaacttcagagcaagttttcattgggcaaaatgggggaacaacctatcttcagcactcgagctcatgtcttccaaattgacccaaacacaaagaagaactgggtacccaccagcaagcatgcagttactgtgtcttatttctatgacagcacaagaaatgtgtataggataatcagtttagatggctcaaaggcaataataaatagtaccatcaccccaaacatgacatttactaaaacatctcagaagtttggccagtgggctgatagccgggcaaacaccgtttatggattgggattctcctctgagcatcatctttcgaaatttgcagaaaagtttcaggaatttaaagaagctgctcgactagcaaaggaaaaatcacaagagaagatggaacttaccagtacaccttcacaggaatccgcaggcggggatcttcagtctcctttaacaccggaaagtatcaacgggacagatgatgaaagaacacctgatgtgacacagaactcagagccaagggctgaaccaactcagaatgcattgccattttcacatagttcagcaatcagcaaacattgggaggctgaactggctaccctcaaaggaaataatgccaaactcactgcagccctgctggagtccactgccaatgtgaaacaatggaaacagcaacttgctgcctatcaagaggaagcagaacgtctgcacaagcgggtgactgaacttgaatgtgttagtagccaagcaaatgcagtacatactcataagacagaattaaatcagacaatacaagaactggaagagacactgaaactgaaggaagaggaaatagaaaggttaaaacaagaaattgataatgccagagaactacaagaacagagggattctttgactcagaaactacaggaagtagaaattcggaacaaagacctggagggacaactgtctgacttagagcaacgtctggagaaaagtcagaatgaacaagaagcttttcgcaataacctgaagacactcttagaaattctggatggaaagatatttgaactaacagaattacgagataacttggccaagctactagaatgcagctaaggaaagtgaaatttcagtgccaattaattaaaagatacactgtctctcttcataggactgtttaggctctgcatcaagattgcacaaaaaaaaaaaaaaaaaa

SEQ ID NO: 2411 - protein, 354 aa, Homo sapiens
MGEQPIFSTRAHVFQIDPNTKKNWVPTSKHAVTVSYFYDSTRNVYRIISLDGSKAIINSTITPNMTFTKTSQKFGQWADSRANTVYGLGFSSEHHLSKFAEKFQEFKEAARLAKEKSQEKMELTSTPSQESAGGDLQSPLTPESINGTDDERTPDVTQNSEPRAEPTQNALPFSHSSAISKHWEAELATLKGNNAKLTAALLESTANVKQWKQQLAAYQEEAERLHKRVTELECVSSQANAVHTHKTELNQTIQELEETLKLKEEEIERLKQEIDNARELQEQRDSLTQKLQEVEIRNKDLEGQLSDLEQRLEKSQNEQEAFRNNLKTLLEILDGKIFELTELRDNLAKLLECS

SEQ ID NO: 2412 - DNA, 1670 bp, Homo sapiens
ggcgggagggccgcagctccggcgccgcgccgtcccgccagaacgatcgccgcggccggaagagttggcgctcggggcggactccttggaactggcttagcgcacccatcccaccttcccgcaccctgggaccggtccaacgagcgctcctccaagcggagccttggagggcacggccggcaccattacctccaacgagtggagctctcccacctcccctgaggggagcaccgcctctgggggcagtcaggcactggacaagcccatcgacaatgacggagagggcgtgtggagcccggatattgagcagagtttccaggaggccctcgccatctacccgccctgtggcaggcgcaaaatcatcctgtcggacgagggcaagatgtatggtcgaaacgagctgattgcccgctacatcaagctccggacagggaagacccgcaccaggaagcaggtctccagccacatccaggtgctggctcgtcgcaaagctcgcgagatccaggccaagctaaaggaccaggcagctaaggacaaggccctgcagagcatggctgccatgtcgtctgcacagatcatctccgccacggccttccacagtagcatgcgcctcgcccggggccccggccgcccagcagtctcagggttttggcaaggagctttgccaggccaagccgaaacgtcccatgatgtgaagcctttctctcagcaaacctatgctgtccagcctccgctgcctctgccagggtttgagtctcctgcagggcccgccccatcgccctctgcgcccccggcacccccatggcagggccgcaggcgtggcagctccaagctctggatgttggagttctctgccttcctggagcagcagcaggacccggacacgtacaacaagcacctgttcgtgcacattggccagtccagcccaagctacctgcgcccctacctcgaagccgtggacatccgccaaatctatgacaaattcccggagaaaaagggtggactcaaggatctcttcgaacggggaccctccaatgccttttttcttgtgaagttctgggcagacctcaacaccaacatcgaggatgaaggcagctccttctatggggtctccagccagtatgagagccccgagaacatgatcatcacctgctccacgaaggtctgctctttcggcaagcaggtggtggagaaagttgagacagagtatgctcgctatgagaatggacactactcttaccgcatccaccggtccccgctctgtgagtacatgatcaacttcatccacaagctcaagcacctccctgagaagtacatgatgaacagcgtgctggagaacttcaccatcctgcaggtggtcaccaacagagacacacaggagaccttgctgtgcattgcctatgtctttgaggtgtcagccagtgagcacggggctcagcaccacatctacaggctggtgaaagaatgagagactcggggagcagggaggggggaagagacgtgtgtgcaggaaacggggacgtggggaggggacctgcaggggccagccccctgaagtgccaagagagctgagaggagcagttgtgactctacccaggaacaaactgtgcctgaacctgaggtgcccaaccccaaataaacccaagatgctgtgtattttcagaggaaaa

SEQ ID NO: 2413 - protein, 434 aa, Homo sapiens
MEGTAGTITSNEWSSPTSPEGSTASGGSQALDKPIDNDGEGVWSPDIEQSFQEALAIYPPCGRRKIILSDEGKMYGRNELIARYIKLRTGKTRTRKQVSSHIQVLARRKAREIQAKLKDQAAKDKALQSMAAMSSAQIISATAFHSSMRLARGPGRPAVSGFWQGALPGQAETSHDVKPFSQQTYAVQPPLPLPGFESPAGPAPSPSAPPAPPWQGRRRGSSKLWMLEFSAFLEQQQDPDTYNKHLFVHIGQSSPSYLRPYLEAVDIRQIYDKFPEKKGGLKDLFERGPSNAFFLVKFWADLNTNIEDEGSSFYGVSSQYESPENMIITCSTKVCSFGKQVVEKVETEYARYENGHYSYRIHRSPLCEYMINFIHKLKHLPEKYMMNSVLENFTILQVVTNRDTQETLLCIAYVFEVSASEHGAQHHIYRLVKE

SEQ ID NO: 2414 - DNA, 641 bp, Homo sapiens
ggcacgagggacggtcgccgcgttccatcgtcgcgcggcccttcgggcgcccgagcccgcaatgtcgggccccaacggagacctggggatgccggtggaggcgggagcggaaggcgaggaggacggcttcggggaagcagaatacgctgccatcaactccatgctggaccagatcaactcctgtctggaccacctggaggagaagaatgaccacctccacgcccgcctccaggagctgctggagtccaaccggcagacacgcctggagttccagcagcagctcggggaggcccccagtgatgccagcccctaggctccaagagcccccaaccgggacccaaccctgcctccctgggctaggctctggcctgggcactcaccccctggcttagacaccttctcaagggctggccttcagggacccctggtgggtctgcctgcctgggccacccttcctgcctgggcctccccttggcctacctgggccagcccccaccacctggcatgccctcctggggccaagagtgggcctgcaacccacccacttgcctgcccacccaactcctgggcgctccccactctgcccaggccttgagtgtccacattaaatgggtctcccacaaaaaaaaaaaaaaaaaaaa

SEQ ID NO: 2415 - protein, 83 aa, Homo sapiens
MSGPNGDLGMPVEAGAEGEEDGFGEAEYAAINSMLDQINSCLDHLEEKNDHLHARLQELLESNRQTRLEFQQQLGEAPSDASP

SEQ ID NO: 2416 - DNA, 5828 bp, Homo sapiens
cggcggcgcggtcggagggggccggcgcgcagagccagacgccgccgcttgttttggttggggctctcggcaactctccgaggaggaggaggaggagggaggaggggagaagtaactgcagcggcagcgccctcccgaggaacaggcgtcttccccgaacccttcccaaacctcccccatcccctctcgcccttgtcccctcccctcctccccagccgcctggagcgaggggcagggatgagtctgtccctccggccggtccccagctgcagtggctgcccggtatcgtttcgcatggaaaagccactttctccacccgccgagatgggcccggatggggctgcagaggacgcgcccgcgggcggcggcagcagcagcagcagcagcagcagcaacagcaacagccgcagcgccgcggtctctgcgactgagctggtatttgggcggctggtggcggctgggacggttggggggtgggaggaggcgaaggaggagggagaaccccgtgcaacgttgggacttggcaacccgcctccccctgcccaaggatatttaatttgcctcgggaatcgctgcttccagaggggaactcaggagggaaggcgcgcgcgcgcgcgcgctcctggaggggcaccgcagggacccccgactgtcgcctccctgtgccggactccagccggggcgacgagagatgcatcttcgctccttcctggtggcggcggcggctgagaggagacttggctctcggaggatcggggctgccctcaccccggacgcactgcctccccgccggcgtgaagcgcccgaaaactccggtcgggctctctcctgggctcagcagctgcgtcctccttcagctgcccctccccggcgcggggggcggcgtggatttcagagtcggggtttctgctgcctccagccctgtttgcatgtgccgggccgcggcgaggagcctccgccccccacccggttgtttttcggagcctccctctgctcagcgttggtggtggcggtggcagcatggcgagccctccggagagcgatggcttctcggacgtgcgcaaggtgggctacctgcgcaaacccaagagcatgcacaaacgcttcttcgtactgcgcgcggccagcgaggctgggggcccggcgcgcctcgagtactacgagaacgagaagaagtggcggcacaagtcgagcgcccccaaacgctcgatcccccttgagagctgcttcaacatcaacaagcgggctgactccaagaacaagcacctggtggctctctacacccgggacgagcactttgccatcgcggcggacagcgaggccgagcaagacagctggtaccaggctctcctacagctgcacaaccgtgctaagggccaccacgacggagctgcggccctcggggcgggaggtggtgggggcagctgcagcggcagctccggccttggtgaggctggggaggacttgagctacggtgacgtgcccccaggacccgcattcaaagaggtctggcaagtgatcctgaagcccaagggcctgggtcagacaaagaacctgattggtatctaccgcctttgcctgaccagcaagaccatcagcttcgtgaagctgaactcggaggcagcggccgtggtgctgcagctgatgaacatcaggcgctgtggccactcggaaaacttcttcttcatcgaggtgggccgttctgccgtgacggggcccggggagttctggatgcaggtggatgactctgtggtggcccagaacatgcacgagaccatcctggaggccatgcgggccatgagtgatgagttccgccctcgcagcaagagccagtcctcgtccaactgctctaaccccatcagcgtccccctgcgccggcaccatctcaacaatcccccgcccagccaggtggggctgacccgccgatcacgcactgagagcatcaccgccacctccccggccagcatggtgggcgggaagccaggctccttccgtgtccgcgcctccagtgacggcgaaggcaccatgtcccgcccagcctcggtggacggcagccctgtgagtcccagcaccaacagaacccacgcccaccggcatcggggcagcgcccggctgcaccccccgctcaaccacagccgctccatccccatgccggcttcccgctgctcgccttcggccaccagcccggtcagtctgtcgtccagtagcaccagtggccatggctccacctcggattgtctcttcccacggcgatctagtgcttcggtgtctggttcccccagcgatggcggtttcatctcctcggatgagtatggctccagtccctgcgatttccggagttccttccgcagtgtcactccggattccctgggccacaccccaccagcccgcggtgaggaggagctaagcaactatatctgcatgggtggcaaggggccctccaccctgaccgcccccaacggtcactacattttgtctcggggtggcaatggccaccgctgcaccccaggaacaggcttgggcacgagtccagccttggctggggatgaagcagccagtgctgcagatctggataatcggttccgaaagagaactcactcggcaggcacatcccctaccattacccaccagaagaccccgtcccagtcctcagtggcttccattgaggagtacacagagatgatgcctgcctacccaccaggaggtggcagtggaggccgactgccgggacacaggcactccgccttcgtgcccacccgctcctacccagaggagggtctggaaatgcaccccttggagcgtcggggggggcaccaccgcccagacagctccaccctccacacggatgatggctacatgcccatgtccccaggggtggccccagtgcccagtggccgaaagggcagtggagactatatgcccatgagccccaagagcgtatctgccccacagcagatcatcaatcccatcagacgccatccccagagagtggaccccaatggctacatgatgatgtcccccagcggtggctgctctcctgacattggaggtggccccagcagcagcagcagcagcagcaacgccgtcccttccgggaccagctatggaaagctgtggacaaacggggtagggggccaccactctcatgtcttgcctcaccccaaacccccagtggagagcagcggtggtaagctcttaccttgcacaggtgactacatgaacatgtcaccagtgggggactccaacaccagcagcccctccgactgctactacggccctgaggacccccagcacaagccagtcctctcctactactcattgccaagatcctttaagcacacccagcgccccggggagccggaggagggtgcccggcatcagcacctccgcctttccactagctctggtcgccttctctatgctgcaacagcagatgattcttcctcttccaccagcagcgacagcctgggtgggggatactgcggggctaggctggagcccagccttccacatccccaccatcaggttctgcagccccatctgcctcgaaaggtggacacagctgctcagaccaatagccgcctggcccggcccacgaggctgtccctgggggatcccaaggccagcaccttacctcgggcccgagagcagcagcagcagcagcagcccttgctgcaccctccagagcccaagagcccgggggaatatgtcaatattgaatttgggagtgatcagtctggctacttgtctggcccggtggctttccacagctcaccttctgtcaggtgtccatcccagctccagccagctcccagagaggaagagactggcactgaggagtacatgaagatggacctggggccgggccggagggcagcctggcaggagagcactggggtcgagatgggcagactgggccctgcacctcccggggctgctagcatttgcaggcctacccgggcagtgcccagcagccggggtgactacatgaccatgcagatgagttgtccccgtcagagctacgtggacacctcgccagctgcccctgtaagctatgctgacatgcgaacaggcattgctgcagaggaggtgagcctgcccagggccaccatggctgctgcctcctcatcctcagcagcctctgcttccccgactgggcctcaaggggcagcagagctggctgcccactcgtccctgctggggggcccacaaggacctgggggcatgagcgccttcacccgggtgaacctcagtcctaaccgcaaccagagtgccaaagtgatccgtgcagacccacaagggtgccggcggaggcatagctccgagactttctcctcaacacccagtgccacccgggtgggcaacacagtgccctttggagcgggggcagcagtagggggcggtggcggtagcagcagcagcagcgaggatgtgaaacgccacagctctgcttcctttgagaatgtgtggctgaggcctggggagcttgggggagcccccaaggagccagccaaactgtgtggggctgctgggggtttggagaatggtcttaactacatagacctggatttggtcaaggacttcaaacagtgccctcaggagtgcacccctgaaccgcagcctcccccacccccaccccctcatcaacccctgggcagcggtgagagcagctccacccgccgctcaagtgaggatttaagcgcctatgccagcatcagtttccagaagcagccagaggaccgtcagtagctcaactggacatcacagcagaatgaagacctaaatgacctcagcaaatcctcttctaactcatgggtacccagactctaaatatttcatgattcacaactaggacctcatatcttcctcatcagtagatggtacgatgcatccatttcagtttgtttactttatccaatcctcaggatttcattgactgaactgcacgttctatattgtgccaagcgaaaaaaaaaaatgcactgtgacaccagaataatgagtctgcataaacttcatcttcaaccttaaggacttagctggccacagtgagctgatgtgcccaccaccgtgtcatgagagaatgggtttactctcaatgcattttcaagatacatttcatctgctgctgaaactgtgtacgacaaagcatcattgtaaattatttcatacaaaactgttcacgttgggtggagagagtattaaatatttaacataggttttgatttatatgtgtaattttttaaatgaaaatgtaacttttcttacagcacatcttttttttggatgtgggatggaggtatacaatgttctgttgtaaagagtggagcaaatgcttaaaacaaggcttaaaagagtagaatagggtatgatccttgttttaagattgtaattcagaaaacataatataagaatcatagtgccatagatggttctcaattgtatagttatatttgctgatactatctcttgtcatataaacctgatgttgagctgagttccttataagaattaatcttaattttgtattttttcctgtaagacaataggccatgttaattaaactgaagaaggatatatttggctgggtgttttcaaatgtcagcttaaaattggtaattgaatggaagcaaaattataagaagaggaaattaaagtcttccattgcatgtattgtaaacagaaggagatgggtgattccttcaattcaaaagctctctttggaatgaacaatgtgggcgtttgtaaattctggaaatgtctttctattcataataaactagatactgttgatcttttaaaaaaaaaaaaaaaaaaaaaaaaaaaaa

SEQ ID NO: 2417 - protein, 1242 aa, Homo sapiens
MASPPESDGFSDVRKVGYLRKPKSMHKRFFVLRAASEAGGPARLEYYENEKKWRHKSSAPKRSIPLESCFNINKRADSKNKHLVALYTRDEHFAIAADSEAEQDSWYQALLQLHNRAKGHHDGAAALGAGGGGGSCSGSSGLGEAGEDLSYGDVPPGPAFKEVWQVILKPKGLGQTKNLIGIYRLCLTSKTISFVKLNSEAAAVVLQLMNIRRCGHSENFFFIEVGRSAVTGPGEFWMQVDDSVVAQNMHETILEAMRAMSDEFRPRSKSQSSSNCSNPISVPLRRHHLNNPPPSQVGLTRRSRTESITATSPASMVGGKPGSFRVRASSDGEGTMSRPASVDGSPVSPSTNRTHAHRHRGSARLHPPLNHSRSIPMPASRCSPSATSPVSLSSSSTSGHGSTSDCLFPRRSSASVSGSPSDGGFISSDEYGSSPCDFRSSFRSVTPDSLGHTPPARGEEELSNYICMGGKGPSTLTAPNGHYILSRGGNGHRCTPGTGLGTSPALAGDEAASAADLDNRFRKRTHSAGTSPTITHQKTPSQSSVASIEEYTEMMPAYPPGGGSGGRLPGHRHSAFVPTRSYPEEGLEMHPLERRGGHHRPDSSTLHTDDGYMPMSPGVAPVPSGRKGSGDYMPMSPKSVSAPQQIINPIRRHPQRVDPNGYMMMSPSGGCSPDIGGGPSSSSSSSNAVPSGTSYGKLWTNGVGGHHSHVLPHPKPPVESSGGKLLPCTGDYMNMSPVGDSNTSSPSDCYYGPEDPQHKPVLSYYSLPRSFKHTQRPGEPEEGARHQHLRLSTSSGRLLYAATADDSSSSTSSDSLGGGYCGARLEPSLPHPHHQVLQPHLPRKVDTAAQTNSRLARPTRLSLGDPKASTLPRAREQQQQQQPLLHPPEPKSPGEYVNIEFGSDQSGYLSGPVAFHSSPSVRCPSQLQPAPREEETGTEEYMKMDLGPGRRAAWQESTGVEMGRLGPAPPGAASICRPTRAVPSSRGDYMTMQMSCPRQSYVDTSPAAPVSYADMRTGIAAEEVSLPRATMAAASSSSAASASPTGPQGAAELAAHSSLLGGPQGPGGMSAFTRVNLSPNRNQSAKVIRADPQGCRRRHSSETFSSTPSATRVGNTVPFGAGAAVGGGGGSSSSSEDVKRHSSASFENVWLRPGELGGAPKEPAKLCGAAGGLENGLNYIDLDLVKDFKQCPQECTPEPQPPPPPPPHQPLGSGESSSTRRSSEDLSAYASISFQKQPEDRQ

SEQ ID NO: 2418 - DNA, 3083 bp, Homo sapiens
gcgcgaggtggctcagccgcaagatggcggcgctggcggaggagcagacggaggtggcggtcaagctagagcctgagggaccgccaacgctgctacctccgcaggcgggggacggcgcaggcgagggtagcggcggcactaccaacaacggccccaacggcggcggcgggaacgttgcggcgtcgtcgtccactggcggggatggcgggacccccaagcccacggtggctgtctccgccgctgccccggcgggggcggccccggtgcccgccgctgctccggacgccggcgctccgcatgaccgacagactctactggccgtgctgcagttcctacggcagagcaaactccgcgaggccgaagaggcgctgcgccgtgaggccgggctgctggaggaggcagtggcgggctccggagccccgggagaggtggacagcgccggcgctgaggtgaccagcgcgcttctcagccgggtgaccgcctcggcccctggccctgcggcccccgaccctccgggcactggcgcttcgggggccacggtcgtctcaggttcagcctcaggtcctgcggctccgggtaaagttggaagtgttgctgtggaagaccagccagatgtcagtgccgtgttgtcagcctacaaccaacaaggagatcccacaatgtatgaagaatactatagtggactgaaacacttcattgaatgttccctggactgccatcgggcagagttgtcccaacttttttatcctctgtttgtgcacatgtacttggagctagtctacaatcaacatgagaatgaagcaaagtcattctttgagaagttccatggagatcaggaatgttattaccaggatgacctacgagtattatctagtcttaccaaaaaggaacacatgaaagggaatgagaccatgttggattttcgaacaagtaaatttgttctgcgtatttcccgtgactcgtaccaactcttgaagaggcatcttcaggagaaacagaacaatcagatatggaacatagttcaggagcacctctacattgacatctttgatgggatgccgcgtagtaagcaacagatagatgcgatggtgggaagtttggcaggagaggctaaacgagaggcaaacaaatcaaaggtattttttggtttattaaaagaaccagaaattgaggtacctttggatgacgaggatgaagagggagaaaatgaagaaggaaaacctaaaaagaagaagcctaaaaaagatagtattggatccaaaagcaaaaaacaagatcccaatgctccacctcagaacagaatccctcttcctgagttgaaagattcagataagttggataagataatgaatatgaaagaaaccaccaaacgagtgcgccttgggccggactgcttaccctccatttgtttctatacatttctcaatgcttaccagggtctcactgcagtggatgtcactgatgattctagtctgattgctggaggttttgcagattcaactgtcagagtgtggtcggtaacacccaaaaagcttcgtagtgtcaaacaagcatcagatcttagtcttatagacaaagaatcagatgatgtcttagaaagaatcatggatgagaaaacagcaagtgagttgaagattttgtatggtcacagtgggcctgtctacggagccagcttcagtccggataggaactatctgctttcctcttcagaggacggaactgttagattgtggagccttcaaacatttacttgtttggtgggatataaaggacacaactatccagtatgggacacacaattttctccatatggatattattttgtgtcagggggccatgaccgagtagctcggctctgggctacagaccactatcagcctttaagaatatttgccggccatcttgctgatgtgaattgtaccagattccatccaaattctaattatgttgctacgggctctgcagacagaactgtgcggctctgggacgtcctgaatggtaactgtgtaaggatcttcactggacacaagggaccaattcattccttgacattttctcccaatgggagattcctggctacaggagcaacagatggcagagtgcttctttgggatattggacatggtttgatggttggagaattaaaaggccacactgatacagtctgttcacttaggtttagtagagatggtgaaattttggcatcaggttcaatggataatacagttcgattatgggatgctatcaaagcctttgaagatttagagaccgatgactttactacagccactgggcatataaatttacctgagaattcacaggagttattgttgggaacatatatgaccaaatcaacaccagttgtacaccttcattttactcgaagaaacctggttctagctgcaggagcttatagtccacaataaaccatcggtattaaagaccttttggaagctactgtttttaaaaagggagactaaaagcaaatacctcagtgattaatatttaagctacagagaatgtttttgtctatatggatctggaagtatgctgcttggaaaaatctgaacaggacagttccacgtttctatagcaaccacatttgactaatttccgttagttgaataagaggtattatgatcatggaggggacatttatggtgctttggattgtgtggaaactatgcattttctgttcaaatgctattttaatttattacatttagaaaaaaagttgatttcaataattcatcctgcttcaagattcaaattcagaaatatactatcatcttgaattttagctgaagaatcctatgagcatgtatgtttctgctgtaaaaacgtagttactgtatggcactcaaaaactatgttaaatgatccactaactttttttttcttggcccatgattaatggaatgtatgtaactaggtagggttcctttcttagatctagaggaagtacagccacccactgacatctgaatttatatacctgttgagttttgagtgcacccaaacactcgataaaccaggtgaagaaatttagcttccatgttctacttcagctaaaacagctacat

SEQ ID NO: 2419 - protein, 800 aa, Homo sapiens
MAALAEEQTEVAVKLEPEGPPTLLPPQAGDGAGEGSGGTTNNGPNGGGGNVAASSSTGGDGGTPKPTVAVSAAAPAGAAPVPAAAPDAGAPHDRQTLLAVLQFLRQSKLREAEEALRREAGLLEEAVAGSGAPGEVDSAGAEVTSALLSRVTASAPGPAAPDPPGTGASGATVVSGSASGPAAPGKVGSVAVEDQPDVSAVLSAYNQQGDPTMYEEYYSGLKHFIECSLDCHRAELSQLFYPLFVHMYLELVYNQHENEAKSFFEKFHGDQECYYQDDLRVLSSLTKKEHMKGNETMLDFRTSKFVLRISRDSYQLLKRHLQEKQNNQIWNIVQEHLYIDIFDGMPRSKQQIDAMVGSLAGEAKREANKSKVFFGLLKEPEIEVPLDDEDEEGENEEGKPKKKKPKKDSIGSKSKKQDPNAPPQNRIPLPELKDSDKLDKIMNMKETTKRVRLGPDCLPSICFYTFLNAYQGLTAVDVTDDSSLIAGGFADSTVRVWSVTPKKLRSVKQASDLSLIDKESDDVLERIMDEKTASELKILYGHSGPVYGASFSPDRNYLLSSSEDGTVRLWSLQTFTCLVGYKGHNYPVWDTQFSPYGYYFVSGGHDRVARLWATDHYQPLRIFAGHLADVNCTRFHPNSNYVATGSADRTVRLWDVLNGNCVRIFTGHKGPIHSLTFSPNGRFLATGATDGRVLLWDIGHGLMVGELKGHTDTVCSLRFSRDGEILASGSMDNTVRLWDAIKAFEDLETDDFTTATGHINLPENSQELLLGTYMTKSTPVVHLHFTRRNLVLAAGAYSPQ

SEQ ID NO: 2420 - DNA, 2918 bp, Homo sapiens
gcgcgaggtggctcagccgcaagatggcggcgctggcggaggagcagacggaggtggcggtcaagctagagcctgagggaccgccaacgctgctacctccgcaggcgggggacggcgcaggcgagggtagcggcggcactaccaacaacggccccaacggcggcggcgggaacgttgcggcgtcgtcgtccactggcggggatggcgggacccccaagcccacggtggctgtctccgccgctgccccggcgggggcggccccggtgcccgccgctgctccggacgccggcgctccgcatgaccgacagactctactggccgtgctgcagttcctacggcagagcaaactccgcgaggccgaagaggcgctgcgccgtgaggccgggctgctggaggaggcagtggcgggctccggagccccgggagaggtggacagcgccggcgctgaggtgaccagcgcgcttctcagccgggtgaccgcctcggcccctggccctgcggcccccgaccctccgggcactggcgcttcgggggccacggtcgtctcaggttcagcctcaggtcctgcggctccgggtaaagttggaagtgttgctgtggaagaccagccagatgtcagtgccgtgttgtcagcctacaaccaacaaggagatcccacaatgtatgaagaatactatagtggactgaaacacttcattgaatgttccctggactgccatcgggcagagttgtcccaacttttttatcctctgtttgtgcacatgtacttggagctagtctacaatcaacatgagaatgaagcaaagtcattctttgagaagttccatggagatcaggaatgttattaccaggatgacctacgagtattatctagtcttaccaaaaaggaacacatgaaagggaatgagaccatgttggattttcgaacaagtaaatttgttctgcgtatttcccgtgactcgtaccaactcttgaagaggcatcttcaggagaaacagaacaatcagatatggaacatagttcaggagcacctctacattgacatctttgatgggatgccgcgtagtaagcaacagatagatgcgatggtgggaagtttggcaggagaggctaaacgagaggcaaacaaatcaaaggtattttttggtttattaaaagaaccagaaattgaggtacctttggatgacgaggatgaagagggagaaaatgaagaaggaaaacctaaaaagaagaagcctaaaaaagatagtattggatccaaaagcaaaaaacaagatcccaatgctccacctcagaacagaatccctcttcctgagttgaaagattcagataagttggataagataatgaatatgaaagaaaccaccaaacgagtgcgccttgggccggactgcttaccctccatttgtttctatacatttctcaatgcttaccagggtctcactgcagtggatgtcactgatgattctagtctgattgctggaggttttgcagattcaactgtcagagtgtggtcggtaacacccaaaaagcttcgtagtgtcaaacaagcatcagatcttagtcttatagacaaagaatcagatgatgtcttagaaagaatcatggatgagaaaacagcaagtgagttgaagattttgtatggtcacagtgggcctgtctacggagccagcttcagtccggataggctctgggctacagaccactatcagcctttaagaatatttgccggccatcttgctgatgtgaattgtaccagattccatccaaattctaattatgttgctacgggctctgcagacagaactgtgcggctctgggacgtcctgaatggtaactgtgtaaggatcttcactggacacaagggaccaattcattccttgacattttctcccaatgggagattcctggctacaggagcaacagatggcagagtgcttctttgggatattggacatggtttgatggttggagaattaaaaggccacactgatacagtctgttcacttaggtttagtagagatggtgaaattttggcatcaggttcaatggataatacagttcgattatgggatgctatcaaagcctttgaagatttagagaccgatgactttactacagccactgggcatataaatttacctgagaattcacaggagttattgttgggaacatatatgaccaaatcaacaccagttgtacaccttcattttactcgaagaaacctggttctagctgcaggagcttatagtccacaataaaccatcggtattaaagaccttttggaagctactgtttttaaaaagggagactaaaagcaaatacctcagtgattaatatttaagctacagagaatgtttttgtctatatggatctggaagtatgctgcttggaaaaatctgaacaggacagttccacgtttctatagcaaccacatttgactaatttccgttagttgaataagaggtattatgatcatggaggggacatttatggtgctttggattgtgtggaaactatgcattttctgttcaaatgctattttaatttattacatttagaaaaaaagttgatttcaataattcatcctgcttcaagattcaaattcagaaatatactatcatcttgaattttagctgaagaatcctatgagcatgtatgtttctgctgtaaaaacgtagttactgtatggcactcaaaaactatgttaaatgatccactaactttttttttcttggcccatgattaatggaatgtatgtaactaggtagggttcctttcttagatctagaggaagtacagccacccactgacatctgaatttatatacctgttgagttttgagtgcacccaaacactcgataaaccaggtgaagaaatttagcttccatgttctacttcagctaaaacagctacat

SEQ ID NO: 2421 - protein, 745 aa, Homo sapiens
MAALAEEQTEVAVKLEPEGPPTLLPPQAGDGAGEGSGGTTNNGPNGGGGNVAASSSTGGDGGTPKPTVAVSAAAPAGAAPVPAAAPDAGAPHDRQTLLAVLQFLRQSKLREAEEALRREAGLLEEAVAGSGAPGEVDSAGAEVTSALLSRVTASAPGPAAPDPPGTGASGATVVSGSASGPAAPGKVGSVAVEDQPDVSAVLSAYNQQGDPTMYEEYYSGLKHFIECSLDCHRAELSQLFYPLFVHMYLELVYNQHENEAKSFFEKFHGDQECYYQDDLRVLSSLTKKEHMKGNETMLDFRTSKFVLRISRDSYQLLKRHLQEKQNNQIWNIVQEHLYIDIFDGMPRSKQQIDAMVGSLAGEAKREANKSKVFFGLLKEPEIEVPLDDEDEEGENEEGKPKKKKPKKDSIGSKSKKQDPNAPPQNRIPLPELKDSDKLDKIMNMKETTKRVRLGPDCLPSICFYTFLNAYQGLTAVDVTDDSSLIAGGFADSTVRVWSVTPKKLRSVKQASDLSLIDKESDDVLERIMDEKTASELKILYGHSGPVYGASFSPDRLWATDHYQPLRIFAGHLADVNCTRFHPNSNYVATGSADRTVRLWDVLNGNCVRIFTGHKGPIHSLTFSPNGRFLATGATDGRVLLWDIGHGLMVGELKGHTDTVCSLRFSRDGEILASGSMDNTVRLWDAIKAFEDLETDDFTTATGHINLPENSQELLLGTYMTKSTPVVHLHFTRRNLVLAAGAYSPQ

SEQ ID NO: 2422 - DNA, 1807 bp, Homo sapiens
ctttccgtccccttgcttcgtcttcgcttttctttctacttattcttatctgtgtctttcgctttgtttgcctctccgtctgttttccctcagggcccccttctttcctcgaccttttcaaatcgcaaatatggcgccggagcggctgcggagccgggcgccctccgccttcaagttgcggggcttgctgctccgtggtgaagctattaagtacctcacagaagctcttcagtctatcagtgaattagagcttgaagataaactggaaaagataattaatgcagttgagaagcaacccttgtcatcaaacatgattgaacgatctgtggtggaagcagcagtccaggaatgcagtcagtctgttgatgaaactatagagcacgttttcaatatcataggagcatttgatattccacgctttgtgtacaattcagaaagaaaaaaatttcttcctctgttaatgaccaaccaccctgcaccaaatttatttggaacaccaagagataaagcagagatgtttcgtgagcgatataccattttgcaccagaggacccacaggcatgaattatttactcctccggtgataggttctcaccctgatgaaagcggaagcaaattccagcttaaaacaatagaaaccttattgggtagtacaaccaaaatcggagatgcgattgttcttggaatgataacgcagttaaaagagggaaaattttttctggaagatcctactggaacagtccaactagaccttagtaaagctcagttccatagtggtttatacacagaggcatgctttgtcttagcagaaggttggtttgaagatcaagtgtttcatgtcaatgcctttggatttccacccactgagccctctagtactactagggcatactatggaaatattaatttttttggaggtccttctaatacatctgtgaagacttctgcaaaactaaaacagctagaagaggagaataaagatgctatgtttgtgtttttatctgatgtttggttggaccaggtggaagtattggaaaaacttcgcataatgtttgctggttattcaccagcacctccaacctgctttattctgtgtggtaatttttcatctgcaccatatggaaaaaatcaagttcaagctttgaaagattccctaaaaactttggcagatataatatgtgaatacccagatattcaccaaagtcgttttgtgtttgtacctggtccagaggatcctggatttggttccatcttaccaaggccaccacttgctgaaagcatcactaatgaattcagacaaagggtaccattttcagtttttactactaatccttgcagaattcagtactgtacacaggaaattactgtcttccgtgaagacttagtaaataaaatgtgcagaaactgcgtccgttttcctagcagcaatttggctattcctaatcactttgtaaagactatcttatcccaaggacatctgactcccctacctctttatgtctgcccagtgtattgggcatatgactatgctttgagagtgtatcctgtgcccgatctacttgtcattgcagacaaatatgatcctttcactacgacaaataccgaatgcctctgcataaaccctggctcttttccaagaagtggattttcattcaaagttttttatccttctaataagacagtagaagatagcaaacttcaaggcttttgagattcttaaagatcatctgaagaaaattcatcagttttctgcttaactctatatcttatgtgattctgatattacaataaaattatggtaaacttt

SEQ ID NO: 2423 - protein, 526 aa, Homo sapiens
MAPERLRSRAPSAFKLRGLLLRGEAIKYLTEALQSISELELEDKLEKIINAVEKQPLSSNMIERSVVEAAVQECSQSVDETIEHVFNIIGAFDIPRFVYNSERKKFLPLLMTNHPAPNLFGTPRDKAEMFRERYTILHQRTHRHELFTPPVIGSHPDESGSKFQLKTIETLLGSTTKIGDAIVLGMITQLKEGKFFLEDPTGTVQLDLSKAQFHSGLYTEACFVLAEGWFEDQVFHVNAFGFPPTEPSSTTRAYYGNINFFGGPSNTSVKTSAKLKQLEEENKDAMFVFLSDVWLDQVEVLEKLRIMFAGYSPAPPTCFILCGNFSSAPYGKNQVQALKDSLKTLADIICEYPDIHQSRFVFVPGPEDPGFGSILPRPPLAESITNEFRQRVPFSVFTTNPCRIQYCTQEITVFREDLVNKMCRNCVRFPSSNLAIPNHFVKTILSQGHLTPLPLYVCPVYWAYDYALRVYPVPDLLVIADKYDPFTTTNTECLCINPGSFPRSGFSFKVFYPSNKTVEDSKLQGF

SEQ ID NO: 2424 - DNA, 2578 bp, Homo sapiens
ggaggaggaaagaggaggacatggtctccgaggaggaggaggaggaggacggcgacgccgaggagacccaggattctgaggacgacgaggaggatgagatggaagaggacgacgatgactccgattatccggaggagatggaagacgacgacgacgacgccagttactgcacggaaagcagcttcaggagccatagtacctacagcagcactccaggtaggcgaaaaccaagagtacatcggcctcgttctcctatattggaagaaaaagacatcccgccccttgaatttcccaagtcctctgaggatttaatggtgcctaatgagcatataatgaatgtcattgccatttacgaggtactgcggaactttggcactgttttgagattatctccttttcgctttgaggacttttgtgcagctctggtgagccaagagcagtgcacactcatggcagagatgcatgttgtgcttttgaaagcagttctgcgtgaagaagacacttccaatactacctttggacctgctgatctgaaagatagcgttaattccacactgtatttcatagatgggatgacgtggccagaggtgctgcgggtgtactgtgagagtgataaggagtaccatcacgttcttccttaccaagaggcagaggactacccatatggaccagtagagaacaagatcaaagttctacagtttctagtcgatcagtttcttacaacaaatattgctcgagaggaattgatgtctgaaggggtgatacagtatgatgaccattgtagggtttgtcacaaacttggggatttgctttgctgtgagacatgttcagcagtataccatttggaatgtgtgaagccacctcttgaggaggtgccagaggacgagtggcagtgtgaagtctgtgtagcacacaaggtgcctggtgtgactgactgtgttgctgaaatccaaaaaaataaaccatatattcgacatgaacctattggatatgatagaagtcggaggaaatactggttcttgaaccgaagactcataatagaagaagatacagaaaatgaaaatgaaaagaaaatttggtattacagcacaaaggtccaacttgcagaattaattgactgtctagacaaagattattgggaagcagaactctgcaaaattctagaagaaatgcgtgaagaaatccaccgacacatggacataactgaagacctgaccaataaggctcggggcagtaacaaatcctttctggcggcagctaatgaagaaattttggaatccataagagccaaaaagggagacattgataatgttaaaagcccagaagaaacagaaaaagacaagaatgagactgagaatgactctaaagatgctgagaaaaacagagaagaatttgaagaccagtcccttgaaaaagacagtgacgacaaaacaccagatgatgaccctgagcaaggaaaatctgaggagccaacagaagttggggataaaggtaactctgtgtcagcaaatcttggcgacaacacaacaaatgcaacttcagaagagactagtccctctgaagggaggagccctgtggggtgtctctcagaaacccccgatagcagcaacatggcagagaagaaggtggcatctgagctcccccaggatgtgccagaagaacctaacaagacatgtgagagcagtaacactagtgctaccactacctccatccagcctaatctggaaaacagtaacagcagcagtgaactaaattcttcccagagtgaatctgctaaggcagctgatgatcctgaaaatggagaaagagaatctcatacacctgtctctattcaggaagagatagtaggtgatttcacatcggagaagtccaccggggagctaagtgaatctcctggagctggaaaaggagcatctggctcaactcgaatcatcaccagattgcggaatccagatagcaaacttagtcagctgaagagccagcaggtggcagccgctgcacatgaagcaaataaattatttaaggagggcaaagaggtactggtagttaactctcaaggagaaatttcacggttgagcaccaaaaaggaagtgatcatgaaaggaaatatcaacaattattttaaattgggtcaagaagggaagtatcgcgtctaccacaatcaatactccaccaattcatttgctttgaataagcaccagcacagagaagaccatgataagagaaggcatcttgcacataagttctgtctgactccagcaggagagttcaaatggaacggttctgtccatgggtccaaagttcttaccatatctactctgagactgactatcacccaattagaaacaacatcccttcatccttccttcatcccaactgggcatcacatagggcaaattggatcaaggcagttcagatgtgtagcaaacccagagaatttgcattggctttagccattttggagtgtgcagttaaaccagttgtgatgctaccaatatggcgagaatctttaggacataccaggttacaccggatgacatcaattgaaagagaagaaaaggagaaagtcaaaaaaaaa

SEQ ID NO: 2425 - protein, 810 aa, Homo sapiens [sequence omitted]

SEQ ID NO: 2426 - DNA, 4320 bp, Homo sapiens
ccggactcgaggtggccgatgtgacagcatgggggtggactttgatgtgaagactttctgccacaacttgcgggcgactaagccaccatacgagtgcccggtggagacctgccgaaaggtctacaagagttacagtggtattgagtaccacctgtaccactatgaccacgacaacccaccacccccacaacaaactccactccgcaagcacaagaaaaaggggcgccagtcacgcccagccaacaagcagtcacccagcccctcagaggtctcacagtcaccaggccgtgaggtgatgagctatgcacaggcccagcgcatggtggaggtggacttgcatggccgcgtccaccgcatcagcatctttgacaacctggatgtggtgtcagaggatgaggaagcccccgaggaggcccctgagaatggcagcaacaaggagaacactgagacaccagctgctactcccaagtcaggcaaacataagaacaaggagaagcgcaaggactccaaccatcaccaccaccacaatgtttctgcgagcaccactcccaagctgccagaggtggtctatcgggagctggaacaggacacccctgatgccccaccccggccaacttcctattaccggtacatcgagaagtctgcagaggagctggacgaggaagtagagtatgacatggacgaggaggactacatctggctggatatcatgaatgagcgtcggaagacagagggtgtaagtcccatcccgcaggagatctttgagtacctaatggaccgactggagaaggagtcgtactttgagagtcataataaaggcgaccctaatgcgctagtggacgaggatgctgtttgctgtatctgcaatgatggtgagtgccagaacagcaatgtcatcctcttctgtgacatgtgcaacctggaagtgcaccaggagtgctacggtgtcccctatatccctgagggccagtggctgtgccgccgttgcctgcagtcaccctctcgtgctgtggattgtgccctgtgccccaacaagggcggtgccttcaagcagacagatgacgggcgctgggcccatgtggtgtgtgccttgtggatccctgaggtctgcttcgccaacacggtcttcctagagcctattgacagcattgagcacatcccaccagctcgctggaagctcacctgctacatttgcaaacaacggggctcaggggcctgcatccagtgccacaaggccaactgttacacagctttccatgtgacatgcgcccagcaggctggcctttacatgaagatggagcctgtgcgggagacaggcgccaacggcacctctttcagtgtccgcaagacagcctactgcgacatccacacgcctccaggttcagcacgccgactgcctgccctgtcccacagcgagggtgaggaggatgaagatgaggaggaggatgagggtaagggctggagctcagagaaagtcaagaaggccaaggccaagtcccggatcaaaatgaagaaggcacggaagatcctggcagagaagcgggcagcagcacctgtggtgtcagtgccctgcatcccaccacacaggcttagtaaaatcaccaaccgcctgaccatccaaaggaagagccagttcatgcagaggctgcacagctactggacactgaagcggcagtcacggaatggggtcccattgctacgtcgcctgcagacacacctgcaatctcagaggaactgtgaccaagttgggagagattctgaggataagaactgggcccttaaagaacagctcaagtcctggcagcggctccggcatgacttggagcgagctcggctgctcgtggaattgatccgcaagcgggaaaaactcaaaagggagacgatcaaggttcagcagattgccatggagatgcagctgactcctttcctcatcctccttcgcaaaaccttggagcagctccaagagaaggacacaggcaacatcttcagcgagccggtccctctgtctgaggtacctgactacctagaccacatcaaaaagcccatggactttttcaccatgaagcagaacttggaggcttaccgctacctgaattttgatgattttgaggaggacttcaacctcatcgtcagcaactgcctcaagtataacgccaaggacaccatcttctaccgggcagcagtgcggcttcgtgagcagggtggtgctgtcgtccgccaggcccggcgccaggcagaaaaaatgggcattgactttgagacgggcatgcatatcccccacagcctggctggagatgaggccacacaccacactgaagatgcagccgaggaagagcggctggtcttgctggagaaccagaagcacctgccagtggaagaacagctaaagctgcttctggagcggctggacgaagtgaatgccagcaagcagagtgtgggccgctcacggcgtgcaaagatgatcaagaaagagatgacggcactgcggcggaagcttgcccatcagcgagagacgggacgtgatggccctgagcggcatggcccctcgagccggggtagtctgacaccccacccggcagcctgtgacaaggatgggcagacagatagtgcggcagaggagagcagcagccaggagacaagcaaaggcctgggtcccaacatgtcctcaacccccgcacatgaggtgggcaggagaacctcagttctgttctccaaaaagaacccgaagacagctggaccgcccaagaggccgggccggccccccaaaaaccgggagagccagatgacccccagccacggaggcagtcctgtggggcccccccagctccccatcatgagttccctgcgtcagcgcaagcggggtaggagcccccggcccagttcgagctcagacagcgacagtgataagtccacagaagaccccccaatggacttaccagccaatggcttcagcggtggaaaccaaccagtgaagaagagtttcttggtataccgtaatgactgcagccttccccggagcagctcagactctgagtccagcagcagtagcagtagcagcgctgcttcagaccggaccagcacaacgccctcaaaacaaggccggggcaaaccctccttctctcggggcactttcccagaggacagcagtgaggatacctcaggcactgagaatgaggcctactccgtgggcactggccgcggcgtgggccacagcatggtaaggaagagtctgggccggggagctggctggctgtcagaggatgaggactccccgctggatgctctggacctcgtgtgggccaaatgccgaggctatccatcatacccagctctgatcattgatccaaagatgccccgagaaggtatgttccaccatggggttcccatccctgtgcccccactggaggtgctgaaacttggggagcagatgacccaggaagcccgagagcatctctacctcgtcctcttctttgacaacaaacgaacctggcagtggctgcccaggaccaagctggttcctctgggtgtgaaccaggacctagacaaggagaagatgctggagggccgcaagtccaacatccgcaagtcagtacagatcgcctaccacagggctctgcagcaccgcagcaaggtgcaaggcgagcagagcagtgagaccagcgatagtgattgatactgctcaacacagcccaacctatagtgccctgtgacttctctcctcccctttgctcactgtcctggagtggcaccggcctctgcactgactcatttctggtcttggggccagtctcaggggaagctgggtgggggaggtccctcctgccctaagtgcagctggactgtacagaacactccaagggccaatggcagttcagcgcaaggagagggagggcccacaggtcagaaaaagctccagagacctcacagcattgtagggcggggtggtgggccaaagttaggacactgcgtaaaacaggccatcccaccacctctacctgctcatgccaggagaatccataactgcctagagcctggggccctaccggtcgtgaggtgagtgggcatctgtccagcctggaagaggggcactaggtgactccctcccctgctgttgtaaatactgtaattatcggagaatttaaattattctcatttgtaactgcgtttccgggtcgcgccagagtcatttggtactaaaaaaaaaaagactgggggctgtccccatttcccttctctttcccatagattcccccacctttcaaactggtttgtatttatttcaaaggaagaaaatatattgattcttagaaaataaaaaaa

SEQ ID NO: 2427 - protein, 1214 aa, Homo sapiens
MGVDFDVKTFCHNLRATKPPYECPVETCRKVYKSYSGIEYHLYHYDHDNPPPPQQTPLRKHKKKGRQSRPANKQSPSPSEVSQSPGREVMSYAQAQRMVEVDLHGRVHRISIFDNLDVVSEDEEAPEEAPENGSNKENTETPAATPKSGKHKNKEKRKDSNHHHHHNVSASTTPKLPEVVYRELEQDTPDAPPRPTSYYRYIEKSAEELDEEVEYDMDEEDYIWLDIMNERRKTEGVSPIPQEIFEYLMDRLEKESYFESHNKGDPNALVDEDAVCCICNDGECQNSNVILFCDMCNLEVHQECYGVPYIPEGQWLCRRCLQSPSRAVDCALCPNKGGAFKQTDDGRWAHVVCALWIPEVCFANTVFLEPIDSIEHIPPARWKLTCYICKQRGSGACIQCHKANCYTAFHVTCAQQAGLYMKMEPVRETGANGTSFSVRKTAYCDIHTPPGSARRLPALSHSEGEEDEDEEEDEGKGWSSEKVKKAKAKSRIKMKKARKILAEKRAAAPVVSVPCIPPHRLSKITNRLTIQRKSQFMQRLHSYWTLKRQSRNGVPLLRRLQTHLQSQRNCDQVGRDSEDKNWALKEQLKSWQRLRHDLERARLLVELIRKREKLKRETIKVQQIAMEMQLTPFLILLRKTLEQLQEKDTGNIFSEPVPLSEVPDYLDHIKKPMDFFTMKQNLEAYRYLNFDDFEEDFNLIVSNCLKYNAKDTIFYRAAVRLREQGGAVVRQARRQAEKMGIDFETGMHIPHSLAGDEATHHTEDAAEEERLVLLENQKHLPVEEQLKLLLERLDEVNASKQSVGRSRRAKMIKKEMTALRRKLAHQRETGRDGPERHGPSSRGSLTPHPAACDKDGQTDSAAEESSSQETSKGLGPNMSSTPAHEVGRRTSVLFSKKNPKTAGPPKRPGRPPKNRESQMTPSHGGSPVGPPQLPIMSSLRQRKRGRSPRPSSSSDSDSDKSTEDPPMDLPANGFSGGNQPVKKSFLVYRNDCSLPRSSSDSESSSSSSSSAASDRTSTTPSKQGRGKPSFSRGTFPEDSSEDTSGTENEAYSVGTGRGVGHSMVRKSLGRGAGWLSEDEDSPLDALDLVWAKCRGYPSYPALIIDPKMPREGMFHHGVPIPVPPLEVLKLGEQMTQEAREHLYLVLFFDNKRTWQWLPRTKLVPLGVNQDLDKEKMLEGRKSNIRKSVQIAYHRALQHRSKVQGEQSSETSDSD

SEQ ID NO: 2428 - DNA, 3198 bp, Homo sapiens
ggagggcttaaggaagtaaaatggcggacctggcgaacgaagaaaagcctgccattgctccgcccgtctttgtgtttcagaaggataaaggacaaaagtcccctgcagagcaaaaaaacttgtcggattcgggagaggagcctcggggggaggctgaggccccccaccatggcacgggtcaccccgagtcagctggcgagcatgccctagaacctcctgcccctgctggcgcctcagccagcactcctccgcctcccgctcctgaagcccagcttcctccttttccgcgagaactggcagggaggtcagctggcggctccagtcctgaaggcggagaagattctgacagagaagatggaaattactgccctcctgtcaagcgagaaagaacatcctctttaacccagttcccaccctcacagtcagaggaaaggagcagtggcttccggttgaagccaccaacgctgatccacggccaagcccccagcgcaggtctgccaagccagaagcccaaggagcagcagcggagcgtgcttcgcccggcagtgttacaagctccgcagccaaaggcgctgtcccagactgtccccagcagtggcaccaacggggtcagcctcccagcagactgcacgggggcagtgcccgcagcatcccctgacactgctgcatggagaagtccttccgaagctgccgatgaggagaaagagccccagaaaaatgagtccagcaatgcctctgaagaggaagcctgtgagaaaaaagaccccgccacacagcaagcctttgtatttgggcagaacttgagggacagagttaagctgataaatgagagcgtggacgaagccgacatggagaatgctggacaccccagcgcagacacgccaaccgcaacgaactatttcctccagtatatcagttccagtttagagaactcaaccaatagtgccgacgcctccagcaacaaatttgtatttggccagaacatgagcgagcgagttttgagccccccaaaattaaacgaggtcagttcagatgccaacagggaaaatgcagctgccgagtcagggtctgagtcctcgtcccaggaggccacccctgagaaagggtccctggctgagtcggcagccgcctacaccaaggcaacagcgcggaagtgtttgttggaaaaagtggaagtcatcaccggggaggaggcggagagcaatgtgttacagatgcagtgcaagctgtttgtctttgacaagacctcacagtcctgggtggagagaggccgggggctgctcagactcaatgacatggcgtccaccgatgacggcacactacagtcccgactagtgatgcggacccaggggagcctgcgactgatcctcaacaccaagctgtgggcccagatgcagatcgacaaggccagcgagaagagcattcgcatcacagccatggacaccgaggaccagggcgtgaaggtcttcctgatctcggccagctccaaggacacaggtcagttgtatgcagccctgcaccaccgcatcctggccctgcgcagccgcgtggagcaggagcaggaggccaagatgcccgcgcctgagcctggggcagccccatccaacgaggaggacgacagcgacgatgacgatgtcctggctccttcaggggccaccgcagctggtgctggtgacgaaggggacgggcagacgaccgggagcacatagcggccgggagcccggctgcacaccaggctgctgctttgtccgtctatccacccgcccacccgcccccaccccaccggcagcgtccaggtgcggggccgggaaccacacaccccactgggccggccacagtctggacccgcacgtcctgttcaaaagcagactcgggaactgcctgaatgtggtttgggacacgagacctcatcatattgatgagcgaacaaacaagaacatttcctccctcccctcctttgaattgaaatggcacattaagacttgtcacggcttctcactgggactggagacctcgttccttcaccccgcgtgtcgccagcctctgggtccagccagagcccctggcttctccgccacccacacccttcccaccctgctgtggggccctgcctttgtggggagcagccagccctctgcccctgcccagggctccccaactataggcctgggacccccgcccagcttggggggctgctcgtacgagtgtagacactgggcccattggacgtgctgttaactactatcttcatttcccacttcccctctctgattgggggtgtatattttacatctttttttctttttattttcgaaggctttgttttggtttcttaggttaagatgctctcgagcgttgagcaggcacagctctgtcgaggtccctgtcccccacctgtggttctggcctctgaggttgggggactacttgtttcccaccccaggttcctccaggccaagtcatggggtgatgaggagttggggccctgtctgtcctaggcctggagagtgcctgtctgggaaaaggtcactggacctggaagggtccccagggtcccctgactcccgtctccatctgtcacgtggttcaccatcatcaggcaccaggcgcaaactgcttcccgctgttggccatcccttccccagccacaggtgtccctgcccccaggacagtccagggccaggggcttctgtgagaggcagagggggaccctcaccaaatcttggtggaagagcccaggggctggtcccagaacaggcagtctcacaagcacgcagcacactggagtggacgcctgtgcccacccgagcctggagcatggccaagagccagcttgcaccacccacctgggaggccgaggaggaggtcccctgggcacagggcctctttgggacttcagaggaaatctcccagtcccactctcggagggttaagagaaggcctcctgcagctgtgccgtccacacctctaggtcgccagagccctgcccccagcccccagcaagcctgagcccgggaagaaccagaggccctcccgagagacccagtcacacgtctctgctttaagccttagccagctagtgacgagtacaacgagataacgcccatgtgttttggaacatttatgtaagattgtcatatgaaatgtatttgggaactacattaaacttttaactaaaaaaaaaaaaaaaaaaaaaaa

SEQ ID NO: 2429 - protein, 562 aa, Homo sapiens
MADLANEEKPAIAPPVFVFQKDKGQKSPAEQKNLSDSGEEPRGEAEAPHHGTGHPESAGEHALEPPAPAGASASTPPPPAPEAQLPPFPRELAGRSAGGSSPEGGEDSDREDGNYCPPVKRERTSSLTQFPPSQSEERSSGFRLKPPTLIHGQAPSAGLPSQKPKEQQRSVLRPAVLQAPQPKALSQTVPSSGTNGVSLPADCTGAVPAASPDTAAWRSPSEAADEEKEPQKNESSNASEEEACEKKDPATQQAFVFGQNLRDRVKLINESVDEADMENAGHPSADTPTATNYFLQYISSSLENSTNSADASSNKFVFGQNMSERVLSPPKLNEVSSDANRENAAAESGSESSSQEATPEKGSLAESAAAYTKATARKCLLEKVEVITGEEAESNVLQMQCKLFVFDKTSQSWVERGRGLLRLNDMASTDDGTLQSRLVMRTQGSLRLILNTKLWAQMQIDKASEKSIRITAMDTEDQGVKVFLISASSKDTGQLYAALHHRILALRSRVEQEQEAKMPAPEPGAAPSNEEDDSDDDDVLAPSGATAAGAGDEGDGQTTGST

SEQ ID NO: 2430 - DNA, 1868 bp, Homo sapiens
ggagggcttaaggaagtaaaatggcggacctggcgaacgaagaaaagcctgccattgctccgcccgtctttgtgtttcagaaggataaaggacaaaagaggtcagctggcggctccagtcctgaaggcggagaagattctgacagagaagatggaaattactgccctcctgtcaagcgagaaagaacatcctctttaacccagttcccaccctcacagtcagaggaaaggagcagtggcttccggttgaagccaccaacgctgatccacggccaagcccccagcgcaggtctgccaagccagaagcccaaggagcagcagcggagcgtgcttcgcccggcagtgttacaagctccgcagccaaaggcgctgtcccagactgtccccagcagtggcaccaacggggtcagcctcccagcagactgcacgggggcagtgcccgcagcatcccctgacactgctgcatggagaagtccttccgaagctgccgatgaggtgtgtgcacttgaggagaaagagccccagaaaaatgagtccagcaatgcctctgaagaggaagcctgtgagaaaaaagaccccgccacacagcaagcctttgtatttgggcagaacttgagggacagagttaagctgataaatgagagcgtggacgaagccgacatggagaatgctggacaccccagcgcagacacgccaaccgcaacgaactatttcctccagtatatcagttccagtttagagaactcaaccaatagtgccgacgcctccagcaacaaatttgtatttggccagaacatgagcgagcgagttttgagccccccaaaattaaacgaggtcagttcagatgccaacagggaaaatgcagctgccgagtcagggtctgagtccccgttccaggaggccacccctgagaaagagtccctggctgagtcggcagccgcctacaccaaggcaacagcgcggaagtgtttgttggaaaaagtggaagtcatcaccggggaggaggcggagagcaatgtgttacagatgcagtgcaagctgtttgtctttgacaagacctcacagtcctgggtggagagaggccgggggctgctcagactcaatgacatggcgtccaccgatgacggcacactacagtcccgactagtgatgcggacccaggggagcctgcgactgatcctcaacaccaagctgtgggcccagatgcagatcgacaaggccagcgagaagagcattcgcatcacagccatggacaccgaggaccagggcgtgaaggtcttcctgatctcggccagctccaaggacacaggtcagttgtatgcagccctgcaccaccgcatcctggccctgcgcagccgcgtggagcaggagcaggaggccaagatgcccgcgcctgagcctggggcagccccatccaacgaggaggacgacagcgacgatgacgatgtcctggctccttcaggggccaccgcagctggtgctggtgacgaaggggacgggcagacgaccgggagcacatagcggccgggagcccggctgcacaccaggctgctgctttgtccgtctatccacccgcccacccgcccccaccccaccggcagcgtccaggtgcggggccgggaaccacacaccccactgggccggccacagtctggacccgcacgtcctgttcaaaagcagactcgggaactgcctgaatgtggtttgggacacgagacctcatcatattgatgagcgaacaaacaagaacatttcctccctcccctcctttgaattgaaatggcacattaagacttgtcacggcttctcactgggactggagacctcgttccttcaccctgcgtgtcgccagcctctgggcaaaaaaaa

SEQ ID NO: 2431 - protein, 499 aa, Homo sapiens
MADLANEEKPAIAPPVFVFQKDKGQKRSAGGSSPEGGEDSDREDGNYCPPVKRERTSSLTQFPPSQSEERSSGFRLKPPTLIHGQAPSAGLPSQKPKEQQRSVLRPAVLQAPQPKALSQTVPSSGTNGVSLPADCTGAVPAASPDTAAWRSPSEAADEVCALEEKEPQKNESSNASEEEACEKKDPATQQAFVFGQNLRDRVKLINESVDEADMENAGHPSADTPTATNYFLQYISSSLENSTNSADASSNKFVFGQNMSERVLSPPKLNEVSSDANRENAAAESGSESPFQEATPEKESLAESAAAYTKATARKCLLEKVEVITGEEAESNVLQMQCKLFVFDKTSQSWVERGRGLLRLNDMASTDDGTLQSRLVMRTQGSLRLILNTKLWAQMQIDKASEKSIRITAMDTEDQGVKVFLISASSKDTGQLYAALHHRILALRSRVEQEQEAKMPAPEPGAAPSNEEDDSDDDDVLAPSGATAAGAGDEGDGQTTGST

SEQ ID NO: 2432 - DNA, 2672 bp, Homo sapiens
tctagaaagatcacttgtaacttgacccacgagccctggaaagttcctttaaagagaggctgtctgagcagggaggttgggacccctgactgtgagcgtcgtgtgttcagaaaagtgggcagtggtggcacgggagcaggctaggcggggtgcatcgggcgggctccatgcccagcagtagcgcacttggttcagcctgtctgtccttcatgttctggcccccacataccacagtgttcgccccagttagcagggtggctgcattccagcggcgcgctgctagtgagccggctgctagtgaggctgccggggatgctgcacagggcagggcacatgcaagggtccttgtcccatctgcctttggcagagggacttcctcagcatggctgttttgaaaaacaggtgcaaaatgtgcctgtacgtgaccccacaccgagtcctgagcctccaggtagctgcctgtgaatgcactgctctcctcccacagtctccacttgactgttgagtctgccggcgccccgccacgttactgtgctaactggattaattcacaggcgtcggtcactgggagtttcatgtaatcacatgtaaaaataacagtagccagatctcctggccagctgttaaaaaaagacctcaagtttttaaaaaagtgcttccctgcaaagtctagcctgcaaggggcatgaaatgggatgccaggggtcagtctctgaagcgcctgggggcaggcaggggtccacgggcactgggaaggccgccttctgttcctaggtctgccaagccagaagcccaaggagcagcagcggagcgtgcttcgcccggcagtgttacaagctccgcagccaaaggcgctgtcccagactgtccccagcagtggcaccaacggggtcagcctcccagcagactgcacgggggcagtgcccgcagcatcccctgacactgctgcatggagaagtccttccgaagctgccgatgaggtgtgtgcacttgaggagaaagagccccagaaaaatgagtccagcaatgcctctgaagaggaagcctgtgagaaaaaagaccccgccacacagcaagcctttgtatttgggcagaacttgagggacagagttaagctgataaatgagagcgtggacgaagccgacatggagaatgctggacaccccagcgcagacacgccaaccgcaacgaactatttcctccagtatatcagttccaggtgtgtgtctcggtgtcagcggccagcctggcatggcgatgcaggtggccgcgagggcttctgccagagaggggtctgtggtccccgtgcccgactcaggcccagaatccaggttgctctcaggcccctctctctcattccccactctgggcacaaccttgggtgggccagggtggtgggccttgtcctgggattcactggacgcctgagacaggaccagagttctgtggggttgtccaggggcccatggaggctacagcccagcccttggagtgtgccctctgtcttgtggacctcatgcccagagcagaacagacgaggccagaggcgactcaggcgcccccttattctgggtttgggcacctggggcaaagacctcatcatgtccttgactgacatggctgggggtaaagctacccacggaccagctgcccctccaggtgtctcagaagaaagcgtgtcccgactgggagatgggcgggtagagcaggtggaaggtggcttccctcatgctgtggggcccctccatcagggcgagctaagggttaatgttttcaatggcacagggaggtgtgtggcttcctgcctctgacacgccaccccgtgcacagtggcggaggcccctccactgtgccctctgtgtcagtgtgtgctccatgggtacccatacatttgcctggccacgttcccacgtgacgcccacactcattgcacatcttctcttcagtttagagaactcaaccaatagtgccgacgcctccagcaacaaatttgtatttggccagaacatgagcgagcgagttttgagccccccaaaattaaacgaggtcagttcagatgccaacagggaaaatgcagctgccgagtcagggtctgagtcctcgtcccaggaggccacccctgagaaagagtccctggctgagtcggcagccgcctacaccaaggcaacagcgcggaagtgtttgttggaaaaagtggaagtcatcaccggggaggaggcggagagcaatgtgttacagatgcagtgcaagctgtttgtctttgacaagacctcacagtcctgggtggagagaggccgggggctgctcagactcaatgacatggcgtccaccgatgacggcacactacagtcccgactaggtgagctgccgacggcgggggctgtggccgggtccccatggggagggctggggactatgcaattccaaagggaatgaagcgggggagatcctgaccctacccttgtgagagtcaaggcacagagtcggtctcccatgagagccgccccccaaacccccctccctgcacccagccctcaacaccaccctcacacactggctccagctgccagctcgtccgtgaccctcttagtgtcaaaatggacaaaagtctatggaagtttttaagctgattttctgacaaagtggcaggtttatgataaaaaaaaaaaaaa

SEQ ID NO: 2433 - protein, 221 aa, Homo sapiens
MENAGHPSADTPTATNYFLQYISSRCVSRCQRPAWHGDAGGREGFCQRGVCGPRARLRPRIQVALRPLSLIPHSGHNLGWARVVGLVLGFTGRLRQDQSSVGLSRGPWRLQPSPWSVPSVLWTSCPEQNRRGQRRLRRPLILGLGTWGKDLIMSLTDMAGGKATHGPAAPPGVSEESVSRLGDGRVEQVEGGFPHAVGPLHQGELRVNVFNGTGRCVASCL

SEQ ID NO: 2434 - DNA, 2439 bp, Homo sapiens
aggaagtaaaatggcggacctggcgaacgaagaaaagcctgccattgctccgcccgtctttgtgtttcagaaggataaaggacaaaagtcccctgcagagcaaaaaaacttgtcggattcgggagaggagcctcggggggaggctgaggccccccaccatggcacgggtcaccccgagtcagctggcgagcatgccctagaacctcctgcccctgctggcgcctcagccagcactcctccgcctcccgctcctgaagcccagcttcctccttttccgcgagaactggcagggaggtcagctggcggctccagtcctgaaggcggagaagattctgacagagaagatggaaattactgccctcctgtcaagcgagaaagaacatcctctttaacccagttcccaccctcacagtcagaggaaaggagcagtggcttccggttgaagccaccaacgctgatccacggccaagcccccagcgcaggtctgccaagccagaagcccaaggagcagcagcggagcgtgcttcgcccggcagtgttacaagctccgcagccaaaggcgctgtcccagactgtccccagcagtggcaccaacggggtcagcctcccagcagactgcacgggggcagtgcccgcagcatcccctgacactgctgcatggagaagtccttccgaagctgccgatgaggtgtgtgcacttgaggagaaagagccccagaaaaatgagtccagcaatgcctctgaagaggaagcctgtgagaaaaaagaccccgccacacagcaagcctttgtatttgggcagaacttgagggacagagttaagctgataaatgagagcgtggacgaagccgacatggagaatgctggacaccccagcgcagacacgccaaccgcaacgaactatttcctccagtatatcagttccagtttagagaactcaaccaatagtgccgacgcctccagcaacaaatttgtatttggccagaacatgagcgagcgagttttgagccccccaaaattaaacgaggtcagttcagatgccaacagggaaaatgcagctgccgagtcagggtctgagtcctcgtcccaggaggccacccctgagaaagagtccctggctgagtcggcagccgcctacaccaaggcaacagcgcggaagtgtttgttggaaaaagtggaagtcatcaccggggaggaggcggagagcaatgtgttacagatgcagtgcaagctgtttgtctttgacaagacctcacagtcctgggtggagagaggccgggggctgctcagactcaatgacatggcgtccaccgatgacggcacactacagtcccgactagtgatgcggacccaggggagcctgcgactgatcctcaacaccaagctgtgggcccagatgcagatcgacaaggccagcgagaagagcattcgcatcacagccatggacaccgaggaccagggcgtgaaggtcttcctgatctcggccagctccaaggacacaggtcagttgtatgcagccctgcaccaccgcatcctggccctgcgcagccgcgtggagcaggagcaggaggccaagatgcccgcgcctgagcctggggcagccccatccaacgaggaggacgacagcgacgatgacgatgtcctggctccttcaggggccaccgcagctggtgctggtgacgaaggggacgggcagacgaccgggagcacatagcggccgggagcccggctgcacaccaggctgctgctttgtccgtctatccacccgcccacccgcccccaccccaccggcagcgtccaggtgcggggccgggaaccacacaccccactgggccggccacagtctggacccgcacgtcctgttcaaaagcagactcgggaactgcctgaatgtggtttgggacacgagacctcatcatattgatgagcgaacaaacaagaacatttcctccctcccctcctttgaattgaaatggcacattaagacttgtcacggcttctcactgggactggagacctcgttccttcaccccgcgtgtcgccagcctctgggtccagccagagcccctggcttctccgccacccacacccttcccaccctgctgtggggccctgcctttgtggggagcagccagccctctgcccctgcccagggctccccaactataggcctgggacccccgcccagcttggggggctgctcgtacgagtgtagacactgggcccattggacgtgctgttaactactatcttcatttcccacttcccctctctgattgggggtgtatattttacatctttttttctttttattttcgaaaaaaaaaaaaaaaaaaaaaaaaaaaaaaaaaaaaaaaaaaaaaaaaaaaaaaaaaaaaaaaaaaaaaaaaaaaaaaaaaaaaaaaaaaaaaaaaaaaaaaaaaaaaaaaaaaaaaaaaa

SEQ ID NO: 2435 - protein, 567 aa, Homo sapiens
MADLANEEKPAIAPPVFVFQKDKGQKSPAEQKNLSDSGEEPRGEAEAPHHGTGHPESAGEHALEPPAPAGASASTPPPPAPEAQLPPFPRELAGRSAGGSSPEGGEDSDREDGNYCPPVKRERTSSLTQFPPSQSEERSSGFRLKPPTLIHGQAPSAGLPSQKPKEQQRSVLRPAVLQAPQPKALSQTVPSSGTNGVSLPADCTGAVPAASPDTAAWRSPSEAADEVCALEEKEPQKNESSNASEEEACEKKDPATQQAFVFGQNLRDRVKLINESVDEADMENAGHPSADTPTATNYFLQYISSSLENSTNSADASSNKFVFGQNMSERVLSPPKLNEVSSDANRENAAAESGSESSSQEATPEKESLAESAAAYTKATARKCLLEKVEVITGEEAESNVLQMQCKLFVFDKTSQSWVERGRGLLRLNDMASTDDGTLQSRLVMRTQGSLRLILNTKLWAQMQIDKASEKSIRITAMDTEDQGVKVFLISASSKDTGQLYAALHHRILALRSRVEQEQEAKMPAPEPGAAPSNEEDDSDDDDVLAPSGATAAGAGDEGDGQTTGST

SEQ ID NO: 2436 - DNA, 5007 bp, Homo sapiens
ggggcgcccgcgggccggagccggggcgggggccggggcctaggcgcgcggacctgcgagcggacccgagaggcggcggcggcgcagcggaacggcagagcgggccggaggcggccgaggcgcccggcgcaggcacccgtgcctcccctctgccaggaaccttggggccttgtgtgtgaccaggacctggtggcccccgggcggtggcagagcccctgtcccaagctgcttcctgccggcacctctgatcaagtgcctagagggatgtgtgtgccagccctcggtccagtgcccgctcctgagctgactcctgctgggccccgacagcttgccgtgtttcctgtgcctgtagctccctggttggatagctgccgcccgggagaggtgacccgggcgccctgctagggtgaaggcccctgccctcggcccgggatcatgaaaggcctcggtgacagccgcccccgccacctctccgacagcctagacccaccccacgagcccctgtttgcagggaccgaccgcaacccctacctgctgtcgcccacggaggccttcgcccgcgaggcccgcttccccgggcagaacaccctgccaggagatggcctctttcccctcaacaaccagctgcccccgcccagcagcacctttccccgcatccactacaactcccacttcgaggtgccagaggagagccccttccccagccatgcccaagccaccaagatcaaccggctgcccgccaacctcctggaccagtttgagaagcagctgcccatccaccgtgatggcttcagcaccctccaatttccccgtggcgaggccaaggcccgtggtgagagccctggccgcatccgccacctggtccactcagtccagcggcttttcttcaccaaggcaccctcactggagggcacagcgggcaaggtcggtggcaatggcagcaagaagggtggcatggaggacggcaagggccggagggccaaaagcaaggagcgggccaaggctggggagcccaaacggcgcagccgctccaacatctcaggctggtggagctccgatgacaacttggacggcgaggccggcgccttccgcagcagtggcccagcctctgggctgatgatactaggccgccaggcagaacgcagccagccacgctacttcatgcacgcctacaacaccatcagtgggcacatgctcaaaaccaccaagaacaacactactgagctgactgccccaccacccccgcccgcacccccagccacctgccccagccttggggtgggcactgacaccaactacgtcaaacggggctcctggtccactctgaccctcagccacgcccacgaggtctgccagaagacctcagccaccttggataagagcctgctcaagtccaaatcctgccaccagggtctagcctaccattacctgcaggtgcccggcggcggcggcgagtggagcaccacgctgctgtccccacgcgagacggatgccgcggccgagggccctatcccgtgccggcgcatgcgcagcggcagctacatcaaggccatgggcgacgaggacagcgacgagtccggcggcagccccaagccctcacccaagaccgcggcgcggcgccagagctatctgagggccacgcagcagtcgctgggagagcagagcaacccccgcaggagtctggaccgcctggattcagtggacatgctgctgccctccaagtgtccgagctgggaagaggactacacccccgtcagcgacagcctcaacgactccagctgcatcagccagatttttggacaggcctccctgatcccccagttgtttggccatgagcagcaggtacgggaggcagagctgagtgaccagtatgaggcggcctgcgagtcagcctgcagtgaagcggagtccacagcggcagagacgcttgacttgccactgcccagctacttccgctcccgcagccacagctacctgcgtgccatccaggcaggctgctcgcaggaggaggacagtgtctccctgcagtccctctccccaccgcccagtaccggcagcctcagcaatagtcgcacgcttccgagttcatcatgcctagtggcgtataagaagaccccgccaccggtccctccacgcaccacttcaaagccgttcatctcagtcacagtccagagcagtactgagtctgcccaggacacctacctggacagccaggaccacaagagcgaggtgactagccagtcgggcctgagcaactcgtcggacagcctggacagcagtacccgaccgcccagcgtgacacggggtggagtcgccccagcccctgaggccccagagccacccccaaaacatgcagctctgaaaagtgaacaagggacgctgaccagctctgagtcccaccccgaggccgcccccaaaaggaaactgtcatcgataggaatacaagagaggactagaaggaacggttcccacctctcggaggacaacggacccaaagcgatcgatgtgatggcaccctcctcagaaagcagcgtcccctctcacagtatgtcctcccgacgggacacagactcggatacccaggatgccaatgactcaagctgtaagtcatctgagaggagcctcccggactgtacccctcaccccaactccatcagcatcgatgccggtccccggcaggcccccaagattgcccagatcaagcgcaacctctcctatggagacaacagcgaccctgccctagaggcgtcctcgctgcccccacccgacccctggctcgagacctcctccagctccccagcagagccggcacagccaggggcctgccgccgagacggctactggttcctaaagctactgcaggcagaaacagagcggctggaaggctggtgctgccagatggacaaggagaccaaagagaacaacctctctgaagaagtcttaggaaaagtcctcagtgctgtgggcagtgcccagctactgatgtcccagaaattccagcagttccggggcctctgtgagcaaaacttgaaccctgatgccaacccacgccccacagcccaggacctggcagggttctgggacctgctacagctgtccatcgaggatatcagcatgaagttcgatgaactctaccacctcaaggccaacagctggcagctggtggagacccccgagaagaggaaggaagagaagaaaccaccccctccggtcccaaagaagccagccaaatccaagccggcagtgagccgcgacaaggcctcagacgccagcgacaagcagcgccaggaggcccgcaagagactcctggcggccaagcgggcagcttctgtgcggcagaactcagccaccgagagcgcagacagcatcgagatttatgtcccggaggcccagaccaggctctgagaccatgcaggaggaaagaaacgattttaaatcattaaaaacacaaaaactaagtgcgaacggaacagagttttctcaacctttgctatggttattctgtctagagaccctgagccaactttcaaattgacgcatacaagggctcacaatttggcttttttgggtccctcccagctttaggttatgaagattttactcacaaaaaaaatcaacaaaaatcacgaaactagaaaactttttttttcctcttgctggccgtggtggactagatagatggacgtcggcaactcccggcccagcctccatactgcggtctttttactcgttctatctgatgagaactcacactagcttgtttacaagatgacgacagtccaagggcagccttgggcacctgccatgtccctcctttccccagctatccccgctctgaccttgattttcattcttatgtttttctcttttcccttcagagctcacacagtggtcaccattgtggcaagcggctttctgggtctcagccctctctgcggttgagggcccagaggacagagagatggacatgcgtcccctccctccccccgccaagtgctcacacacaacctcacgcgcacacacacacacgcagatggaggcgcctcactgggaggtgccccgccagccctgggcagtgtcaggcaggactcactcaccgctgagcagatgagagaagttttagtcttggcgggtggaaatgagacgaagccacagttatcacactccagactcctgcccttttattttctccagccccttcttccttcagcaaaatctaggactcccgagtggcttccagggggccgtcagtcctcagccgcgcctgtgtccggtgcccgaggggcgggcggcggtgtctgtatgtatgtgtacatatgcacatagaccttagagtgtatagttaacaaacgcccatctgctcacccatgcccacccagcgccgccgccgctggctctcggggcacctggcaggaggcgggtgtgtgaatagcatatatttttacatgtactatatctaggtgtgtgtacaagtgtgtgtaaaaatatataccttgtgtgtaagcagccctttttttttttggtctccacccccctccccccgccccgcactcctaagggcccatctgcccagcctctgagttttctgttctattttttttttaaccccaattatccttctctctctcctgcccccgcatcccactcccagggtgtcacgagccctgagctgcaatggcccgggcctgcagggcggggtaggggagggcaggggctcagccccgaagccagctcagtacctgaggggctgctctatgctgtgtatgcgcctctctggcatccgagacatcctcttggctggcgcttgctgcaggggggaccccccccccgtccccaggtgaaccaagggtctgctccggggcccatttccagcttggccgccgtctgtgaccttgggcaagtcacttgacctctgtgtgcctcaacttcctcctctgtaaaacggggacagtccctgcccctccctacctcacaggcatgttgtgagaataaatgaggtaacgtgta

SEQ ID NO: 2437 - protein, 989 aa, Homo sapiens
MKGLGDSRPRHLSDSLDPPHEPLFAGTDRNPYLLSPTEAFAREARFPGQNTLPGDGLFPLNNQLPPPSSTFPRIHYNSHFEVPEESPFPSHAQATKINRLPANLLDQFEKQLPIHRDGFSTLQFPRGEAKARGESPGRIRHLVHSVQRLFFTKAPSLEGTAGKVGGNGSKKGGMEDGKGRRAKSKERAKAGEPKRRSRSNISGWWSSDDNLDGEAGAFRSSGPASGLMILGRQAERSQPRYFMHAYNTISGHMLKTTKNNTTELTAPPPPPAPPATCPSLGVGTDTNYVKRGSWSTLTLSHAHEVCQKTSATLDKSLLKSKSCHQGLAYHYLQVPGGGGEWSTTLLSPRETDAAAEGPIPCRRMRSGSYIKAMGDEDSDESGGSPKPSPKTAARRQSYLRATQQSLGEQSNPRRSLDRLDSVDMLLPSKCPSWEEDYTPVSDSLNDSSCISQIFGQASLIPQLFGHEQQVREAELSDQYEAACESACSEAESTAAETLDLPLPSYFRSRSHSYLRAIQAGCSQEEDSVSLQSLSPPPSTGSLSNSRTLPSSSCLVAYKKTPPPVPPRTTSKPFISVTVQSSTESAQDTYLDSQDHKSEVTSQSGLSNSSDSLDSSTRPPSVTRGGVAPAPEAPEPPPKHAALKSEQGTLTSSESHPEAAPKRKLSSIGIQERTRRNGSHLSEDNGPKAIDVMAPSSESSVPSHSMSSRRDTDSDTQDANDSSCKSSERSLPDCTPHPNSISIDAGPRQAPKIAQIKRNLSYGDNSDPALEASSLPPPDPWLETSSSSPAEPAQPGACRRDGYWFLKLLQAETERLEGWCCQMDKETKENNLSEEVLGKVLSAVGSAQLLMSQKFQQFRGLCEQNLNPDANPRPTAQDLAGFWDLLQLSIEDISMKFDELYHLKANSWQLVETPEKRKEEKKPPPPVPKKPAKSKPAVSRDKASDASDKQRQEARKRLLAAKRAASVRQNSATESADSIEIYVPEAQTRL

SEQ ID NO: 2438 - DNA, 1264 bp, Homo sapiens
ggcacgaggggaggccggggcggggcgggcgcagccggcgctgagcttgcagggccgctcccctcacccgcccccttcgagtccccgggcttcgccccacccggcccgtgggggagtatctgtcctgccgccttcgcccacgccctgcactccgggaccgtccctgcgcgctctgggcgcaccatggcccgcggggctgcgctggcgctgctgctcttcggcctgctgggtgttctggtcgccgccccggatggtggtttcgatttatccgatgcccttcctgacaatgaaaacaagaaacccactgcaatccccaagaaacccagtgctggggatgactttgacttaggagatgctgttgttgatggagaaaatgacgacccacgaccaccgaacccacccaaaccgatgccaaatccaaaccccaaccaccctagttcctccggtagcttttcagatgctgaccttgcggatggcgtttcaggtggagaaggaaaaggaggcagtgatggtggaggcagccacaggaaagaaggggaagaggccgacgccccaggcgtgatccccgggattgtgggggctgtcgtggtcgccgtggctggagccatctctagcttcattgcttaccagaaaaagaagctatgcttcaaagaaaatgcagaacaaggggaggtggacatggagagccaccggaatgccaacgcagagccagctgttcagcgtactcttttagagaaatagaagattgtcggcagaaacagcccaggcgttggcagcagggttagaacagctgcctgaggctcctccctgaaggacacctgcctgagagcagagatggaggccttctgttcacggcggattctttgttttaatcttgcgatgtgctttgcttgttgctgggcggatgatgtttactaacgatgaattttacatccaaagggggataggcacttggacccccattctccaaggcccgggggggcggtttcccatgggatgtgaaaggctggccattattaagtccctgtaactcaaatgtcaaccccaccgaggcacccccccgtcccccagaatcttggctgtttacaaatcacgtgtccatcgagcacgtctgaaacccctggtagccccgacttctttttaattaaaataaggtaagcccttcaatttgtttcttcaatatttctttcatttgtagggatatttgtttttcatatcagactaataaaaagaaattagaaaccaaaaaaaaaaaaaaaaaaaa

SEQ ID NO: 2439 - protein, 185 aa, Homo sapiens
MARGAALALLLFGLLGVLVAAPDGGFDLSDALPDNENKKPTAIPKKPSAGDDFDLGDAVVDGENDDPRPPNPPKPMPNPNPNHPSSSGSFSDADLADGVSGGEGKGGSDGGGSHRKEGEEADAPGVIPGIVGAVVVAVAGAISSFIAYQKKKLCFKENAEQGEVDMESHRNANAEPAVQRTLLEK

SEQ ID NO: 2440 - DNA, 2214 bp, Homo sapiens
gttgactggaggcggaggttgcagtgagccgagatcgccccactgcactccagcctggtgactccgtctcaaaaaaaaggggaggggggcgggggagagttgaaagcttaatatgtactttgggggctattaaagcaaacatttcgactaaaggggcgaatcctcgaattgtgcgatcaagcacccgagaggagagttggggggggtcaggaggggtgggggctccagggaacgcccgggggcctgggccggggtctcgcggggcccttccggaaggatcgcggcccccgaaggtgggcgtcccgcggggctccagtctccaggacgttccgggaggctccgcgctctgggaggccggctgcgtggggtccccgcgctgcagccgcagaggccccccagggccgcggttcccggagcgggaaagtcccgcgcgggggcggtggcctcgggggcgggacggggcgggggcgggggcgcgggcggccgagccgaatcccctccaccgggacgccccgctgccgctcgggaagaggcgggccctgcgcgccctgcgctcgccatggcggtttgggcggcgacgtgagcggctccgcggaccccgagcggggccccggccgcgacctgagccgccgccgagcgcccggggccatgcgaccgacgctgctgtggtcgctgctgctgctgctcggagtcttcgccgccgccgccgcggccccgccagaccctctttcccagctgcccgctcctcagcacccgaagattcgcctgtacaacgcagagcaggtcctgagttgggagccagtggccctgagcaatagcacgaggcctgttgtctaccgagtgcagtttaaatacaccgacagtaaatggttcacggccgacatcatgtccataggggtgaattgtacacagatcacagcaacagagtgtgacttcactgccgccagtccctcagcaggcttcccaatggatttcaatgtcactctacgccttcgagctgagctgggagcactccattctgcctgggtgacaatgccttggtttcaacactatcggaatgtgactgtcgggcctccagaaaacattgaggtgaccccaggagaaggctccctcatcatcaggttctcctctccctttgacatcgctgatacctccacggcctttttttgttattatgtccattactgggaaaaaggaggaatccaacaggtcaaaggccctttcagaagcaactccatttcattggataacttaaaaccctccagagtgtactgtttacaagtccaggcacaactgctttggaacaaaagtaacatctttagagtcgggcatttaagcaacatatcttgctacgaaacaatggcagatgcctccactgagcttcagcaagtcatcctgatctccgtgggaacattttcgttgctgtcggtgctggcaggagcctgtttcttcctggtcctgaaatatagaggcctgattaaatactggtttcacactccaccaagcatcccattacagatagaagagtatttaaaagacccaactcagcccatcttagaggccttggacaaggacagctcaccaaaggatgacgtctgggactctgtgtccattatctcgtttccggaaaaggagcaagaagatgttctccaaacgctttgaaccaaagcatgggcctagcccactggctccctggaagagatcaagccatcggagctgctagagttctgtctggactttccagagaccagtattcccttttgctgcctctaaaaggcctgtccctgcagacatgagagacagcaggtctcatgggggtgacaagcttttttttttttttcttaaagaattttcaaaatcaaattccagaatgattttacggagatatcccaggaaaattaaggcttctcttaaacactaaaaaggcatgtaattgcttgttagcaaaatggatatgacacatctctgatacttttttcattattggttgggctgagcagtcagaagacctggtcgtcgtcttgactttggcaaatgagccggagccccttgggcaggtcacacaacctgtcccagcgagggacactgagtggcccttcatgtacatccatggtgtgctggcttaaaatgtaattaatcttgtaaatatactcctagtaatttaagattttgtttttaaactggaaataaaagattgtatagtgcatgtttttt

SEQ ID NO: 2441 - protein, 337 aa, Homo sapiens
MRPTLLWSLLLLLGVFAAAAAAPPDPLSQLPAPQHPKIRLYNAEQVLSWEPVALSNSTRPVVYRVQFKYTDSKWFTADIMSIGVNCTQITATECDFTAASPSAGFPMDFNVTLRLRAELGALHSAWVTMPWFQHYRNVTVGPPENIEVTPGEGSLIIRFSSPFDIADTSTAFFCYYVHYWEKGGIQQVKGPFRSNSISLDNLKPSRVYCLQVQAQLLWNKSNIFRVGHLSNISCYETMADASTELQQVILISVGTFSLLSVLAGACFFLVLKYRGLIKYWFHTPPSIPLQIEEYLKDPTQPILEALDKDSSPKDDVWDSVSIISFPEKEQEDVLQTL

SEQ ID NO: 2442 - DNA, 4365 bp, Homo sapiens
ctgcaacctccgcctcccgggttcaagaagtttccctaccttaggctcctgagtagctgggactacaggattacagtttaaagacaatttctgtgatcaagttgtcatttggaagattaaacccatttcacgaggacttggagcctggtccttgctttgaggaagcagtggcttgtttcaagaagccacttctgatctaagaatctacccagcatgcctaatcaaggagaagactgctatttttttttctattccacatgtaccaaaggcgacagctgcccattccgtcactgtgaagctgcaataggaaatgaaactgtttgcacattatggcaagaagggcgctgttttcgacaggtgtgcaggtttcggcacatggagattgataaaaaacgcagtgaaattccttgttattgggaaaatcagccaacaggatgtcaaaaattaaactgcgctttccatcacaatagaggacgatatgttgatggccttttcctacctccgagcaaaactgtgttgcccactgtgcctgagtcaccagaagaggaagtgaaggctagccaactttcagttcagcagaacaaattgtctgtccagtccaatccttcccctcagctgcggagcgttatgaaagtagaaagttccgaaaatgttcctagccccacgcatccaccagttgtaattaatgctgcagatgatgatgaagatgatgatgatcagttttctgaggaaggtgatgaaaccaaaacacctaccctgcaaccaactcctgaagttcacaatggattacgagtgacttctgtccggaaacctgcagtcaatataaagcaaggtgaatgtttgaattttggaataaaaactcttgaggaaattaagtcaaagaaaatgaaggaaaaatctaagaagcaaggtgagggttcttcaggagtttccagtcttttactccaccctgagcccgttccaggtcctgaaaaagaaaatgtcaggactgtggtgaggacagtaactctctccaccaaacaaggagaagaacccttggttagattgagtcttactgagagactggggaaacgaaaattttcagcaggcggtgacagtgatcctccattaaagcgtagcctggcacagaggctagggaagaaagttgaagctccagaaactaacattgacaaaacaccaaagaaagctcaagtttccaagtctcttaaggagcgattaggcatgtcagctgatccagataatgaggatgcaacagataaagttaataaagttggtgagatccatgtgaagacattagaagaaattcttcttgaaagagccagtcagaaacgtggagaattgcaaactaaactcaagacagaaggaccttcaaaaactgatgattctacttcaggagcaagaagctcctccactatccgtatcaaaaccttctctgaggtcctggctgaaaaaaaacatcggcagcaggaagcagagagacaaaaaagcaaaaaggatacaacttgcatcaagctaaagattgatagtgaaattaaaaaaacagtagttttgccacccattgttgccagcagaggacaatcagaggagcctgcaggtaaaacaaagtctatgcaggaggtgcacatcaagacgctggaagaaattaaactggagaaggcactgagggtgcagcagagctctgagagcagcaccagctccccgtctcaacacgaggccactccaggggcaaggcggctgctgcgaatcaccaaaagaacagggatgaaagaagagaagaaccttcaggaaggaaatgaagttgattctcagagcagtattagaacagaagctaaagaggcttcaggtgagaccacaggagttgacatcactaaaattcaagtcaagagatgtgagaccatgagagagaagcacatgcagaaacagcaggagagggaaaaatcagtcttgacacctcttcggggagatgtagcctcttgcaatacccaagtggcagagaaaccagtgctcactgctgtgccaggaatcacacggcacctgaccaagcggcttcccacaaagtcatcccagaaggtggaggtagaaacctcagggattggagactcattattgaatgtgaaatgtgcagcacagaccttggaaaaaaggggtaaagctaaacccaaagtgaacgtgaagccatctgtggttaaagttgtgtcatcccccaaattggccccaaaacgtaaggcagtggagatgcacgctgctgtcattgccgctgtgaagccactcagctccagcagtgtcctacaggaacccccagccaaaaaggcagctgtggctgttgtcccgcttgtctctgaggacaaatcagtcactgtgcctgaagcagaaaatcctagagacagtcttgtgctgcctccaacccagtcctcttcagattcctcacccccggaggtgtctggcccttcctcatcccaaatgagcatgaaaactcgccgactcagctctgcctcaacaggaaagcccccactctctgtggaggatgattttgagaaactaatatgggagatttcaggaggcaaattggaagctgagattgacctggatcctgggaaagatgaagatgaccttctgcttgagctatcagaaatgattgatagctgaaggtggtagtgaggacactttaaaaaaaaaatcgccaaaaaactggacttagtttcatctattgtaacatttacctgagatgatcatttctttagtctagaatttgccccaaatcagaagtatacctctgaattatctgtatgtgtcctggattccttggggtcagatttttaaagttactttataaccattttgtccatttgatgccattgtttatcatcttttgagaaaaaagttctgtcatacccttctctccacaaaaaagagactgagagggagatcaagtgaaagggtgcaagcgaacttagtgactccttgaggtgtttgtcagttttggcttttttcttctttgttgtattctttatgtattgtcttgatgtacttaatattacctgagtttgaaatggatgaagacagctgctaccattaaggaccaaattttatgctaccactaaacaaaaatacccactcagtctgtgttaaattgtatgtctttttaaaggtatttaaagattcaactaagctttaaagagggctgagcagctcaggaagcctgtaatgtgggcataactctttggacctgatcttgatgcttctgctgctctgttagcctctgaagagcaatatctaatttattattactgtaattttttaaaaggctttaaagtgcctcaggggtcccctgaaactaattttctatttctgggattccctggattcattatatgagatggtgacatgattagaggaattcttttttagtatgaaaattgtcccttttcttcttcagtacttgcctccttgctggcattgaattaacacagggacaaaatttggttaattttttatttctaactctcccaacaaacccctgttgcccagtatttgtttggtggcctttaaccacctgagggaaaaaatgagcttattcaagctgccaatatttatctatgggctgtagcagtacactgaattgtactgtgccagggatattgagatgctctgggggtgtattgtatacctgccagttttcttcatttctgaattgagttttcttttcttgatgttggtttccttcatatcacctcaaggtttagatttgtgaaggaataagcatgatggaaataatagtcttgaaaggagatatgttgtatataatcaggaggaagaggaaggaaggacttacccattttgatattttgctgtaggtggccagttttgtttctcatagggaaatctgacccacctgtcatgttggctcctaaggaactgctgttgtaagcggctcatcaagagttgaacttcacgtagccttgttgggaatatggaaaaggaagaaagccacaggactgcccattcagtcttgggaagattgggatgattctgcacaagcaaaaatgactgaagtttatgtatagacacacctctaccaatccatcttcagctgactgaatgttgtatgatagcccttctccaaagcagaggtagaatgttcaggtttcaccatggattttctacttatttcgtttttggaatcaccttacagattccaggtcccttttgtatatattctttattcttttgcttttttaaaaaataattttgtttcatatttaaagcacttgtattagtcaatgtttcgtgttccgcattatttgaaccatttgcccttacagaaagagaaatacttgtttgtgttttaaataaaactgatgtagg

SEQ ID NO: 2443 - protein, 810 aa, Homo sapiens
MPNQGEDCYFFFYSTCTKGDSCPFRHCEAAIGNETVCTLWQEGRCFRQVCRFRHMEIDKKRSEIPCYWENQPTGCQKLNCAFHHNRGRYVDGLFLPPSKTVLPTVPESPEEEVKASQLSVQQNKLSVQSNPSPQLRSVMKVESSENVPSPTHPPVVINAADDDEDDDDQFSEEGDETKTPTLQPTPEVHNGLRVTSVRKPAVNIKQGECLNFGIKTLEEIKSKKMKEKSKKQGEGSSGVSSLLLHPEPVPGPEKENVRTVVRTVTLSTKQGEEPLVRLSLTERLGKRKFSAGGDSDPPLKRSLAQRLGKKVEAPETNIDKTPKKAQVSKSLKERLGMSADPDNEDATDKVNKVGEIHVKTLEEILLERASQKRGELQTKLKTEGPSKTDDSTSGARSSSTIRIKTFSEVLAEKKHRQQEAERQKSKKDTTCIKLKIDSEIKKTVVLPPIVASRGQSEEPAGKTKSMQEVHIKTLEEIKLEKALRVQQSSESSTSSPSQHEATPGARRLLRITKRTGMKEEKNLQEGNEVDSQSSIRTEAKEASGETTGVDITKIQVKRCETMREKHMQKQQEREKSVLTPLRGDVASCNTQVAEKPVLTAVPGITRHLTKRLPTKSSQKVEVETSGIGDSLLNVKCAAQTLEKRGKAKPKVNVKPSVVKVVSSPKLAPKRKAVEMHAAVIAAVKPLSSSSVLQEPPAKKAAVAVVPLVSEDKSVTVPEAENPRDSLVLPPTQSSSDSSPPEVSGPSSSQMSMKTRRLSSASTGKPPLSVEDDFEKLIWEISGGKLEAEIDLDPGKDEDDLLLELSEMIDS

SEQ ID NO: 2444 - DNA, 7164 bp, Homo sapiens
ctttcctcttggaagtggcgactgctgcggggctgagcggtgctcgcacgcgtctcgggagccaggttggcggcgcgatgaggcgcagcaaggccgatgtggagcggtacgtcgcctcggtgctgggtctcaccccgtcgcctcgacagaagtcaatgaaaggattctattttgcaaagctgtattatgaagctaaagaatatgatcttgctaaaaaatacatatgtacttacattaatgtgcaagagagggatcccaaagctcacagatttctgggtcttctttatgaattggaagaaaacacagagaaagccgttgaatgttacaggcgttcagtggaattaaacccaacacaaaaagatcttgtgttgaagattgcagaattgctttgtaaaaatgatgttactgatggaagagcaaaatactgggtcgaaagagcagcaaaacttttcccaggaagtcctgcaatttataaactaaaggaacagcttctagattgtgaaggtgaagatggatggaataaactttttgacttgattcagtcagaactttatgtaagacctgatgacgtccatgtgaacatccggctagtggaggtgtatcgctcaactaaaagattgaaggatgctgtggcccactgccatgaggcagagaggaacatagctttgcgttcaagtttagagtggaattcgtgtgttgtacagacccttaaggaatatctggagtctttacagtgtttggagtctgataaaagtgactggcaagcaaccaatacagacttactgctggcctatgctaatcttatgcttcttacgctttccactagagatgtgcaggaaaatagagaattactggaaagttttgatagtgctcttcagtctgcgaaatcttctttgggtggaaatgatgaactgtcagctactttcttagaaatgaaaggacatttctatatgtatgctggttctctgctcttgaagatgggtcagcatggtaataatgttcaatggcgagctctttctgagctggctgcattgtgctatctcatagcatttcaggttccaagaccaaagattaaattaagagaaggtaaagctggacaaaatctgctggaaatgatggcctgtgaccgactgagccaatcagggcacatgttgctaagcttaagtcgtggcaagcaagatttcttaaaagaggttgttgaaacttttgccaacaaaattgggcagtctgcgttatatgatgctctgttttctagtcagtcacctaaggatacatcttttcttggtagcgatgatattggaaaaattgatgtacaagaaccagagcttgaagatttggctagatacgatgttggtgctattcgagcacataatggtagtcttcagcatcttacttggcttggcttacagtggaattcattgcctgctttacctggaatccgaaaatggctaaaacagcttttccatcgtttgccccatgaaacctcaaggcttgaaacaaatgcgcctgaatcaatatgtattttagatcttgaagtatttctccttggagtagtatataccagccacttacaattaaaggagaaatgtaattctcaccatagctcctatcagccgttatgcctgccctttcctgtgtgtaaacagctttgtacagaaagacaaaaatcttggtgggatgcggtttgtactctgattcacagaaaagcagtacctggaaacttggcaaaattgagacttctagttcagcatgaaataaacactctaagagcccaggaaaaacatggccttcaacctgctctgcttgtacattgggcaaaataccttcagaaaacgggcagcggtcttaattctttttatggtcaactagaatacatagggagaagtgttcattattggaagaaagttttgccattgttgaagataataaagaagaacagtattcctgaacctattgatcctctgtttaaacattttcatagtgtagacattcaggcatcagaaattgttgaatatgaagaagacgcacacataacttttgctatgttggatgcagtaaatggaaatatagaagatgctgtgactgcttttgaatctataaaaagtgttgtttcttattggaatcttgcactgatttttcacaggaaggcagaagacattgaaaatgatgccctttctcctgaagaacaagaagaatgcagaaattatctgacaaagaccagggactacctaataaagattatagatgacggtgattcaaatctttcagtggtcaagaaattgcctgtgcccctggagtctgtaaaacagatgcttaattcagtcatgcaggaactcgaagactatagtgaaggaggtcctctctataaaaatggttctttgcgaaatgcagattcagaaataaaacattctacaccgtctcctaccaaatattcactatcaccaagtaaaagttacaagtattctcccgaaacaccacctcgatggacagaagatcggaattctttactgaatatgatttgccaacaagtagaggccattaagaaagaaatgcaggagttgaaactaaatagcagtaagtcagcatcccgtcatcgttggcccacagagaattatggaccagactcggtgcctgatggatatcaggggtcacagacatttcatggggctccactaacagttgcaactactggcccttcagtatattatagtcagtcaccagcatataattcccagtatcttctcagaccagcagctaatgttactcccacaaagggttcttctaatacagaatttaagtcaaccaaagaaggattttccatccctgtgtctgctgatggatttaaatttggcatttcggaaccaggaaatcaagaaaagaaaagggaaaagcctcttgaaaatgatactggcttccaggctcaggatattagtggccggaagaagggccgtggtgtgatttttggccaaacaagtagcacttttacatttgcagatgttgcaaaatcaacttcaggagaaggatttcagtttggcaaaaaagacctcaatttcaagggattttcaggtgctggagaaaaattattctcatcacgatacggtaaaatggccaataaagcaaacacttccggtgactttgagaaagatgatgatgcctataagactgaggacagcgatgacatccattttgaaccagtagttcaaatgcctgaaaaagtagaacttgtaacaggagaagaaggtgaaaaagttctgtattcacagggggtaaaactatttagatttgatgctgaggtaagtcagtggaaagaaaggggcttggggaacttaaaaattctcaaaaacgaggtcaatggcaaactaagaatgctgatgcgaagagaacaagtactaaaagtgtgtgctaatcattggataacgactacaatgaacctgaagcccctctctggatcagatagagcatggatgtggtcagccagtgatttctctgatggtgatgccaaactagagcggttggcagcaaaatttaaaacaccagagctggctgaagaattcaagcagaaatttgaggaatgccagcggcttctgttagacataccacttcaaactccccataaacttgtagatactggcagagctgccaagttaatacagagagctgaagaaatgaagagtggactgaaagatttcaaaacatttttgacaaatgatcaaacaaaagtcactgaggaagaaaataagggttcaggtacaggtgcggccggtgcctcagacacaacaataaaacccaatgctgaaaacactgggcccacattagaatgggataactatgacttaagggaagatgctttggatgatagtgtcagtagtagctcagtacatgcttctccattggcaagtagccctgtgagaaaaaatcttttccgctttgatgagtcaacaacaggatctaacttcagttttaaatctgctttgagtctatctaagtctcctgccaagttgaatcagagtgggacttcagttggcactgatgaagaatctgttgttactcaagaagaagagagagatggacagtactttgaacctgttgttcctttacctgatctagttgaagtatccagtggtgaggaaaatgaacaagttgtttttagtcacagggcagaaatctacagatatgataaagatgttggtcaatggaaagaaaggggcattggtgatataaagattttacagaattatgataataagcaagttcgtatagtgatgagaagggaccaagtattaaaactttgtgccaatcacagaataactccagacatgagtttgcaaaatatgaaagggacagaaagagtatgggtgtggactgcatgtgattttgcagatggagaaagaaaagtagagcatttagctgttcgttttaaactacaggatgttgcagactcgtttaagaaaatttttgatgaagcaaaaacagcccaggaaaaagattctttgataacacctcatgtttctcggtcaagcactcccagagagtcaccatgtggcaaaattgctgtagctatattagaagaaaccacaagagagaggacagatgttattcagggtgatgatgtagcagatgcagcttcagaagttgaagtgtctagcacatctgaaacaacaacaaaagcagtggtttctcctccaaagtttgtatttgtttcagagtctgttaaaagaatttttagtagtgaaaaatcaaaaccatttgtatttggcaacagttctgccactgggtctttgtttggatttagttttaatgcacctttgaaaagtaacaatagtgaaactagttcagtagcccagagtggatctgaaagcaaagtggaacctaaaaaatgtgaactgtcaaagaactctgatatcgaacagtcttcagatagcaaagtcaaaaatctctctgcttcctttccaacggaagaatcttcaatcaactacacatttaaaacaccagaaaaggagcctccattatggcatgctgaatttaccaaagaagaattggttcagaagctccgttccaccacaaaaagtgcagatcacttaaacggcctgcttcgggaaatagaggcaaccaatgcagtccttatggagcaaattaagcttctcaaaagtgaaataagaagattggaaaggaatcaagagcgagagaagtctgcagctaacctggaatacttgaagaacgtcttgctgcagttcattttcttgaagccaggtagtgaaagagagagacttcttcctgttataaatacgatgttgcagctcagccctgaagaaaagggaaaacttgctgcggttgctcaagatgaggaagaaaatgcttcccgttcttctggatgagcatcctatcttcgtagttggtttggacttcgataggttgatggaaggaatacttctattaactaaatagaatctgtttacaaaaatggttcgtgtgtgttaccattattcttttgtcaaaaagtgtgtatatatgtttgcatttacatatatttgtacatctgtatgacagatgtattttaaaagtttcaacttgaagtaaaagtacaacagcttgaagtgttgataccaggccacagccctctaactcatgtgatctcccatgcatgctgccagaataaaaccaccaggaatgaattcactccccacttctctggaacctcaggacccgcccatttctcggcagtactgtgaattttgaagttaaactaaattttggtaccataccaactggaatttaggctttaaaaataatgtttcaaggccaggtgtggtgattcatgcctgaaatcccactactttgggaggctgaggctggagaatcgcttgaggctagtgagctgtgattgtaccactgcactccagctcggggaacagagcgagaccttgtctctaaaaataataatagtaataaaaataacgttttatgactatttattgcaaggtcagatttacagattgttataaattgttgagaaatttttgtgattagaatatgaaggaaaaagctttgttggtaaaagtgacatgttaaggggctatgaagtaaatatgctgcagttaattgtgctaagttaaaatacagtttagttatttgctttaaaataaactcttctttttttctttaaagtatactacctcaaaactcattatgttgtcagagccctagagctggctagtgtaacactgactatgagtaggtgggcccaccacttgagttgaggtgatttcatggtgtctttccaggctcttgatagggtgtcactgcatgcaagccatgaatctgttttgagaatcctctccattttcccaaataaaaacctatcccaacagtgactatatcactcagcattggatctaaatataaaagtggtgctttcagtgtttttggcagatagtgttccataacctttccatcagaagggattttagacaccttagaggtccgtgctacatcttcacagttcctccgaataaccttaggtggtagtgttacttgcctttgacacctgtgcatatgttttaatgactagatccaaactgtgttgttcttaaatcaaaaattggataatttttaatatttatgtattaatcacacagtgtgctctctgaagttctcttaagccttcagtttatactcttaattttctttctgagctggggaactgactttgcactttggttacacagaacattggtttccaatttagtttaactgaaatttgctgctgatatgttgagtttgttctttaaaaaatatctcatatatctcgtctttcctccttagaagaacagacctaactagcgaatgtatgaatgaaaatgcatctatttcagagccgacatgaagagtttagtttttttactttataaactgtgaatatgagtatgccagctgcattagatgtaactaatcatatttaaatatatttcactttgactttagaccttttgaagtctgtataaacttgttttgaaatacagtctccacttacgaatgtcataacaaaatacttttttgcatgataaaaaattactttgattacaaaaggcatattctttcatggtttctgcaatgagaggaagtgtaatgattattttaatatttctattaaaactgtatattttt

SEQ ID NO: 2445 - protein, 1765 aa, Homo sapiens
MRRSKADVERYVASVLGLTPSPRQKSMKGFYFAKLYYEAKEYDLAKKYICTYINVQERDPKAHRFLGLLYELEENTEKAVECYRRSVELNPTQKDLVLKIAELLCKNDVTDGRAKYWVERAAKLFPGSPAIYKLKEQLLDCEGEDGWNKLFDLIQSELYVRPDDVHVNIRLVEVYRSTKRLKDAVAHCHEAERNIALRSSLEWNSCVVQTLKEYLESLQCLESDKSDWQATNTDLLLAYANLMLLTLSTRDVQENRELLESFDSALQSAKSSLGGNDELSATFLEMKGHFYMYAGSLLLKMGQHGNNVQWRALSELAALCYLIAFQVPRPKIKLREGKAGQNLLEMMACDRLSQSGHMLLSLSRGKQDFLKEVVETFANKIGQSALYDALFSSQSPKDTSFLGSDDIGKIDVQEPELEDLARYDVGAIRAHNGSLQHLTWLGLQWNSLPALPGIRKWLKQLFHRLPHETSRLETNAPESICILDLEVFLLGVVYTSHLQLKEKCNSHHSSYQPLCLPFPVCKQLCTERQKSWWDAVCTLIHRKAVPGNLAKLRLLVQHEINTLRAQEKHGLQPALLVHWAKYLQKTGSGLNSFYGQLEYIGRSVHYWKKVLPLLKIIKKNSIPEPIDPLFKHFHSVDIQASEIVEYEEDAHITFAMLDAVNGNIEDAVTAFESIKSVVSYWNLALIFHRKAEDIENDALSPEEQEECRNYLTKTRDYLIKIIDDGDSNLSVVKKLPVPLESVKQMLNSVMQELEDYSEGGPLYKNGSLRNADSEIKHSTPSPTKYSLSPSKSYKYSPETPPRWTEDRNSLLNMICQQVEAIKKEMQELKLNSSKSASRHRWPTENYGPDSVPDGYQGSQTFHGAPLTVATTGPSVYYSQSPAYNSQYLLRPAANVTPTKGSSNTEFKSTKEGFSIPVSADGFKFGISEPGNQEKKREKPLENDTGFQAQDISGRKKGRGVIFGQTSSTFTFADVAKSTSGEGFQFGKKDLNFKGFSGAGEKLFSSRYGKMANKANTSGDFEKDDDAYKTEDSDDIHFEPVVQMPEKVELVTGEEGEKVLYSQGVKLFRFDAEVSQWKERGLGNLKILKNEVNGKLRMLMRREQVLKVCANHWITTTMNLKPLSGSDRAWMWSASDFSDGDAKLERLAAKFKTPELAEEFKQKFEECQRLLLDIPLQTPHKLVDTGRAAKLIQRAEEMKSGLKDFKTFLTNDQTKVTEEENKGSGTGAAGASDTTIKPNAENTGPTLEWDNYDLREDALDDSVSSSSVHASPLASSPVRKNLFRFDESTTGSNFSFKSALSLSKSPAKLNQSGTSVGTDEESVVTQEEERDGQYFEPVVPLPDLVEVSSGEENEQVVFSHRAEIYRYDKDVGQWKERGIGDIKILQNYDNKQVRIVMRRDQVLKLCANHRITPDMSLQNMKGTERVWVWTACDFADGERKVEHLAVRFKLQDVADSFKKIFDEAKTAQEKDSLITPHVSRSSTPRESPCGKIAVAILEETTRERTDVIQGDDVADAASEVEVSSTSETTTKAVVSPPKFVFVSESVKRIFSSEKSKPFVFGNSSATGSLFGFSFNAPLKSNNSETSSVAQSGSESKVEPKKCELSKNSDIEQSSDSKVKNLSASFPTEESSINYTFKTPEKEPPLWHAEFTKEELVQKLRSTTKSADHLNGLLREIEATNAVLMEQIKLLKSEIRRLERNQEREKSAANLEYLKNVLLQFIFLKPGSERERLLPVINTMLQLSPEEKGKLAAVAQDEEENASRSSG

SEQ ID NO: 2446 - DNA, 3325 bp, Homo sapiens
ataaaccccagggctcattcttgagctgctcctgcatagatctcgtcctgttcaacacaccaaagattgacagctgaactgagagaccatcacccacagacacaactggccactgggtggtgcacaagtcagacagaactgaatagtcctgtgaagactctggacactgaactgactttggaaccagactgcagaatggaggggtgggaacttgtggcttgaacctaatcaggtttcattaaggttttctatagataagatcatgtcaagacaccctcagaccacagggcggcgccacgagcccggccgagtgcagctggagcgccgacgtcgccgaggatacacagtgctgaggcagaacgcaggttcgtcacagtgggcctccgtgggcggcgccgcacgctcgtcacagtgggcctccgccggctacgccgctgcttcagtggcttgcaggcactttcctcttggaagtggcgactgctgcggggctgagcggtgctcgcacgcgtctcgggagccaggttggcggcgcgatgaggcgcagcaaggccgatgtggagcggtacgtcgcctcggtgctgggtctcaccccgtcgcctcgacagaagtcaatgaaaggattctattttgcaaagctgtattatgaagctaaagaatatgatcttgctaaaaaatacatatgtacttacattaatgtgcaagagagggatcccaaagctcacagatttctgggtcttctttatgaattggaagaaaacacagagaaagccgttgaatgttacaggcgttcagtggaattaaacccaacacaaaaagatcttgtgttgaagattgcagaattgctttgtaaaaatgatgttactgatggaagagcaaaatactgggtcgaaagagcagcaaaacttttcccaggaagtcctgcaatttataaactaaaggaacagcttctagattgtgaaggtgaagatggatggaataaactttttgacttgattcagtcagaactttatgtaagacctgatgacgtccatgtgaacatccggctagtggagttgtatcgctcaactaaaagattgaaggatgctgtggcccactgccatgaggcagagaggaacatagctttgcgttcaagtttagagtggaattcgtgtgttgtacagacccttaaggaatatctggagtctttacagtgtttggagtctgataaaagtgactggcaagcaaccaatacagacttactgctggcctatgctaatcttatgcttcttacgctttccactagagatgtgcaggaaaatagagaattactggaaagttttgatagtgctcttcagtctgcgaaatcttctttgggtggaaatgatgaactgtcagctactttcttagaaatgaaaggacatttctatatgtatgctggttctctgctcttgaagatgggtcagcatggtaataatgttcaatggcgagctctttctgagctggctgcattgtgctatctcatagcatttcaggttccaagaccaaagattaaattaagagaaggtaaagctggacaaaatctgctggaaatgatggcctgtgaccgactgagccaatcagggcacatgttgctaagcttaagtcgtggcaagcaagatttcttaaaagaggttgttgaaacttttgccaacaaaattgggcagtctgcgttatatgatgctctgttttctagtcagtcacctaaggatacatcttttcttggtagcgatgatattggaaaaattgatgtacaagaaccagagcttgaagatttggctagatacgatgttggtgctattcgagcacataatggtagtcttcagcatcttacttggcttggcttacagtggaattcattgcctgctttacctggaatccgaaaatggctaaaacagcttttccatcgtttgccccatgaaacctcaaggcttgaaacaaatgcgcctgaatcaatatgtattttagatcttgaagtatttctccttggagtagtatataccagccacttacaattaaaggagaaatgtaattctcaccatagctcctatcagccgttatgcctgccctttcctgtgtgtaaacagctttgtacagaaagacaaaaatcttggtgggatgcggtttgtactctgattcacagaaaagcagtacctggaaacttggcaaaattgagacttctagttcagcatgaaataaacactctaagagcccaggaaaaacatggccttcaacctgctctgcttgtacattgggcaaaataccttcagaaaacgggcagcggtcttaattctttttatggtcaactagaatacatagggagaagtgttcattattggaagaaagttttgccattgttgaagataataaagaagaacagtattcctgaacctattgatcctctgtttaaacattttcatagtgtagacattcaggcatcagaaattgttgaatatgaagaagacgcacacataacttttgctatgttggatgcagtaaatggaaatatagaagatgctgtgactgcttttgaatctataaaaagtgttgtttcttattggaatcttgcactgatttttcacaggaaggcagaagacattgaaaatgatgccctttctcctgaagaacaagaagaatgcagaaattatctgacaaagaccagggactacctaataaagattatagatgacggtgattcaaatctttcagtggtcaagaaattgcctgtgcccctggagtctgtaaaacagatgcttaattcagtcatgcaggaactcgaagactatagtgaaggaggtcctctctataaaaatggttctttgcgaaatgcagattcagaaataaaacattctacaccgtctcctaccaaatattcactatcaccaagtaaaagttacaagtattctcccgaaacaccacctcgatggacagaagatcggaattctttactgaatatgatttgccaacaagtagaggccattaagaaagaaatgcaggagttgaaactaaatagcagtaagtcagcatcccgtcatcgttggcccacagagaattatggaccagactcggtgcctgatggatatcaggggtcacagacatttcatggggctccactaacagaagcagcacatcgtcattttacaattgagaaacatggagactccaaatggattatttacaggttcacaaaacagctttgtggcactgaaagggcgagagccaagatctcctgatttctgttcctgtgttcatagattctttttccttaataaaagtaaacatatatcaaaaaaaaaaaaaaaaaaaaaaa

SEQ ID NO: 2447 - protein, 904 aa, Homo sapiens
MRRSKADVERYVASVLGLTPSPRQKSMKGFYFAKLYYEAKEYDLAKKYICTYINVQERDPKAHRFLGLLYELEENTEKAVECYRRSVELNPTQKDLVLKIAELLCKNDVTDGRAKYWVERAAKLFPGSPAIYKLKEQLLDCEGEDGWNKLFDLIQSELYVRPDDVHVNIRLVELYRSTKRLKDAVAHCHEAERNIALRSSLEWNSCVVQTLKEYLESLQCLESDKSDWQATNTDLLLAYANLMLLTLSTRDVQENRELLESFDSALQSAKSSLGGNDELSATFLEMKGHFYMYAGSLLLKMGQHGNNVQWRALSELAALCYLIAFQVPRPKIKLREGKAGQNLLEMMACDRLSQSGHMLLSLSRGKQDFLKEVVETFANKIGQSALYDALFSSQSPKDTSFLGSDDIGKIDVQEPELEDLARYDVGAIRAHNGSLQHLTWLGLQWNSLPALPGIRKWLKQLFHRLPHETSRLETNAPESICILDLEVFLLGVVYTSHLQLKEKCNSHHSSYQPLCLPFPVCKQLCTERQKSWWDAVCTLIHRKAVPGNLAKLRLLVQHEINTLRAQEKHGLQPALLVHWAKYLQKTGSGLNSFYGQLEYIGRSVHYWKKVLPLLKIIKKNSIPEPIDPLFKHFHSVDIQASEIVEYEEDAHITFAMLDAVNGNIEDAVTAFESIKSVVSYWNLALIFHRKAEDIENDALSPEEQEECRNYLTKTRDYLIKIIDDGDSNLSVVKKLPVPLESVKQMLNSVMQELEDYSEGGPLYKNGSLRNADSEIKHSTPSPTKYSLSPSKSYKYSPETPPRWTEDRNSLLNMICQQVEAIKKEMQELKLNSSKSASRHRWPTENYGPDSVPDGYQGSQTFHGAPLTEAAHRHFTIEKHGDSKWIIYRFTKQLCGTERARAKIS

SEQ ID NO: 2448 - DNA, 609 bp, Homo sapiens
ttctcttcctgctctccatcatggcgcaggatcaaggtgaaaaggagaaccccatgcgggaacttcgcatccgcaaactctgtctcaacatctgtgttggggagagtggagacagactgacgcgagcagccaaggtgttggagcagctcacagggcagacccctgtgttttccaaagctagatacactgtcagatcctttggcatccggagaaatgaaaagattgctgtccactgcacagttcgaggggccaaggcagaagaaatcttggagaagggtctaaaggtgcgggagtatgagttaagaaaaaacaacttctcagatactggaaactttggttttgggatccaggaacacatcgatctgggtatcaaatatgacccaagcattggtatctacggcctggacttctatgtggtgctgggtaggccaggtttcagcatcgcagacaagaagcgcaggacaggctgcattggggccaaacacagaatcagcaaagaggaggccatgcgctggttccagcagaagtatgatgggatcatccttcctggcaaataaattcccgtttctatccaaaagagcaataaaaagttttcagtgaaatgtgcaa

SEQ ID NO: 2449 - protein, 178 aa, Homo sapiens [sequence omitted]

SEQ ID NO: 2450 - DNA, 4833 bp, Homo sapiens
gccatttcctcctcttgttttcactccggattctccatgttggacccaaactgaggagcccggagctgccgctgggggatcggggccgggggcacccgggggagccgctgcccgggccgcccgccctttgtacaggccgcctcccttcccggtccggggaggaaacgagaggggggatgtgaacagctgtggaagtcggagtctcgggagccggagcgggcccccgcccaggccccccagcccagcccagcccgcgcgcccgcccgtcctcccgtccagccagcccgggcccgcgggattgttagatggaacacggctccatcatcacccaggcgcggagggaagacgccctggtgctcaccaagcaaggcctggtctccaagtcctctcctaagaagcctcgtggacgtaacatcttcaaggcccttttctgctgttttcgcgcccagcatgttggccagtcaagttcctccactgagctcgctgcgtataaggaggaagcaaacaccattgctaagtcggatctgctccagtgtctccagtaccagttctaccagatcccagggacctgcctgctcccagaggtgacagaggaagatcaaggaaggatctgtgtggtcattgacctcgatgaaacccttgtgcatagctcctttaagccaatcaacaatgctgacttcatagtgcctatagagattgaggggaccactcaccaggtgtatgtgctcaagaggccttatgtggatgagttcctgagacgcatgggggaactctttgaatgtgttctcttcactgccagcctggccaagtatgccgaccctgtgacagacctgctggaccggtgtggggtgttccgggcccgcctattccgtgagtcttgcgtgttccaccagggctgctacgtcaaggacctcagccgcctggggagggacctgagaaagaccctcatcctggacaactcgcctgcttcttacatattccaccccgagaatgcagtgcctgtgcagtcctggtttgatgacatggcagacactgagttgctgaacctgatcccaatctttgaggagctgagcggagcagaggacgtctacaccagccttggggcagctgcgggccccttagcctgccctgcttccaagcgacggccatcccagtaggggactttcccacactgtgcctttacgatcagcgtgacagagtagaagctggagtgcctcaccacacggcccggaaacagcgggaagtaactggaaagagctttaggacagcttagatgccgagtgggcgaatgccagaccaatgatacccagagctacctgccgccaacttgttgagatgtgtgtttgactgtgagagagtgtgtgtttgtgtgtgtgttttgccatgaactgtggccccagtgtatagtgtttcagtgggggagaagctgaaagaccaagactcttcccaagttagcttgtctcctctcctgtcaccctaagagccactgagttgtgtagggatgaaractattgaagactccattgccaaaccatggcctttcctcagtgttgtaaggcctatgccaaggataaaggaagggtatgcctttgggtactccaggcatacacctttctgaaatccttctccagccagctgctgcagacaaaagatcacatttctgggaagatgagaacttgtttccagaccagcatccagtggccatcaggtcttgtggcccaaaggctatgcttgcctccggctgagtgcctgggataggccttttctatgtctccccaaggctggggtgctgagcctgccttcctcaccacctagccatagtctcaaacctgtggggaaggaggttttctccctgcccgggaagaggacagataactgatttccgttcttttgactgtgttttaaaattctctttctaaacacagagtgttgggcctggtttgtttctgacaaagttacagtcctgggcctgtaatgaatgtcggcggcgctggggttgcagggaaaagacaaatcctcaaagcgtggacgtgtgtccccatggcttgtggatcagctaagctcgggatcatttccataagtctgcttttcagggattctctgctggtgctggtgcaaggacttctgttccaaaggctgggaaaaactaagctgtcccagcccctcccatttcttgggcagggctcttttcctgttgtgtcttcccccagggcctgtcctgtaccgagctctgtctgttccagcctacatccttcctgggtgttgcttttcctcttaagggcctcagaactcttgctcttcctggggtgagggggaatgagtgttcttgacatgtgacagcctaatgcgcatgctttctgcctctggtaacaggagtgagtgagcccctcagacctgcactctgggtgtctcctgcttacaaaggttcttaatagtgaatgctttaaaattaaagtcatcacgaaatggaagttttcccagggtggaaaataagaggaagtgctgctgtaattgggagcacaaggggcctcccaaaaaggagccccacctcagcatcactgccttaatcgtggcctccctggggtgggtggggttctctcctccctccctccctcctcctggggtgggagggcgctcctgttcccatctctgtgttccctggaggcaggtatcacaaagcatttgtgaattgctttaggtgcagggacaccacccactcaggactcttccccatcatcccttccattgccacaccctagatccagcctcaggaactaacaagttktgagaaaagcaggtggtagagcagcagcttcgtgctctcagcggtggctggctggcatttttctctagcgttgtggtgccaccttcccttcttgtcccaaggttataaggccttgtctttctctttggaatcataaagtggaacagagtccccagaactcatgtgghcatttccgacagcatcactccccggtgcctatggggtcccggtgtacctaaagggagaaggaccccatgtgctagccagaaatatactgtctcttgaaggaaagcaggagctcagactcttagagccagctgtggcttcggacccaaggcctgacctaggctgctatcctaatattggaggaggggcctctcttccaagccccaccctaagggttagcccttggacaaatcttgtgccgtctaggcccagccaggcttttctgactaaataagcaataagaggctctaagctgactgagttgcaaggaccctttccgccctcccttggatctccatgtttctccagatggcggaagagcatgtgccaccccctttcctaacagacttgtccaagtgcttggcgtgggacccatgaccaaagcccaggatggcttggtgggagtgtccctgctgcatctgcatgaagcccctgctttttaggcctcactcccatcagaaccctgcctgcccacctgcaactcccccccaacaatgccattcccacttgccccagagaagctactcggccaaacctagccagggtctgttcttgtggaccagagccagcctagtcattatttgctgtcgggtttccagtttcaccgtgtgttagggtgagggatgattgtaaaatttgctcctcaaaggaatcaggccagactcaattttgggagggcaagacagggaggaggccgcttcatcccagactctcttctagggcttcccaccatcagcccctcccacttgagactggtctttgggaggcaataggccaccatgcctggtcagcaccaattcaagccatgccaggaatctgcctacctgccaggttcagttcttttaaggtgcctcttcagggacacagtgtgtctctctgattgggcttctaaatcaaaagcctgatgttcgtgtccctctcatagggggagctttggacacaggaccagtttggaaaagggtcaggtaagggtttccactctgcacattgtagagggaacactctgtaggcccatgggtcccttactagagaggttgagtgaatttgccttcagttaacatgggaccttctgtttagcttcctcttgcttcccaaagattttaagcattttgtaaatgtataaactcacctctggtaacagtggcccagacgctgctttgtgctaaaagcatgggaaatgtaaaggcagtctttctctgggaaatggatgctattctattctgctgcccctacctgttcctgaggcctcatttagaaagaaaatcccctcagaaggctgtctggcacccagtgtcctagccaggccaagtatatgagaaaggtaagtccattttccccttcaggtcctcagtggattacttaaccactgctgtccctcggtccctttttcctaaacgggtttagttctgtcttttttctccttttttctaaatgctggtaaatatttacattcagccagggaagaggaggccagaggtcgggccagctgccccattcttttaacgttgtagggcctgcccatggagcggaccctcctctttgggcctcgtgagcttttttgcttatcatgttccatttcgtgccgctttcccccttcaagatgccatttggagggtaggggatctgcttcccactgtgactgggctatgggattctgactaccttgcttacagattcatggtttgataaatttgttgtattccaaaacttgaaatgcaggacgccattaagtgtctgtttatatttttggaatatttgtattacttacaattaattaataaaagtgggtttaaaaaacctttccaggaaaaaaaaaaaaaaaaaaaaaaaaaaaaaaaaaaaaa

SEQ ID NO: 2451 - protein, 283 aa, Homo sapiens
MEHGSIITQARREDALVLTKQGLVSKSSPKKPRGRNIFKALFCCFRAQHVGQSSSSTELAAYKEEANTIAKSDLLQCLQYQFYQIPGTCLLPEVTEEDQGRICVVIDLDETLVHSSFKPINNADFIVPIEIEGTTHQVYVLKRPYVDEFLRRMGELFECVLFTASLAKYADPVTDLLDRCGVFRARLFRESCVFHQGCYVKDLSRLGRDLRKTLILDNSPASYIFHPENAVPVQSWFDDMADTELLNLIPIFEELSGAEDVYTSLGAAAGPLACPASKRRPSQ

SEQ ID NO: 2452 - DNA, 4516 bp, Homo sapiens
atggagaagctgcaccagtgttattggaaatcaggagaacctcagtctgacgacattgaagctagccgaatgaagcgagcagctgcaaagcatctaatagaacgctactaccaccagttaactgagggctgtggaaatgaagcctgcacgaatgagttttgtgcttcctgtccaacttttcttcgtatggataataatgcagcagctattaaagccctcgagctttataagattaatgcaaaactctgtgatcctcatccctccaagaaaggagcaagctcagcttaccttgagaactcgaaaggtgcccccaacaactcctgctctgagataaaaatgaacaagaaaggcgctagaattgattttaaagatgtgacttacttaacagaagagaaggtatatgaaattcttgaattatgtagagaaagagaggattattcccctttaatccgtgttattggaagagttttttctagtgctgaggcattggtacagagcttccggaaagttaaacaacacaccaaggaagaactgaaatctcttcaagcaaaagatgaagacaaagatgaagatgaaaaggaaaaagctgcatgttctgctgctgctatggaagaagactcagaagcatcttcctcaaggataggtgatagctcacagggagacaacaatttgcaaaaattaggccctgatgatgtgtctgtggatattgatgccattagaagggtctacaccagattgctctctaatgaaaaaattgaaactgcctttctcaatgcacttgtatatttgtcacctaacgtggaatgtgacttgacgtatcacaatgtatactctcgagatcctaattatctgaatttgttcattatcgtaatggagaatagaaatctccacagtcctgaatatctggaaatggctttgccattattttgcaaagcgatgagcaagctaccccttgcagcccaaggaaaactgatcagactgtggtctaaatacaatgcagaccagattcggagaatgatggagacatttcagcaacttattacttataaagtcataagcaatgaatttaacagtcgaaatctagtgaatgatgatgatgccattgttgctgcttcgaagtgcttgaaaatggtttactatgcaaatgtagtgggaggggaagtggacacaaatcacaatgaagaagatgatgaagagcccatccctgagtccagcgagctgacacttcaggaacttttgggagaagaaagaagaaacaagaaaggtcctcgagtggaccccctggaaactgaacttggtgttaaaaccctggattgtcgaaaaccacttatcccttttgaagagtttattaatgaaccactgaatgaggttctagaaatggataaagattatacttttttcaaagtagaaacagagaacaaattctcttttatgacatgtccctttatattgaatgctgtcacaaagaatttgggattatattatgacaatagaattcgcatgtacagtgaacgaagaatcactgttctctacagcttagttcaaggacagcagttgaatccatatttgagactcaaagttagacgtgaccatatcatagatgatgcacttgtccggctagagatgatcgctatggaaaatcctgcagacttgaagaagcagttgtatgtggaatttgaaggagaacaaggagttgatgagggaggtgtttccaaagaattttttcagctggttgtggaggaaatcttcaatccagatattggtatgttcacatacgatgaatctacaaaattgttttggtttaatccatcttcttttgaaactgagggtcagtttactctgattggcatagtactgggtctggctatttacaataactgtatactggatgtacattttcccatggttgtctacaggaagctaatggggaaaaaaggaacttttcgtgacttgggagactctcacccagttctatatcagagtttaaaagatttattggagtatgaagggaatgtggaagatgacatgatgatcactttccagatatcacagacagatctttttggtaacccaatgatgtatgatctaaaggaaaatggtgataaaattccaattacaaatgaaaacaggaaggaatttgtcaatctttattctgactacattctcaataaatcagtagaaaaacagttcaaggcttttcggagaggttttcatatggtgaccaatgaatctcccttaaagtacttattcagaccagaagaaattgaattgcttatatgtggaagccggaatctagatttccaagcactagaagaaactacagaatatgacggtggctataccagggactctgttctgattagggagttctgggaaatcgttcattcatttacagatgaacagaaaagactcttcttgcagtttacaacgggcacagacagagcacctgtgggaggactaggaaaattaaagatgattatagccaaaaatggcccagacacagaaaggttacctacatctcatacttgctttaatgtgcttttacttccggaatactcaagcaaagaaaaacttaaagagagattgttgaaggccatcacgtatgccaaaggatttggcatgctgtaaaacaaaacaaaacaaaataaaacaaaaaaaaggaaggaaaaaaaaagaaaaaatttaaaaaattttaaaaatataacgagggataaatttttggtggtgatagtgtcccagtacaaaaaggctgtaagatagtcaaccacagtagtcacctatgtctgtgcctcccttctttattggggacatgtgggctggaacagcagatttcagctacatatatgaacaaatcctttattattattataattatttttttgcgtgaaagtgttacatattctttcacttgtatgtacagagaggtttttctgaatatttattttaagggttaaatcacttttgcttgtgtttattactgcttgaggttgagccttttgagtatttaaaaaatatataccaacagaactactctcccaaggaaaatattgccaccatttgtagaccacgtaaccttcaagtatgtgctacttttttgtccctgtatctaactcaaatcaggaactgtattttttttaatgatttgcttttgaaacttgaagtcttgaaaacagtgtgatgcaattactgctgttctagcccccaaagagttttctgtgcaaaatcttgagaatcaatcaataaagaaagatggaaggaagggagaaattggaatgttttaactgcagccctcagaactttagtaacagcacaacaaattaaaaacaaaaacaactcatgccacagtatgtcgtcttcatgtgtcttgcaatgaactgtttcagtagccaatcctctttcttagtatatgaaaggacagggatttttgttcttgttgttctcgttgttgttttaagtttactggggaaagtgcatttggccaaatgaaatggtagtcaagcctattgcaacaaagttaggaagtttgttgtttgtttattataaacaaaaagcatgtgaaagtgcacttaagatagagtttttattaattacttacttattacctagattttaaatagacaatccaaagtctccccttcgtgttgccatcatcttgttgaatcagccattttatcgaggcacgtgatcagtgttgcaacataatgaaaaagatggctactgtgccttgtgttacttaatcatacagtaagctgacctggaaatgaatgaaactattactcctaagaattacattgtatagccccacagattaaatttaattaattaattcaaaacatgttaaacgttactttcatgtactatggaaaagtacaagtaggtttacattactgatttccagaagtaagtagtttcccctttcctagtcttctgtgtatgtgatgttgttaatttcttttattgcattataaaataaaaggattatgtatttttaactaaggtgagacattgatatatccttttgctacaagctatagctaatgtgctgagcttgtgccttggtgattgattgattgattgactgattgttttaactgattactgtagatcaacctgatgatttgtttgtttgaaattggcaggaaaaatgcagctttcaaatcattggggggagaaaaaggatgtctttcaggattattttaattaatttttttcataattgagacagaactgtttgttatgtaccataatgctaaataaaactgtggcacttttcaccataatttaatttagtggaaaaagaagacaatgctttccatattgtgataaggtaacatggggtttttctgggccagcctttagaacactgttagggtacatacgctaccttgatgaaagggaccttcgtgcaactgtagtcatcttaaaggcttctcatccactgtgcttcttaatgtgtaattaaagtgaggagaaattaaatactctgagggcgttttatataataaattcgtgaaga

SEQ ID NO: 2453 - protein, 875 aa, Homo sapiens
MEKLHQCYWKSGEPQSDDIEASRMKRAAAKHLIERYYHQLTEGCGNEACTNEFCASCPTFLRMDNNAAAIKALELYKINAKLCDPHPSKKGASSAYLENSKGAPNNSCSEIKMNKKGARIDFKDVTYLTEEKVYEILELCREREDYSPLIRVIGRVFSSAEALVQSFRKVKQHTKEELKSLQAKDEDKDEDEKEKAACSAAAMEEDSEASSSRIGDSSQGDNNLQKLGPDDVSVDIDAIRRVYTRLLSNEKIETAFLNALVYLSPNVECDLTYHNVYSRDPNYLNLFIIVMENRNLHSPEYLEMALPLFCKAMSKLPLAAQGKLIRLWSKYNADQIRRMMETFQQLITYKVISNEFNSRNLVNDDDAIVAASKCLKMVYYANVVGGEVDTNHNEEDDEEPIPESSELTLQELLGEERRNKKGPRVDPLETELGVKTLDCRKPLIPFEEFINEPLNEVLEMDKDYTFFKVETENKFSFMTCPFILNAVTKNLGLYYDNRIRMYSERRITVLYSLVQGQQLNPYLRLKVRRDHIIDDALVRLEMIAMENPADLKKQLYVEFEGEQGVDEGGVSKEFFQLVVEEIFNPDIGMFTYDESTKLFWFNPSSFETEGQFTLIGIVLGLAIYNNCILDVHFPMVVYRKLMGKKGTFRDLGDSHPVLYQSLKDLLEYEGNVEDDMMITFQISQTDLFGNPMMYDLKENGDKIPITNENRKEFVNLYSDYILNKSVEKQFKAFRRGFHMVTNESPLKYLFRPEEIELLICGSRNLDFQALEETTEYDGGYTRDSVLIREFWEIVHSFTDEQKRLFLQFTTGTDRAPVGGLGKLKMIIAKNGPDTERLPTSHTCFNVLLLPEYSSKEKLKERLLKAITYAKGFGML

SEQ ID NO: 2454 - DNA, 4491 bp, Homo sapiens
acagatcaggagaacctcagtctgacgacattgaagctagccgaatgaagcgagcagctgcaaagcatctaatagaacgctactaccaccagttaactgagggctgtggaaatgaagcctgcacgaatgagttttgtgcttcctgtccaacttttcttcgtatggataataatgcagcagctattaaagccctcgagctttataagattaatgcaaaactctgtgatcctcatccctccaagaaaggagcaagctcagcttaccttgagaactcgaaaggtgcccccaacaactcctgctctgagataaaaatgaacaagaaaggcgctagaattgattttaaagatgtgacttacttaacagaagagaaggtatatgaaattcttgaattatgtagagaaagagaggattattcccctttaatccgtgttattggaagagttttttctagtgctgaggcattggtacagagcttccggaaagttaaacaacacaccaaggaagaactgaaatctcttcaagcaaaagatgaagacaaagatgaagatgaaaaggaaaaagctgcatgttctgctgctgctatggaagaagactcagaagcatcttcctcaaggataggtgatagctcacagggagacaacaatttgcaaaaattaggccctgatgatgtgtctgtggatattgatgccattagaagggtctacaccagattgctctctaatgaaaaaattgaaactgcctttctcaatgcacttgtatatttgtcacctaacgtggaatgtgacttgacgtatcacaatgtatactctcgagatcctaattatctgaatttgttcattatcgtaatggagaatagaaatctccacagtcctgaatatctggaaatggctttgccattattttgcaaagcgatgagcaagctaccccttgcagcccaaggaaaactgatcagactgtggtctaaatacaatgcagaccagattcggagaatgatggagacatttcagcaacttattacttataaagtcataagcaatgaatttaacagtcgaaatctagtgaatgatgatgatgccattgttgctgcttcgaagtgcttgaaaatggtttactatgcaaatgtagtgggaggggaagtggacacaaatcacaatgaagaagatgatgaagagcccatccctgagtccagcgagctgacacttcaggaacttttgggagaagaaagaagaaacaagaaaggtcctcgagtggaccccctggaaactgaacttggtgttaaaaccctggattgtcgaaaaccacttatcccttttgaagagtttattaatgaaccactgaatgaggttctagaaatggataaagattatacttttttcaaagtagaaacagagaacaaattctcttttatgacatgtccctttatattgaatgctgtcacaaagaatttgggattatattatgacaatagaattcgcatgtacagtgaacgaagaatcactgttctctacagcttagttcaaggacagcagttgaatccatatttgagactcaaagttagacgtgaccatatcatagatgatgcacttgtccggctagagatgatcgctatggaaaatcctgcagacttgaagaagcagttgtatgtggaatttgaaggagaacaaggagttgatgagggaggtgtttccaaagaattttttcagctggttgtggaggaaatcttcaatccagatattggtatgttcacatacgatgaatctacaaaattgttttggtttaatccatcttcttttgaaactgagggtcagtttactctgattggcatagtactgggtctggctatttacaataactgtatactggatgtacattttcccatggttgtctacaggaagctaatggggaaaaaaggaacttttcgtgacttgggagactctcacccagttctatatcagagtttaaaagatttattggagtatgaagggaatgtggaagatgacatgatgatcactttccagatatcacagacagatctttttggtaacccaatgatgtatgatctaaaggaaaatggtgataaaattccaattacaaatgaaaacaggaaggaatttgtcaatctttattctgactacattctcaataaatcagtagaaaaacagttcaaggcttttcggagaggttttcatatggtgaccaatgaatctcccttaaagtacttattcagaccagaagaaattgaattgcttatatgtggaagccggaatctagatttccaagcactagaagaaactacagaatatgacggtggctataccagggactctgttctgattagggagttctgggaaatcgttcattcatttacagatgaacagaaaagactcttcttgcagtttacaacgggcacagacagagcacctgtgggaggactaggaaaattaaagatgattatagccaaaaatggcccagacacagaaaggttacctacatctcatacttgctttaatgtgcttttacttccggaatactcaagcaaagaaaaacttaaagagagattgttgaaggccatcacgtatgccaaaggatttggcatgctgtaaaacaaaacaaaacaaaataaaacaaaaaaaaggaaggaaaaaaaaagaaaaaatttaaaaaattttaaaaatataacgagggataaatttttggtggtgatagtgtcccagtacaaaaaggctgtaagatagtcaaccacagtagtcacctatgtctgtgcctcccttctttattggggacatgtgggctggaacagcagatttcagctacatatatgaacaaatcctttattattattataattatttttttgcgtgaaagtgttacatattctttcacttgtatgtacagagaggtttttctgaatatttattttaagggttaaatcacttttgcttgtgtttattactgcttgaggttgagccttttgagtatttaaaaaatatataccaacagaactactctcccaaggaaaatattgccaccatttgtagaccacgtaaccttcaagtatgtgctacttttttgtccctgtatctaactcaaatcaggaactgtattttttttaatgatttgcttttgaaacttgaagtcttgaaaacagtgtgatgcaattactgctgttctagcccccaaagagttttctgtgcaaaatcttgagaatcaatcaataaagaaagatggaaggaagggagaaattggaatgttttaactgcagccctcagaactttagtaacagcacaacaaattaaaaacaaaaacaactcatgccacagtatgtcgtcttcatgtgtcttgcaatgaactgtttcagtagccaatcctctttcttagtatatgaaaggacagggatttttgttcttgttgttctcgttgttgttttaagtttactggggaaagtgcatttggccaaatgaaatggtagtcaagcctattgcaacaaagttaggaagtttgttgtttgtttattataaacaaaaagcatgtgaaagtgcacttaagatagagtttttattaattacttacttattacctagattttaaatagacaatccaaagtctccccttcgtgttgccatcatcttgttgaatcagccattttatcgaggcacgtgatcagtgttgcaacataatgaaaaagatggctactgtgccttgtgttacttaatcatacagtaagctgacctggaaatgaatgaaactattactcctaagaattacattgtatagccccacagattaaatttaattaattaattcaaaacatgttaaacgttactttcatgtactatggaaaagtacaagtaggtttacattactgatttccagaagtaagtagtttcccctttcctagtcttctgtgtatgtgatgttgttaatttcttttattgcattataaaataaaaggattatgtatttttaactaaggtgagacattgatatatccttttgctacaagctatagctaatgtgctgagcttgtgccttggtgattgattgattgattgactgattgttttaactgattactgtagatcaacctgatgatttgtttgtttgaaattggcaggaaaaatgcagctttcaaatcattggggggagaaaaaggatgtctttcaggattattttaattaatttttttcataattgagacagaactgtttgttatgtaccataatgctaaataaaactgtggcacttttcaccataatttaatttagtggaaaaagaagacaatgctttccatattgtgataaggtaacatggggtttttctgggccagcctttagaacactgttagggtacatacgctaccttgatgaaagggaccttcgtgcaactgtagtcatcttaaaggcttctcatccactgtgcttcttaatgtgtaattaaagtgaggagaaattaaatactctgagggcgttttatataataaattcgtgaaga

SEQ ID NO: 2455 - protein, 852 aa, Homo sapiens
MKRAAAKHLIERYYHQLTEGCGNEACTNEFCASCPTFLRMDNNAAAIKALELYKINAKLCDPHPSKKGASSAYLENSKGAPNNSCSEIKMNKKGARIDFKDVTYLTEEKVYEILELCREREDYSPLIRVIGRVFSSAEALVQSFRKVKQHTKEELKSLQAKDEDKDEDEKEKAACSAAAMEEDSEASSSRIGDSSQGDNNLQKLGPDDVSVDIDAIRRVYTRLLSNEKIETAFLNALVYLSPNVECDLTYHNVYSRDPNYLNLFIIVMENRNLHSPEYLEMALPLFCKAMSKLPLAAQGKLIRLWSKYNADQIRRMMETFQQLITYKVISNEFNSRNLVNDDDAIVAASKCLKMVYYANVVGGEVDTNHNEEDDEEPIPESSELTLQELLGEERRNKKGPRVDPLETELGVKTLDCRKPLIPFEEFINEPLNEVLEMDKDYTFFKVETENKFSFMTCPFILNAVTKNLGLYYDNRIRMYSERRITVLYSLVQGQQLNPYLRLKVRRDHIIDDALVRLEMIAMENPADLKKQLYVEFEGEQGVDEGGVSKEFFQLVVEEIFNPDIGMFTYDESTKLFWFNPSSFETEGQFTLIGIVLGLAIYNNCILDVHFPMVVYRKLMGKKGTFRDLGDSHPVLYQSLKDLLEYEGNVEDDMMITFQISQTDLFGNPMMYDLKENGDKIPITNENRKEFVNLYSDYILNKSVEKQFKAFRRGFHMVTNESPLKYLFRPEEIELLICGSRNLDFQALEETTEYDGGYTRDSVLIREFWEIVHSFTDEQKRLFLQFTTGTDRAPVGGLGKLKMIIAKNGPDTERLPTSHTCFNVLLLPEYSSKEKLKERLLKAITYAKGFGML

SEQ ID NO: 2456 - DNA, 5164 bp, Homo sapiens
ccaagatggtggcgctgggctcggggtgactacaggagacgacggggccttttcccttcgccaggacccgacacaccaggcttcgctcgctcgcgcacccctccgccgcgtagccatccgccagcgcgggcgcccgccatccgccgcctacttacgcttcacctctgccgacccggcgcgctcggctgcgggcggcggcgcctccttcggctcctcctcggaatagctcgcggcctgtagcccctggcaggagggcccctcagccccccggtgtggacaggcagcggcggctggcgacgaacgccgggatttcggcggccccggcgctccctttcccggcctcgttttccggataaggaagcgcgggtcccgcatgagccccggcggtggcggcagcgaaagagaacgaggcggtggcgggcggaggcggcgggcgagggcgactacgaccagtgaggcggccgccgcagcccaggcgcgggggcgacgacaggttaaaaatctgtaagagcctgattttagaattcaccagctcctcagaagtttggcgaaatatgagttattaagcctacgctcagatcaaggtagcagctagactggtgtgacaacctgtttttaatcagtgactcaaagctgtgatcaccctgatgtcaccgaatggccacagcttgtaaaagatcaggagaacctcagtctgacgacattgaagctagccgaatgaagcgagcagctgcaaagcatctaatagaacgctactaccaccagttaactgagggctgtggaaatgaagcctgcacgaatgagttttgtgcttcctgtccaacttttcttcgtatggataataatgcagcagctattaaagccctcgagctttataagattaatgcaaaactctgtgatcctcatccctccaagaaaggagcaagctcagcttaccttgagaactcgaaaggtgcccccaacaactcctgctctgagataaaaatgaacaagaaaggcgctagaattgattttaaagatgtgacttacttaacagaagagaaggtatatgaaattcttgaattatgtagagaaagagaggattattcccctttaatccgtgttattggaagagttttttctagtgctgaggcattggtacagagcttccggaaagttaaacaacacaccaaggaagaactgaaatctcttcaagcaaaagatgaagacaaagatgaagatgaaaaggaaaaagctgcatgttctgctgctgctatggaagaagactcagaagcatcttcctcaaggataggtgatagctcacagggagacaacaatttgcaaaaattaggccctgatgatgtgtctgtggatattgatgccattagaagggtctacaccagattgctctctaatgaaaaaattgaaactgcctttctcaatgcacttgtatatttgtcacctaacgtggaatgtgacttgacgtatcacaatgtatactctcgagatcctaattatctgaatttgttcattatcgtaatggagaatagaaatctccacagtcctgaatatctggaaatggctttgccattattttgcaaagcgatgagcaagctaccccttgcagcccaaggaaaactgatcagactgtggtctaaatacaatgcagaccagattcggagaatgatggagacatttcagcaacttattacttataaagtcataagcaatgaatttaacagtcgaaatctagtgaatgatgatgatgccattgttgctgcttcgaagtgcttgaaaatggtttactatgcaaatgtagtgggaggggaagtggacacaaatcacaatgaagaagatgatgaagagcccatccctgagtccagcgagctgacacttcaggaacttttgggagaagaaagaagaaacaagaaaggtcctcgagtggaccccctggaaactgaacttggtgttaaaaccctggattgtcgaaaaccacttatcccttttgaagagtttattaatgaaccactgaatgaggttctagaaatggataaagattatacttttttcaaagtagaaacagagaacaaattctcttttatgacatgtccctttatattgaatgctgtcacaaagaatttgggattatattatgacaatagaattcgcatgtacagtgaacgaagaatcactgttctctacagcttagttcaaggacagcagttgaatccatatttgagactcaaagttagacgtgaccatatcatagatgatgcacttgtccggctagagatgatcgctatggaaaatcctgcagacttgaagaagcagttgtatgtggaatttgaaggagaacaaggagttgatgagggaggtgtttccaaagaattttttcagctggttgtggaggaaatcttcaatccagatattggtatgttcacatacgatgaatctacaaaattgttttggtttaatccatcttcttttgaaactgagggtcagtttactctgattggcatagtactgggtctggctatttacaataactgtatactggatgtacattttcccatggttgtctacaggaagctaatggggaaaaaaggaacttttcgtgacttgggagactctcacccagttctatatcagagtttaaaagatttattggagtatgaagggaatgtggaagatgacatgatgatcactttccagatatcacagacagatctttttggtaacccaatgatgtatgatctaaaggaaaatggtgataaaattccaattacaaatgaaaacaggaaggaatttgtcaatctttattctgactacattctcaataaatcagtagaaaaacagttcaaggcttttcggagaggttttcatatggtgaccaatgaatctcccttaaagtacttattcagaccagaagaaattgaattgcttatatgtggaagccggaatctagatttccaagcactagaagaaactacagaatatgacggtggctataccagggactctgttctgattagggagttctgggaaatcgttcattcatttacagatgaacagaaaagactcttcttgcagtttacaacgggcacagacagagcacctgtgggaggactaggaaaattaaagatgattatagccaaaaatggcccagacacagaaaggttacctacatctcatacttgctttaatgtgcttttacttccggaatactcaagcaaagaaaaacttaaagagagattgttgaaggccatcacgtatgccaaaggatttggcatgctgtaaaacaaaacaaaacaaaataaaacaaaaaaaaggaaggaaaaaaaaagaaaaaatttaaaaaattttaaaaatataacgagggataaatttttggtggtgatagtgtcccagtacaaaaaggctgtaagatagtcaaccacagtagtcacctatgtctgtgcctcccttctttattggggacatgtgggctggaacagcagatttcagctacatatatgaacaaatcctttattattattataattatttttttgcgtgaaagtgttacatattctttcacttgtatgtacagagaggtttttctgaatatttattttaagggttaaatcacttttgcttgtgtttattactgcttgaggttgagccttttgagtatttaaaaaatatataccaacagaactactctcccaaggaaaatattgccaccatttgtagaccacgtaaccttcaagtatgtgctacttttttgtccctgtatctaactcaaatcaggaactgtattttttttaatgatttgcttttgaaacttgaagtcttgaaaacagtgtgatgcaattactgctgttctagcccccaaagagttttctgtgcaaaatcttgagaatcaatcaataaagaaagatggaaggaagggagaaattggaatgttttaactgcagccctcagaactttagtaacagcacaacaaattaaaaacaaaaacaactcatgccacagtatgtcgtcttcatgtgtcttgcaatgaactgtttcagtagccaatcctctttcttagtatatgaaaggacagggatttttgttcttgttgttctcgttgttgttttaagtttactggggaaagtgcatttggccaaatgaaatggtagtcaagcctattgcaacaaagttaggaagtttgttgtttgtttattataaacaaaaagcatgtgaaagtgcacttaagatagagtttttattaattacttacttattacctagattttaaatagacaatccaaagtctccccttcgtgttgccatcatcttgttgaatcagccattttatcgaggcacgtgatcagtgttgcaacataatgaaaaagatggctactgtgccttgtgttacttaatcatacagtaagctgacctggaaatgaatgaaactattactcctaagaattacattgtatagccccacagattaaatttaattaattaattcaaaacatgttaaacgttactttcatgtactatggaaaagtacaagtaggtttacattactgatttccagaagtaagtagtttcccctttcctagtcttctgtgtatgtgatgttgttaatttcttttattgcattataaaataaaaggattatgtatttttaactaaggtgagacattgatatatccttttgctacaagctatagctaatgtgctgagcttgtgccttggtgattgattgattgattgactgattgttttaactgattactgtagatcaacctgatgatttgtttgtttgaaattggcaggaaaaatgcagctttcaaatcattggggggagaaaaaggatgtctttcaggattattttaattaatttttttcataattgagacagaactgtttgttatgtaccataatgctaaataaaactgtggcacttttcaccataatttaatttagtggaaaaagaagacaatgctttccatattgtgataaggtaacatggggtttttctgggccagcctttagaacactgttagggtacatacgctaccttgatgaaagggaccttcgtgcaactgtagtcatcttaaaggcttctcatccactgtgcttcttaatgtgtaattaaagtgaggagaaattaaatactctgagggcgttttatataataaattcgtgaaga

SEQ ID NO: 2457 - protein, 872 aa, Homo sapiens
MATACKRSGEPQSDDIEASRMKRAAAKHLIERYYHQLTEGCGNEACTNEFCASCPTFLRMDNNAAAIKALELYKINAKLCDPHPSKKGASSAYLENSKGAPNNSCSEIKMNKKGARIDFKDVTYLTEEKVYEILELCREREDYSPLIRVIGRVFSSAEALVQSFRKVKQHTKEELKSLQAKDEDKDEDEKEKAACSAAAMEEDSEASSSRIGDSSQGDNNLQKLGPDDVSVDIDAIRRVYTRLLSNEKIETAFLNALVYLSPNVECDLTYHNVYSRDPNYLNLFIIVMENRNLHSPEYLEMALPLFCKAMSKLPLAAQGKLIRLWSKYNADQIRRMMETFQQLITYKVISNEFNSRNLVNDDDAIVAASKCLKMVYYANVVGGEVDTNHNEEDDEEPIPESSELTLQELLGEERRNKKGPRVDPLETELGVKTLDCRKPLIPFEEFINEPLNEVLEMDKDYTFFKVETENKFSFMTCPFILNAVTKNLGLYYDNRIRMYSERRITVLYSLVQGQQLNPYLRLKVRRDHIIDDALVRLEMIAMENPADLKKQLYVEFEGEQGVDEGGVSKEFFQLVVEEIFNPDIGMFTYDESTKLFWFNPSSFETEGQFTLIGIVLGLAIYNNCILDVHFPMVVYRKLMGKKGTFRDLGDSHPVLYQSLKDLLEYEGNVEDDMMITFQISQTDLFGNPMMYDLKENGDKIPITNENRKEFVNLYSDYILNKSVEKQFKAFRRGFHMVTNESPLKYLFRPEEIELLICGSRNLDFQALEETTEYDGGYTRDSVLIREFWEIVHSFTDEQKRLFLQFTTGTDRAPVGGLGKLKMIIAKNGPDTERLPTSHTCFNVLLLPEYSSKEKLKERLLKAITYAKGFGML

SEQ ID NO: 2458 - DNA, 548 bp, Homo sapiens
cggcgctgcggcagtccagatcaaaaatggcggtagttggtgtgtcctcggtttctcggctgctgggtcggtcccgcccacagctggggcggcctatgtcgagtggcgcccatggcgaagagggctcagctcgcatgtggaagactctcaccttcttcgtcgcgctccccggggtggcagtcagcatgctgaatgtgtacctgaagtcgcaccacggagagcacgagagacccgagttcatcgcctacccccatctccgcatcaggaccaagccgtttccctggggagatggtaaccatactctattccataaccctcatgtgaatccacttccaactggctacgaagatgaataaagagaatctggaccactacccgggcaccagggaccacagcactggtttggaccgttactctgcacatggaccagaaaaagtatatgggaccttaagctaaccttctttacttgtatcaaatgatgactggtatactggtctcccatccctttgcttgtggcaggagatggcttaaataaataacttaaactt

SEQ ID NO: 2459 - protein, 109 aa, Homo sapiens
MAVVGVSSVSRLLGRSRPQLGRPMSSGAHGEEGSARMWKTLTFFVALPGVAVSMLNVYLKSHHGEHERPEFIAYPHLRIRTKPFPWGDGNHTLFHNPHVNPLPTGYEDE

SEQ ID NO: 2460 - DNA, 2546 bp, Homo sapiens
gacggcaaatggcggacttcgacacctacgacgatcgggcctacagcagcttcggcggcggcagagggtcccgcggcagtgctggtggccatggttcccgtagccagaaggagttgcccacagagcccccctacacagcatacgtaggaaatctacctttcaatacggttcagggcgacatagatgctatctttaaggatctcagcataaggagtgtacggctagtcagagacaaagacacagataaatttaaaggattctgctatgtagaattcgatgaagtggattcccttaaggaagccttgacatacgatggtgcactgttgggcgatcggtcacttcgtgtggacattgcagaaggcagaaaacaagataaaggtggctttggattcagaaaaggtggaccagatgacagaggaatgggtagctctcgagaatctagaggtggatgggattcccgggatgacttcaattctggcttcagggatgacttcttagggggcaggggaggtagtcgcccaggcgaccggcgaacaggcccccccatgggcagccgcttcagagatggccctcccctccgtggatccaacatggatttcagagaacccacagaagaggaaagagcacagagaccacgactccagcttaaacctcgaacagtcgcgacgcccctcaatcaagtagccaatcccaactctgctatcttcgggggtgccaggcctagagaggaagtcgttcaaaaggagcaagaatgagcctgcggttgggagggaatggggcgtggggggttagagcaggaccacagcctggtgagtccccgggcagccgtcctgcagccgccactcctgcgcctgccattggcctcctcacagcggaaacacagcttgtgagtgcatgtcagctgttaacaagtggtttttagtacattctgggctttgctgtatctatctagtgcctgtttgtgcgtttttttctttcttccgctgcttccccattttccttctgtcctttttctcctgctccttgttttcccagcagcacatggggttcctcggaggagcagaggtggccgccgtgggggggcgtttgggctgcggtgctgcgtcatttttcctttgctttctctttactttagacactggcccaactccaggcgtttcctttcattccctcagtgcttctcttctgacctgcatgttgagttctgtattgctggggcttccaacaaaaaccagagtcactgacagagggaacagcagagaccttgttggtattcagctgtgatggatatagagaatcagaggcaccttgttttcacaactaggataaaaatatctgcagggtcctttccattcctatttagagggagtcctggctccatgaccccctcccgagtggactgtccaagcagataggctcacacgagaaacagtgaggctgaaagggggggctatggaagagcggtagggagtccacggagaagatgcagtgaatgcttgcatgcattcacacgtgtgtgtgtcccagctagttcactcctttcgccgtgcgtggtggaggctggcctctctggctgggtgcagtgaatggccagcgggtttcttttctgctgggccaaggcgctttgggggtggagggggtggtgctggtgctgcactgggctgactgcggcgctgacgcagcgtttccccccatccctgttgcctgtgtgttgtgtggatctgttcctagtataggcaacataatgagatactgtgcttcccacctccccttcagttcagagccaaaatgggtctagaatctggcactttactcatttcctttgataaattgtactatgcagagctgtcaggaaccttcagatagcagtagaggactgcagctgtctaggtctgcggccacatcttggggacacactggactgttcccatgtgcagggttcagcagttatgtgggagtgctaggggttaggcttttgagcttgaacgcctgcgtgtgaacagatgaaaaatccttcagtacccaagtcccagtctgtcctatggggagcagtttgggggcggccggcagcaggagcctgggaaagaggccctcgccaggtgatggcagggccagggtggcctggggcacccagcggaatgtgcttagtatttggtcaccagccgtcatcctgggcttttcctactgtgtcttgttacaaggcctcagcaatccacagaactctctctccttccttccacctgtcagcttctctgcttctgagataagaaccatttgtgtaacaccaacacttaacttcagaaagacatgcattatgtggtgtaatcaaacccgatgctttcagatgacctacttacatcttcaatgtggataagataaagaacaaaacacatgcatctaaactgctgggcaatccagttgacttttaaatgtaagaatggaattccaaacacttaacacattcagctatatgacagaaagtaaatctatggatatggtattttgtgaatgatcttttaaataaaagaaaaccttacgtaatattt

SEQ ID NO: 2461 - protein, 248 aa, Homo sapiens
MADFDTYDDRAYSSFGGGRGSRGSAGGHGSRSQKELPTEPPYTAYVGNLPFNTVQGDIDAIFKDLSIRSVRLVRDKDTDKFKGFCYVEFDEVDSLKEALTYDGALLGDRSLRVDIAEGRKQDKGGFGFRKGGPDDRGMGSSRESRGGWDSRDDFNSGFRDDFLGGRGGSRPGDRRTGPPMGSRFRDGPPLRGSNMDFREPTEEERAQRPRLQLKPRTVATPLNQVANPNSAIFGGARPREEVVQKEQE

SEQ ID NO: 2462 - DNA, 2486 bp, Homo sapiens
gacggcaaatggcggacttcgacacctacgacgatcgggcctacagcagcttcggcggcggcagagggtcccgcggcagtgctggtggccatggttcccgtagccagaaggagttgcccacagagcccccctacacagcatacgtaggaaatctacctttcaatacggttcagggcgacatagatgctatctttaaggatctcagcataaggagtgtacggctagtcagagacaaagacacagataaatttaaaggattctgctatgtagaattcgatgaagtggattcccttaaggaagccttgacatacgatggtgcactgttgggcgatcggtcacttcgtgtggacattgcagaaggcagaaaacaagataaaggtggctttggattcagaaaaggtggaccagatgacagaggcttcagggatgacttcttagggggcaggggaggtagtcgcccaggcgaccggcgaacaggcccccccatgggcagccgcttcagagatggccctcccctccgtggatccaacatggatttcagagaacccacagaagaggaaagagcacagagaccacgactccagcttaaacctcgaacagtcgcgacgcccctcaatcaagtagccaatcccaactctgctatcttcgggggtgccaggcctagagaggaagtcgttcaaaaggagcaagaatgagcctgcggttgggagggaatggggcgtggggggttagagcaggaccacagcctggtgagtccccgggcagccgtcctgcagccgccactcctgcgcctgccattggcctcctcacagcggaaacacagcttgtgagtgcatgtcagctgttaacaagtggtttttagtacattctgggctttgctgtatctatctagtgcctgtttgtgcgtttttttctttcttccgctgcttccccattttccttctgtcctttttctcctgctccttgttttcccagcagcacatggggttcctcggaggagcagaggtggccgccgtgggggggcgtttgggctgcggtgctgcgtcatttttcctttgctttctctttactttagacactggcccaactccaggcgtttcctttcattccctcagtgcttctcttctgacctgcatgttgagttctgtattgctggggcttccaacaaaaaccagagtcactgacagagggaacagcagagaccttgttggtattcagctgtgatggatatagagaatcagaggcaccttgttttcacaactaggataaaaatatctgcagggtcctttccattcctatttagagggagtcctggctccatgaccccctcccgagtggactgtccaagcagataggctcacacgagaaacagtgaggctgaaagggggggctatggaagagcggtagggagtccacggagaagatgcagtgaatgcttgcatgcattcacacgtgtgtgtgtcccagctagttcactcctttcgccgtgcgtggtggaggctggcctctctggctgggtgcagtgaatggccagcgggtttcttttctgctgggccaaggcgctttgggggtggagggggtggtgctggtgctgcactgggctgactgcggcgctgacgcagcgtttccccccatccctgttgcctgtgtgttgtgtggatctgttcctagtataggcaacataatgagatactgtgcttcccacctccccttcagttcagagccaaaatgggtctagaatctggcactttactcatttcctttgataaattgtactatgcagagctgtcaggaaccttcagatagcagtagaggactgcagctgtctaggtctgcggccacatcttggggacacactggactgttcccatgtgcagggttcagcagttatgtgggagtgctaggggttaggcttttgagcttgaacgcctgcgtgtgaacagatgaaaaatccttcagtacccaagtcccagtctgtcctatggggagcagtttgggggcggccggcagcaggagcctgggaaagaggccctcgccaggtgatggcagggccagggtggcctggggcacccagcggaatgtgcttagtatttggtcaccagccgtcatcctgggcttttcctactgtgtcttgttacaaggcctcagcaatccacagaactctctctccttccttccacctgtcagcttctctgcttctgagataagaaccatttgtgtaacaccaacacttaacttcagaaagacatgcattatgtggtgtaatcaaacccgatgctttcagatgacctacttacatcttcaatgtggataagataaagaacaaaacacatgcatctaaactgctgggcaatccagttgacttttaaatgtaagaatggaattccaaacacttaacacattcagctatatgacagaaagtaaatctatggatatggtattttgtgaatgatcttttaaataaaagaaaaccttacgtaatattt

SEQ ID NO: 2463 - protein, 228 aa, Homo sapiens
MADFDTYDDRAYSSFGGGRGSRGSAGGHGSRSQKELPTEPPYTAYVGNLPFNTVQGDIDAIFKDLSIRSVRLVRDKDTDKFKGFCYVEFDEVDSLKEALTYDGALLGDRSLRVDIAEGRKQDKGGFGFRKGGPDDRGFRDDFLGGRGGSRPGDRRTGPPMGSRFRDGPPLRGSNMDFREPTEEERAQRPRLQLKPRTVATPLNQVANPNSAIFGGARPREEVVQKEQE

SEQ ID NO: 2464 - DNA, 937 bp, Homo sapiens
gttcttgcctggtgtcggtggttagtttctgcgacttgtgttgggactgctgataggaagatgtcttcaggaaatgctaaaattgggcaccctgcccccaacttcaaagccacagctgttatgccagatggtcagtttaaagatatcagcctgtctgactacaaaggaaaatatgttgtgttcttcttttaccctcttgacttcacctttgtgtgccccacggagatcattgctttcagtgatagggcagaagaatttaagaaactcaactgccaagtgattggtgcttctgtggattctcacttctgtcatctagcatgggtcaatacacctaagaaacaaggaggactgggacccatgaacattcctttggtatcagacccgaagcgcaccattgctcaggattatggggtcttaaaggctgatgaaggcatctcgttcaggggcctttttatcattgatgataagggtattcttcggcagatcactgtaaatgacctccctgttggccgctctgtggatgagactttgagactagttcaggccttccagttcactgacaaacatggggaagtgtgcccagctggctggaaacctggcagtgataccatcaagcctgatgtccaaaagagcaaagaatatttctccaagcagaagtgagcgctgggctgttttagtgccaggctgcggtgggcagccatgagaacaaaacctcttctgtattttttttttccattagtaaaacacaagacttcagattcagccgaattgtggtgtcttacaaggcaggcctttcctacagggggtggagagaccagcctttcttcctttggtaggaatggcctgagttggcgttgtgggcaggctactggtttgtatgatgtattagtagagcaacccattaatcttttgtagtttgtattaaacttgaactgag

SEQ ID NO: 2465 - protein, 199 aa, Homo sapiens
MSSGNAKIGHPAPNFKATAVMPDGQFKDISLSDYKGKYVVFFFYPLDFTFVCPTEIIAFSDRAEEFKKLNCQVIGASVDSHFCHLAWVNTPKKQGGLGPMNIPLVSDPKRTIAQDYGVLKADEGISFRGLFIIDDKGILRQITVNDLPVGRSVDETLRLVQAFQFTDKHGEVCPAGWKPGSDTIKPDVQKSKEYFSKQK

SEQ ID NO: 2466 - DNA, 1049 bp, Homo sapiens
gcccggtgccaagcgcagctagctcagcaggcggcagcggcggcctgagcttcagggcagccagctcctcccggtctcgccttcctcgcggtcagcatgaaagccttcagtcccgtgaggtccgttaggaaaaacagcctgtcggaccacagcctgggcatctcccggagcaaaacccctgtggacgacccgatgagcctgctatacaacatgaacgactgctactccaagctcaaggagctggtgcccagcatcccccagaacaagaaggtgagcaagatggaaatcctgcagcacgtcatcgactacatcttggacctgcagatcgccctggactcgcatcccactattgtcagcctgcatcaccagagacccgggcagaaccaggcgtccaggacgccgctgaccaccctcaacacggatatcagcatcctgtccttgcaggcttctgaattcccttctgagttaatgtcaaatgacagcaaagcactgtgtggctgaataagcggtgttcatgatttcttttattctttgcacaacaacaacaacaacaaattcacggaatcttttaagtgctgaacttatttttcaaccatttcacaaggaggacaagttgaatggacctttttaaaaagaaaaaaaaaatgaaggaaaactaagaatgatcatcttcccagggttcttacttgactgtaattcgttatttatgaaaaaaccttttaaatgccctttctgcagttggaaggttttctttatatactattcccaccatggggagcgaaaacgttaaaatcacaaggaattgcccaatctaagcagactttgccttttttcaaaggtggagcgtgataccagaaggatccagtattcagtcacttaaatgaagtcttttggtcagaaattacctttttcacacaagcctactgaatgctgtgtatatatttatatataaatatatctatttgagtgaaaccttgtgaacctttaattagagtcttcttgtatagtggcagagatgtctattctgcatcaaagtgtaatgatgtact

SEQ ID NO: 2467 - protein, 134 aa, Homo sapiens
MKAFSPVRSVRKNSLSDHSLGISRSKTPVDDPMSLLYNMNDCYSKLKELVPSIPQNKKVSKMEILQHLIDYILDLQIALDSHPTIVSLHHQRPGQNQRSRTPLTTLNTDISILSLQASEFPSELMSNDSKALCG

SEQ ID NO: 2468 - DNA, 1762 bp, Homo sapiens
gctaatcccagtcggtgccgcatccccagcccgccgccatggccgcctacaaactggtgctgatccggcacggcgagagcgcatggaacctggagaaccgcttcagcggctggtacgacgccgacctgagcccggcgggccacgaggaggcgaagcgcggcgggcaggcgctacgagatgctggctatgagtttgacatctgcttcacctcagtgcagaagagagcgatccggaccctctggacagtgctagatgccattgatcagatgtggctgccagtggtgaggacttggcgcctcaatgagcggcactatgggggtctaaccggtctcaataaagcagaaactgctgcaaagcatggtgaggcccaggtgaagatctggaggcgctcctatgatgtcccaccacctccgatggagcccgaccatcctttctacagcaacatcagtaaggatcgcaggtatgcagacctcacagaagatcagctaccctcctgtgagagtctgaaggatactattgccagagctctgcccttctggaatgaagaaatagttccccagatcaaggaggggaaacgtgtactgattgcagcccatggcaacagcctccggggcattgtcaagcatctggagggtctctctgaagaggctatcatggagctgaacctgccgactggtattcccattgtctatgaattggacaagaacttgaagcctatcaagcccatgcagtttctgggggatgaagagacggtgcgcaaagccatggaagctgtggctgcccagggcaaggccaagaagtgaaggccggcggggaggatactgtccccaggagcaccctccctgcccgtcttgtccctctgcccctcccacctgcacatgtcacactgaccacatctgtagacatcttgagttgtagctgcagacggggaccagtggctcccattttcattttagccattttgtcgcctgcacccactcccttcatacaatctagtcagaatagcagttctagagcacaggttctcagtctaagctatggaaaagctccccttatccaacagagtttaaaagtagtgacttgggtttttgcgagtgctttgtttactaaggactttggggaggaaccatgctaagccatgaccagtgaggagaagcaacagagcctgtctgtccccatgagcggagtctgtcctctgctcttctgcagtcaggtcactgcctactgcctgggggctctagtcattccagtggaagacgaatgtaacctgcgtggtgatgtgacaactgtttcctccctgaccccagaggatctggctctaggttgggatcaatcctgaatttcgttatgtgttaatttacttttattaaaaaagtatagtatatataatacaaaacaataacccttctggggtttcttgtggcggttgaaatagtcccacatgtggtcatcagaaaataagccattcctcataccaatataggatcagctccttgacctctgaggggcaggagtgcttcctggtgtgtgtattagaatcccttcctgccttgtttcatggcagtgaaatgcctcttggtcctgtccaagtgtatctttcactgatttctgaatcatgttctagttgcttgaccctgccacatgggtccagtgttcatctgagcataactgtactaaatcctttttccatatcagtataataaaggagtgatgtgcaataaaaaaaaaaaaaaaaaaaaaaaaaaaaaaaaaaaaaaaaaaa

SEQ ID NO: 2469 - protein, 254 aa, Homo sapiens
MAAYKLVLIRHGESAWNLENRFSGWYDADLSPAGHEEAKRGGQALRDAGYEFDICFTSVQKRAIRTLWTVLDAIDQMWLPVVRTWRLNERHYGGLTGLNKAETAAKHGEAQVKIWRRSYDVPPPPMEPDHPFYSNISKDRRYADLTEDQLPSCESLKDTIARALPFWNEEIVPQIKEGKRVLIAAHGNSLRGIVKHLEGLSEEAIMELNLPTGIPIVYELDKNLKPIKPMQFLGDEETVRKAMEAVAAQGKAKK

SEQ ID NO: 2470 - DNA, 861 bp, Homo sapiens
gccgggcgtgcagggccccgccgccgccatgtcgggctcgttcgagctctcggtgcaggatctcaacgacctgctctcggacggcagcggctgctacagcctcccgagccagccctgcaacgaggtcaccccgcggatctacgtgggcaacgcgtctgtggctcaggacatccccaagctgcagaaactaggcatcacccatgtgctgaacgcggctgagggcaggtccttcatgcacgtcaacaccaatgccaacttctacaaggactccggcatcacatacctgggcatcaaggccaacgacacacaggagttcaacctcagcgcttactttgaaagggctgccgacttcattgaccaggctttggctcaaaagaatggccgggtgctcgtccactgccgggaaggttatagccgctccccaacgctagttatcgcctacctcatgatgcggcagaagatggacgtcaagtctgccctgagcatcgtgaggcagaaccgtgagatcggccccaacgatggcttcctggcccagctctgccagctcaatgacagactagccaaggaggggaagttgaaaccctagggcacccccaccgcctctgctcgagaggtccgtgggggaggccgtgggaaaggtgtccgagctgccatgtttaggaaacacactgtaccctgctcccagcatcacaaggcacttgtctacaagtgtgtcccaacacagtcctgggccactttccccaccctggggagcacataaagaagcttgccaaggggggcgtccttgctccccagttgtcctgtttctgtaacttatgatgtcttttccctgagatgggggctcagagggggaaggcctgt

SEQ ID NO: 2471 - protein, 185 aa, Homo sapiens
MSGSFELSVQDLNDLLSDGSGCYSLPSQPCNEVTPRIYVGNASVAQDIPKLQKLGITHVLNAAEGRSFMHVNTNANFYKDSGITYLGIKANDTQEFNLSAYFERAADFIDQALAQKNGRVLVHCREGYSRSPTLVIAYLMMRQKMDVKSALSIVRQNREIGPNDGFLAQLCQLNDRLAKEGKLKP

SEQ ID NO: 2472 - DNA, 705 bp, Homo sapiens
tttgtagcatagctcatgttattgtttaaacagtttttgcataggaaatatatccgcttccagtaattgactgcagtatgagcagctgctagcagtataggctggatataacagtaaccaatcacataaagtcaagcttgatttacaccagtttaaaaccttggggcaattgaagtcatttgcaacccacaaaaagtacccaaagaaccgtatccttcaaccgggcaccattaaaccttcacttaccttctggcccaatctgggggtgatcccaaaagcctggacttttgaaattaaggaaccggccgattataccttcttctgttaagggttggtacattgagattgtgcatgtgcctccttttggaaaaaatttaattaaatacaaggttctgtatttatggccatgaggaccaatgcgcaaagttttaaagggtcacactggggtgtgatttagaaggaaaatgatcctcggacctcacgggtctaaatggttttaaggacccacaagctccaaagttgttctaaagaaatatttgggggggggcgtttttccggatgttaaagtcttattatataaagcactaatacttgtggaaaaacatatctgcgccttggaacctgcgggggggggtccctacatttaacgtgtgaaaattttttccaaaaaggctttaacaaattcaccggaacaaaaaagctgaa

SEQ ID NO: 2473 - DNA, 1600 bp, Homo sapiens
ggccaaaagttgacttattttgaatggactacattatagcttaactagattgtacgagtgcttatcaactaatatgttaaaatatggtaattccttttttttttttttgagatggagtccagcctgggtgacagagtgagaccctatttcaaaaaaataaaaattggaagaagagcttaaaaaagataagattttaaagagtcccaagttatttaagttgagtgtaattgtcatttaaggaaggcaaatgagtttatcatccttcttaaagagcatctcttttaactgttggacaaaaccataactttgtcattttacaaggaagaacctcttaagaagtcctcagaaccagaagcaatgtgaactctcagcgctggtcctggtgggtttgctgaccatgactgggcaagccgttctttttgctgccatcttcctcatcataaagtgtggaacataggcaattgctttgagattcttggatagaagaggacaacattctgcacctgcccccttttttaaatctttggggaaagatgagtaactttccccactactctgccttcctgttcagtaactcttacttttgcctgaagtaacagcatcttctacttctccatctagagatttttgtgtgtgtgccatcaaggttagcaaactttatacgtagcctaacacttaaaaaatgcactcattatcttaaacctaataaattccagagtttattttggttctcctctgttgcccttcctaaaaaatgagctgaagatgacagtatttttctttacatgcttggttatgacttttaaagttttatttaaataaatgttgaagctcaagtttaaagaagcgttgcagaggcccacggtctcctgggtcccggccacctgtccatattccacatttgctgactgtgctccctgcactccactcaagttgagagttcaaatagtcttgaaggggaatcagcttcaggatggaaggacccaggagaggccccgaggtgggagggttctgtaaatacagactactgcgagtgtccagagctctctgccatgatacttccttgggactgacttggctgagaacgtgttctgtcagaggatttgttagaactctgcccttttgtctgaaactcaaggccaaggagaatgataggagacttaggacagagctgacccttgcaccaggctgggaggctgcagcccttttagatgccacttactgtaagtggccagaataccagagaggtgggttccatggtcaaatgcacagtaggtgtttacctttacatttggatcaccttgtagtctttaaattcttggtccctgaggccaagtccacaacttgccttctagtcacttgcctgcccgcagtggtggtggatgtgttagctggtagatttggaatcagtcaccagtctttctgtactgtcttggttagctctatataagtaggggcagcttagccctgaggcccagagacctgctgtcctttttctccttgagggaggaaataaaactgcggaatacaatgtccttccatagcatgggaagaagaaaataaacatctcctttccaacaaaaaaaaaaaaaaaaaaaaa

SEQ ID NO: 2474 - protein, 158 aa, Homo sapiens
MEGPRRGPEVGGFCKYRLLRVSRALCHDTSLGLTWLRTCSVRGFVRTLPFCLKLKAKENDRRLRTELTLAPGWEAAALLDATYCKWPEYQRGGFHGQMHSRCLPLHLDHLVVFKFLVPEAKSTTCLLVTCLPAVVVDVLAGRFGISHQSFCTVLVSSI

SEQ ID NO: 2475 - DNA, 5932 bp, Homo sapiens
ggggcactgaggagcggcgcccgcggggcagcgaggagcccgatgcagggttctgcgcgtcatttccggtcccgcgggcgccccgtgaagcccacctggatccgccagcgctgtgccactccccagtgccgagctccgagctgtctccgcggcctcgcgcccggcccctccaccgcgcacctcttaggccccgcccgccagcgtccctttgttgtgaaggcgccggggcctagcgctatgcctgcggcggagactgcatcaggctctcgcgtctgcttctgcgctttgcctgggagaggccctggtggcctcgttcctggcgcccggagtccctgctgcggccccacccccgggcggtcacggtgacccatgctgcccagcctggaggtaaaatcgttcgtggctgtggcttcagcatgtcgtcctcggtgaaaaccccagcactggaagagctggttcctggctccgaagagaagccgaaaggcaggtcgcctctcagctggggctctctgtttggtcaccgaagtgagaagattgtttttgccaagagcgacggcggcacagatgagaacgtactgaccgtcaccatcacggagaccacggtcatcgagtcagacttgggtgtgtggagctcgcgggcgctgctctacctcacgctgtggttcttcttcagcttctgcacgctcttcctcaacaagtacatcctgtccctgctgggaggcgagcccagcatgctaggtgcggtgcagatgctgtccaccacggttatcgggtgtgtgaaaaccctcgttccttgctgtttgtatcagcacaaggcccggctttcctacccacccaacttccttatgacgatgctgtttgtgggtctgatgaggtttgcaactgtggttttgggtttggtcagcctgaaaaatgtggcggtttcgtttgctgagacggtgaagagctccgcccccatcttcacggtgatcatgtctcggatgattctgggggagtacacagggctgctggtcaacctctccctcatcccagtcatgggcgggctggcgctgtgcacggccactgagatcagcttcaatgtcctggggttctcggccgcactgtccaccaacatcatggactgtttgcaaaatgttttttcaaaaaagctgctcagcggggacaaatacaggttctcggccccggagctgcagttctacaccagcgccgctgcggtggccatgctcgtcccggcccgggttttctttacggacgtcccagtgatcgggaggagcgggaagagcttcagctacaaccaggacgtggtgctgctgcttctgacagacggagtcctgttccaccttcagagcgtcacggcgtacgccctcatggggaaaatctccccggtgactttcagcgtcgccagcaccgtgaaacatgccttgtccatctggctcagcgtaatcgttttcggcaacaagatcaccagcttgtcggccgttggcacagccctggtgaccgttggggtcctgctctacaacaaagccaggcaacaccagcaggaggcgctgcagagcctggctgcagccactggccgggccccagacgacacagtggagccgctgcttccacaggaccccaggcagcatccctgagagcaggaagctgccagctgctgctgtcctcgtgacactgcatcccccagaaatgggcagggacgccctcctccatggccctgctggggtgcaggacatggggagctaagttggccattgcctgcggctttctcggtttgtcggtgaagaccagcagaaactcaaactggggattccaggtatcagcttcctggagtagacaccagaccagtagctgactgtgtccgccgagcccatccccgtgtaatgtgaaaacagcctctgaggctcccatgctgggggtgcccacttcctctctgggcgacaccccagggtccaccgggagccagaggtgggtccagtgccaacgagagccgctccctgccacagccaagagagccctcggcttcccacaccagccatcgaaggccctgaggccctggaccggcggcagactggccctgggcatgaggccacagagcagggccgaagggaggggacagagggccctggaaggaagggtctcctgctgccacggtgggcactcagaacttctccccacctgacccagggctgtgggcatcctcagactatcccagaggcatcgcaagcctcaagctgcagcattgcacggcactcaagggctatgaccacggaggccgttcagtcgcttctgtttagaggaaggccccctacctcttccacaccctgccctcctatcccttccacaccctgggctgcatgagctccccgcaaccccagggcaccctgccctcctacctgtgggggtttccagccctgaggttgaggacaaacctctcgtgtttaacttgggaggagatgtgtacgttccttttcttttttggactctgagtatgaggcaggctgttctgaggtccccgtggggtgagcctgtctgtcctccctcagagcccaccgttcctatcatcatctagcacctgtccggttccccacgtgagccttgggcaggacgctgcagtgttgatggtttgggttacgtggcgtttacctgggcgccgtccttgctgaaaaaggaaacgtccacactgaatgtttctggggcgcgtggtgtgtgtcaggcgcccaccctgtcccactctccccaagggacagtagtacggcacactggggccaccagccagctcaactcatcctcctgtgtcacgcacccccgagggcgcaggaggcctgaggagtggctactggagccgtgtgttaggcagaggcttctgaccatgtctgagctctttacccccaatctcgcaaccggcggattcccatgcccggtgcagcctgttgccagccagcctttgagacccagagctccagggcttgtcagaggcagcatggggctccagtggtcccgagtctcatttccctgcctgctctttaggcctttggcacccatggtcacttcactggttttccatttggcttctcacctgggaaatacaaaaatagcccctcctgaagataaaatcgttcagaaacagagcaataattctgactcattaacttctacctactcaaaaaagtctgccatgatgatggaccgaagtgaggctttttaacccacaagtaacctttttatttttttgagacggtcttgctctgtcacccaggctggagtgcagtggcatgatcttggctcgctgcagcctcgacttcctgggctcaagtgatccacctcagcctcccatgtggctggaaccgcaggcacgtgccaccatgcctggctatttttttgttgagctgggctctcgctttgttgcccaggctggtcttgaactcctcggctcaagcaatccttcccactcagcctcctgtagtgtcgagaatataggcgtgggctactacacctgcttcagccgcttctataaaaccgctgacctgtgtgtggaggacaggccaggtgtgtgctcactgcgctgcgaagatgttttgtcacgtgactttccctgggtttccatttctttttttctgctttcctcaaaaactaatagaagaccggctgcggtagctcaggcctctagtcccagcactttgggaggctgcagatggcggatcacaaggccaggagttcgagaccagcctggccaacatgatgaaaccctgtctctaccaaaaatacaaaaattagctgggtgtgatggtgggtgcctgtggtctcagctactcaggaggctgaggcaggagaattgtttgagccccagaggcggaggttgcagtgagccaagatcgtgccattgcactccagcctgggcaacagggcaagattccgtctcaaaaacaaacactattagaaaatgctctggaggtggcggggagttgttgatttgtgaggacagattgaaagcaactcccagggtggccttgtccacctccccatcgagaatatggctgccggcctctttgaagattgtggtctggcataaggagaggtgcaggcgcctggttctgagcaccttggaatttccagccgcacagcatctggtgccctcccctccaccctcacaaggagctgccatcctgtttggattttctgtttgtggaccagaaacaaacgtttttccaaaggattagcaaataggttgatttcctgtgtaacgctgctctggggcctcttcctcatcctggcagaaggagcctggagcccatgaggcagccagcactgtgcccttgctcagtcgtgctgtcccctccctctccctcagtctcttctccatgcccaagtcagtttccagccgctggtcttcatggcattcccagcacagctggacaccaagaggcaaaacccaaggcctggcttggccgtgttaacgattgtacagacatttttttaaataactttgtgtaatacttttctagaatagtaagttcttgttgaactgtcacagatgagcttctaggaacacaccgggtgtggttacttccactgggtgtgtccatggtcgtggtctgtgcctttgtaaacaaacagaacacttgaaccaccttccgaattgggtcatcggcttctttacattgatacttagagatttgcagctctctaactttcaaggaaacttcccctactgaaaggcataaaaaggttaaaaaagaaaatccgagagtcccaattccctgtataacagcattaaaataatctgcctgcctggaaagatgagaacactgttgcacaacccaaaatgtgtttttaatttgtgaaaaattaccatggtgagtcagacagtcattttaaacagctgaacagagactatcatcagcaaatagagctcagctttgtagctgcctttaaaatccttgtcccaaatccggtgagctctgcttgctgccgccgcgctcctgggtgatcactcagacgggtcagtgggaataacgggccaacaagacagctttttacatgtgtccaaaggatggcctttcgaaggcctggaagtatttcactgttggaagaagtaaacaagaatgacattccagatggaaatagaattctctctcttgcctttgaccaacatggtactaaggggtttcttctttcccaatgtatgtacgtgccctgctgggggccttactttatagaatgagagcatccgagcttccctaatgaatctggctagttctgtgtctggctgaggatacaggagtgggacatccactctcggatccctcagagcacagaaaccttcagctttgctgtctctgaagtatttcctccagtttccctgcgggcccctatgtttgagtttgatggctgctggatcctcactcaacgaaaactcggttggaaactgttccgcctggcagtccttttttgttgttttccatctcatttcccttccatctgaaagtggcattcagctgacttgctcatttagactgttcacggagtctgaatctgccaacgtggtgttggaggctccaccttgaaaagggccacagtcagggcaactttccccatacaggaaaacttgaaaattacatcaacagtctacgtcacagccaaattatatttcctttataccaaacaaaactatggagaactaaaagtacatcacacaaaacgtttatagtgttttgcatgtgacctatttcagtatttatataactagattagtgctttctagcaaacggttctgttaattagcgagtcactgttgattctgctgtggtggtaagttgataccgtgtaactaatcccgtggatgcctcctcgttatttttgtccaaacgaagcagccgtggtagtagctgtctatgattcttgctcagcaaagtaaaataaatgttaaatatgg

SEQ ID NO: 2476 - protein, 466 aa, Homo sapiens
RYACGGDCIRLSRLLLRFAWERPWWPRSWRPESLLRPHPRAVTVTHAAQPGGKIVRGCGFSMSSSVKTPALEELVPGSEEKPKGRSPLSWGSLFGHRSEKIVFAKSDGGTDENVLTVTITETTVIESDLGVWSSRALLYLTLWFFFSFCTLFLNKYILSLLGGEPSMLGAVQMLSTTVIGCVKTLVPCCLYQHKARLSYPPNFLMTMLFVGLMRFATVVLGLVSLKNVAVSFAETVKSSAPIFTVIMSRMILGEYTGLLVNLSLIPVMGGLALCTATEISFNVLGFSAALSTNIMDCLQNVFSKKLLSGDKYRFSAPELQFYTSAAAVAMLVPARVFFTDVPVIGRSGKSFSYNQDVVLLLLTDGVLFHLQSVTAYALMGKISPVTFSVASTVKHALSIWLSVIVFGNKITSLSAVGTALVTVGVLLYNKARQHQQEALQSLAAATGRAPDDTVEPLLPQDPRQHP

SEQ ID NO: 2477 - DNA, 1221 bp, Homo sapiens
ccgaacgcccgcagcagggtcagaagggaggtggccggtctccgtcgtgacctctgacggtttctgagcgttggcctttggcacgcgctacacccttttgctttggttctgccatgccgatgtaccaggtaaagccctatcacgggggcggcgcgcctctccgtgtggagcttcccacctgcatgtaccggctccccaacgtgcacggcaggagctacggcccagcgccgggcgctggccacgtgcaggaagagtctaacctgtctctgcaagctcttgagtcccgccaagatgatattttaaaacgtctgtatgagttgaaagctgcagttgatggcctctccaagatgattcaaacaccagatgcagacttggatgtaaccaacataatccaagcggatgagcccacgactttaaccaccaatgcgctggacttgaattcagtgcttgggaaggattacggggcgctgaaagacatcgtgatcaacgcaaacccggcctcccctcccctctccctgcttgtgctgcacaggctgctctgtgagcacttcagggtcctgtccacggtgcacacgcactcctcggtcaagagcgtgcctgaaaaccttctcaagtgctttggagaacagaataaaaaacagccccgccaagactatcagctgggattcactttaatttggaagaatgtgccgaagacgcagatgaaattcagcatccagacgatgtgccccatcgaaggcgaagggaacattgcacgtttcttgttctctctgtttggccagaagcataatgctgtcaacgcaacccttatagatagctgggtagatattgcgatttttcagttaaaagagggaagcagtaaagaaaaagccgctgttttccgctccatgaactctgctcttgggaagagcccttggctcgctgggaatgaactcaccgtagcagacgtggtgctgtggtctgtactccagcagatcggaggctgcagtgtgacagtgccagccaatgtgcagaggtggatgaggtcttgtgaaaacctggctccttttaacacggccctcaagctccttaagtgaattgccgtaactgattttaaagggtttagattttaagaatggtgctctttcatgcctattatcagtaaggggacttgtattagagtcagagtctttttatttaggccagttgtcaagtgtcaataaaagcgcatcatgtaattta

SEQ ID NO: 2478 - protein, 320 aa, Homo sapiens
MPMYQVKPYHGGGAPLRVELPTCMYRLPNVHGRSYGPAPGAGHVQEESNLSLQALESRQDDILKRLYELKAAVDGLSKMIQTPDADLDVTNIIQADEPTTLTTNALDLNSVLGKDYGALKDIVINANPASPPLSLLVLHRLLCEHFRVLSTVHTHSSVKSVPENLLKCFGEQNKKQPRQDYQLGFTLIWKNVPKTQMKFSIQTMCPIEGEGNIARFLFSLFGQKHNAVNATLIDSWVDIAIFQLKEGSSKEKAAVFRSMNSALGKSPWLAGNELTVADVVLWSVLQQIGGCSVTVPANVQRWMRSCENLAPFNTALKLLK

SEQ ID NO: 2479 - DNA, 950 bp, Homo sapiens
gcgcggcggcgcagtaaacagtctccttccacaaaaccatggcgtcgctcaaatgtagcaccgtcgtctgcgtgatctgcttggagaagcccaaataccgctgtccagcctgccgcgtgccctactgctcggtagtctgcttccggaagcacaaagaacagtgcaaccctgaaactcgtcctgttgagaaaaaaataagatcagctcttcctaccaaaaccgtaaagcctgtggaaaacaaagatgatgatgactctatagctgattttctcaatagtgatgaggaagaagacagagtttctttgcagaatttaaagaatttaggggaatctgcaacattaagaagcttattgctcaatccacacctcaggcagttgatggtcaacctcgatcagggagaagacaaagcaaagctcatgagagcttacatgcaagagcctttgtttgtggagtttgcagactgctgtttaggaattgtggagccatcccagaatgaggagtcttaagatggattattgtgctgcttgctcaagcgtgtgcttgactcctggaacctgcctgctccctctcccagaccagctagtttggggctggggagctcaggcaaaagaggtttccaggatgcagattaggtcatgcaggcctttaccggcattgatgtggctcatgtttcaggcagacttggggtccttaaggtggcaagtcctttatggagagaaaacttgacattcagatgattgtttttaaatgttttacttttggtacagttgatagacatcataaacgatatcaagcttacacttcatatggagttaaacttggtcagtgttaataaaatcaaaacgtgattctactgtacattgcattattcataatttaattgtttgaaattacattaaataaatcaactaattaaatacgaaaaaaaaaaaaaaaaaaaaaaaaaaaaa

SEQ ID NO: 2480 - protein, 155 aa, Homo sapiens
MASLKCSTVVCVICLEKPKYRCPACRVPYCSVVCFRKHKEQCNPETRPVEKKIRSALPTKTVKPVENKDDDDSIADFLNSDEEEDRVSLQNLKNLGESATLRSLLLNPHLRQLMVNLDQGEDKAKLMRAYMQEPLFVEFADCCLGIVEPSQNEES

SEQ ID NO: 2481 - DNA, 1280 bp, Homo sapiens
gcggccgccgtggccaggcaacctatgggtaccaccgggttctcgcgggtcttgcgaacgaacttttccttgaaactctctggattcctgtaaacagtggggctcagcccctcaatgactggaggcttcgatggttcaaaggggacctccggaatcacagggccgggagtcgccatgtccgggccacagcagcaggagaaaatcgggactccgacctcagcctcccggtgaaggtcatgaaaggggcggggaaacgaataaattgagccttgtacgcaggcgcaaatgctcgttgcatcctgggagtcgtagtgctcagcacggtagtgctacaaaaggactacatttccccaaatgcccgcaaagccttgtgcacgccttccggaaggagtttgttacacgaggtctgagagacagaggcagcgtgtttgagctgctggtgcggtggtcagcgcgatgcccaaggccaagggcaaaacccggaggcagaagtttggttacagtgtcaaccgaaagcgtctgaaccggaatgctcgacggaaggcagcgcgcggaatcgaatgctcccacatccgacatgcctgggaccacgctaaatcggtacggcagaacctggccgagatggggttggctgtggaccccaacagggcggtgcccctccgtaagagaaaggtgaaggccatggaggtggacatagaggagaggcctaaagagcttgtacggaagccctatgtgctgaatgacctggaggcagaagccagccttccagaaaagaaaggaaatactctgtctcgggacctcattgactatgtacgctacatggtagagaaccacggggaggactataaggccatggcccgtgatgagaagaattactatcaagataccccaaaacagattcggagtaagatcaacgtctataaacgcttttacccagcagagtggcaagacttcctcgattctttgcagaagaggaagatggaggtggagtaactggtttacatcacagctgccccaggctgaggcgtcccccggaccagtgaagctggagccagggtgtaaggcaaggaggtgctgtgtggctccagaggggctggccaggtcccatggaatcagaaggttacacacacacgtgcacactccccgctctggggaaggaactgttctcagaggctccaatttatattcatctgggggttcacggaaaagccagaacctgctgttttcagggtgggtgatgtaaatatagtgtgtacataataaagcaaatatattttaaa

SEQ ID NO: 2482 - protein, 178 aa, Homo sapiens
MPKAKGKTRRQKFGYSVNRKRLNRNARRKAARGIECSHIRHAWDHAKSVRQNLAEMGLAVDPNRAVPLRKRKVKAMEVDIEERPKELVRKPYVLNDLEAEASLPEKKGNTLSRDLIDYVRYMVENHGEDYKAMARDEKNYYQDTPKQIRSKINVYKRFYPAEWQDFLDSLQKRKMEVE

SEQ ID NO: 2483 - DNA, 695 bp, Homo sapiens
accagctcagccaaatctccactctgctatagcagaagcaataatgtttgctttaaaaagatttcttgacctatgccttttcttagaaagtttgatagattagttagaacttcagatcatcagatcagtctcaaatgggtttcttggaattttatatttgacaatatttatactataccaaactcatttgcagttcttaggtttgttggttaaaacatttttttaaagcagtaagtttatagaaaatgttttcatttaatggaaggctggggaatgtccagcatcaacccctatggcatgcattcccaggggccttctcatctgggcctggaacctttggttcagggcttaggggagaacaggccacatggcaacagccacacagtcattgccttcaacacagagccacgtgtccccaaacagcaatagtcatgcccttgtccaggctgggatctaattgacacaataggtcgttgactccctcctagtagagctatctaggtttgtctggaaagtttccgaccctggcttataggcaccacacctcatgtactcctcatggcttggatctctgtattcagcctttgttcagtccaataaactttgagtagatgatctcaaaaaaaaaaaaaaagaaaaaaaaaaaaaaaaaaaaaaaaaaaaaaaaaaaaaaaaggaaaaaaaaaaaaaaaaag

SEQ ID NO: 2484 - DNA, 3385 bp, Homo sapiens
ggcagtcgcggaaggcgcgggagcttgcgtgctgctgggcctgagctgtctgtctcgtttctgtccgcgcgccctgcatcccggccccgggcgcccgctggaggtcgccgaggagccacagggctgactggtctgctgcccgggcccaggagtgcctggtgtagcagtcgcggagccatcccggcgtctgctgccatgaccgactctcccctcagaggagactcttcctcagcggtggctgcagagacagatgagcggcggctcctggccgcgggaccgtgagacgggttcgtggccggccatttagggggacgctgcgaccaccgcctgcgcccctccggactggttccttgggccccggaagctcgcggcgggccctgcgggaggcggcatgctcccgcggaggctgctggccgcctggctggcggggacgcggggcgggggcctgctggcgcttctggccaatcagtgccgcttcgtcacgggcctgcgcgtgcggcgcgcgcagcagatcgcgcagctctacggccgcctctactccgagagctcacgccgcgttctcctcggccgcctctggcgccggctgcacggccgtcctggccatgcctctgccttgatggcggcgttagccggcgtcttcgtttgggacgaggagaggatccaggaggaggagttgcagagatctattaatgagatgaagcggttggaagaaatgtcaaatatgtttcagagctctggagtccagcaccaccctccagaaccaaaagcccaaacagaagggaatgaagattcagagggcaaagagcaacgttgggaaatggtgatggataagaaacactttaagctgtggcggcgcccaattacaggcacccacctttaccagtaccgagtttttggaacctacacagatgtgacacctcggcagttcttcaatgttcagctggacacagagtatagaaaaaaatgggatgccctggtaatcaagctggaggtgattgagagggatgtggttagtggttccgaggttcttcactgggtaacccattttccttatccaatgtactcacgggattatgtttatgttcggcggtatagtgtggatcaggaaaacaacatgatggtgttggtgtcgcgtgctgtggagcatccgagtgtgccagagtctccagaattcgtcagggtcagatcatatgaatcccaaatggttatccgtccccacaagtcatttgatgagaatggctttgactacttactaacatacagtgacaatccccaaacggtgtttcctcgctactgtgttagttggatggtttccagtggcatgccagatttcctggagaagctgcacatggccactctgaaagccaagaatatggagattaaagtaaaggactacatctcagctaagcctctggaaatgagtagtgaagccaaggccaccagccagtcctctgagcgaaagaacgagggcagctgtggccctgctcggattgagtatgcttgacaggctttgggataagaagggacaaggtgcttctagccctgtctcagtccgttatcactctgctgtagaagggggacatgccacatgtattagaaggcatctgctgtaacttccagtgcaagataattcaataactgatgtcccatttcattcagagcccttattgctcttatcaaaacagaagaaggctacatttgtgggagtgttgtcatattctcaggccaactgttttgaaattcggtatctcactgagctaatctggaacaaacctctcacctcaggccagaaggggatgacctccatttgcttctctgagtagtttcctctgctgacattccaaatcccaccatcgattgtgcagcgctttggatttccttcagttctccaggtccacctggaaagtatagttggccagttgagtctctcaaatgaggggctactgggagtgctcttggtaacaatcatgatgtgaatgggtgtgaacgatacttggctatgttaagtgccttgtccgcaccttgcttttatctctagagacatgaagttattattaattttttttttttttaagtagagatggagtttcactctgtttcccaggctggtcttgaactcctgggccatgcctggccagggacatgaatttgtacaaagaaatttccctccctgcctgcacaatatcacccattgactcaccttatccaaagcaagtttcctgtgaatcggccagttcttctatattcattggatcattgcctccttcctaaccttccccatttaccaagaacactgggagactaatccttttagatagtagctttttgatgctcaaaacatcacatttaaatttagtttaaaaattttttaacttttgtgtcaaataggagttgaggaattgagcaggattctaccctagtccgattgtatagaaaacaccattttgattcaggtattatttttcatatttcaggtttgacttgttcttttcagaaggctaaagtcagaggaatgggggctgggccactcccttggagctctcagatctacagacaagctgtgtgaatgcatagatgtaatcttgtctcaaatactaatacagtggagatttggtttatgttaccattaagttcctctaaaaagtttttcttcctctcttcagagccaaaataaaagtgaactacactgttcagataaggtcacaatctgatgctgtcagtttgaccgagctggttttgcttatggtcatgctgcaatttgttagaataatagggatcaagttttaaatcctcctccttcccttttttctggagtcttgagggccagagtttttgtttttgtttttgtttttgttttcctgcttgctactgttttgtggtgttgaaaagtggtttaaacctgagactaacttaaacacttccttgaccttcttgttgcctgttcatttttgtgccaaggaagtagctgccccagtgtatgtcttgccttctccgcgtcattgttggaagaggagagatgcatcgagcagtcccagctgcttttcatttattacttcttctttccaggacctgacagaagtcagggaagagtccctgggttatgtccaaacttagcacctgcaattgttgggatgtggatggatgtgtgcataagagagagagagaatatgtgtgtgtgtgtgtgcgtctgcgagcgcacacacatgcacaagtgcgaaggagttgcggttgctccatgttctgacttagggcaatttgattctgcacttggggtctgtctgtacagttactcatgtcattgtaatgatttcactcctaactgtgacatttttatcaaatgtgtgaataaatacataaagattggtacaaaaaaaaaaaaaaaaaa

SEQ ID NO: 2485 - protein, 295 aa, Homo sapiens
MAALAGVFVWDEERIQEEELQRSINEMKRLEEMSNMFQSSGVQHHPPEPKAQTEGNEDSEGKEQRWEMVMDKKHFKLWRRPITGTHLYQYRVFGTYTDVTPRQFFNVQLDTEYRKKWDALVIKLEVIERDVVSGSEVLHWVTHFPYPMYSRDYVYVRRYSVDQENNMMVLVSRAVEHPSVPESPEFVRVRSYESQMVIRPHKSFDENGFDYLLTYSDNPQTVFPRYCVSWMVSSGMPDFLEKLHMATLKAKNMEIKVKDYISAKPLEMSSEAKATSQSSERKNEGSCGPARIEYA

SEQ ID NO: 2486 - DNA, 3175 bp, Homo sapiens
ggcagtcgcggaaggcgcgggagcttgcgtgctgctgggcctgagctgtctgtctcgtttctgtccgcgcgccctgcatcccggccccgggcgcccgctggaggtcgccgaggagccacagggctgactggttccttgggccccggaagctcgcggcgggccctgcgggaggcggcatgctcccgcggaggctgctggccgcctggctggcggggacgcggggcgggggcctgctggcgcttctggccaatcagtgccgcttcgtcacgggcctgcgcgtgcggcgcgcgcagcagatcgcgcagctctacggccgcctctactccgagagctcacgccgcgttctcctcggccgcctctggcgccggctgcacggccgtcctggccatgcctctgccttgatggcggcgttagccggcgtcttcgtttgggacgaggagaggatccaggaggaggagttgcagagatctattaatgagatgaagcggttggaagaaatgtcaaatatgtttcagagctctggagtccagcaccaccctccagaaccaaaagcccaaacagaagggaatgaagattcagagggcaaagagcaacgttgggaaatggtgatggataagaaacactttaagctgtggcggcgcccaattacaggcacccacctttaccagtaccgagtttttggaacctacacagatgtgacacctcggcagttcttcaatgttcagctggacacagagtatagaaaaaaatgggatgccctggtaatcaagctggaggtgattgagagggatgtggttagtggttccgaggttcttcactgggtaacccattttccttatccaatgtactcacgggattatgtttatgttcggcggtatagtgtggatcaggaaaacaacatgatggtgttggtgtcgcgtgctgtggagcatccgagtgtgccagagtctccagaattcgtcagggtcagatcatatgaatcccaaatggttatccgtccccacaagtcatttgatgagaatggctttgactacttactaacatacagtgacaatccccaaacggtgtttcctcgctactgtgttagttggatggtttccagtggcatgccagatttcctggagaagctgcacatggccactctgaaagccaagaatatggagattaaagtaaaggactacatctcagctaagcctctggaaatgagtagtgaagccaaggccaccagccagtcctctgagcgaaagaacgagggcagctgtggccctgctcggattgagtatgcttgacaggctttgggataagaagggacaaggtgcttctagccctgtctcagtccgttatcactctgctgtagaagggggacatgccacatgtattagaaggcatctgctgtaacttccagtgcaagataattcaataactgatgtcccatttcattcagagcccttattgctcttatcaaaacagaagaaggctacatttgtgggagtgttgtcatattctcaggccaactgttttgaaattcggtatctcactgagctaatctggaacaaacctctcacctcaggccagaaggggatgacctccatttgcttctctgagtagtttcctctgctgacattccaaatcccaccatcgattgtgcagcgctttggatttccttcagttctccaggtccacctggaaagtatagttggccagttgagtctctcaaatgaggggctactgggagtgctcttggtaacaatcatgatgtgaatgggtgtgaacgatacttggctatgttaagtgccttgtccgcaccttgcttttatctctagagacatgaagttattattaattttttttttttttaagtagagatggagtttcactctgtttcccaggctggtcttgaactcctgggccatgcctggccagggacatgaatttgtacaaagaaatttccctccctgcctgcacaatatcacccattgactcaccttatccaaagcaagtttcctgtgaatcggccagttcttctatattcattggatcattgcctccttcctaaccttccccatttaccaagaacactgggagactaatccttttagatagtagctttttgatgctcaaaacatcacatttaaatttagtttaaaaattttttaacttttgtgtcaaataggagttgaggaattgagcaggattctaccctagtccgattgtatagaaaacaccattttgattcaggtattatttttcatatttcaggtttgacttgttcttttcagaaggctaaagtcagaggaatgggggctgggccactcccttggagctctcagatctacagacaagctgtgtgaatgcatagatgtaatcttgtctcaaatactaatacagtggagatttggtttatgttaccattaagttcctctaaaaagtttttcttcctctcttcagagccaaaataaaagtgaactacactgttcagataaggtcacaatctgatgctgtcagtttgaccgagctggttttgcttatggtcatgctgcaatttgttagaataatagggatcaagttttaaatcctcctccttcccttttttctggagtcttgagggccagagtttttgtttttgtttttgtttttgttttcctgcttgctactgttttgtggtgttgaaaagtggtttaaacctgagactaacttaaacacttccttgaccttcttgttgcctgttcatttttgtgccaaggaagtagctgccccagtgtatgtcttgccttctccgcgtcattgttggaagaggagagatgcatcgagcagtcccagctgcttttcatttattacttcttctttccaggacctgacagaagtcagggaagagtccctgggttatgtccaaacttagcacctgcaattgttgggatgtggatggatgtgtgcataagagagagagagaatatgtgtgtgtgtgtgtgcgtctgcgagcgcacacacatgcacaagtgcgaaggagttgcggttgctccatgttctgacttagggcaatttgattctgcacttggggtctgtctgtacagttactcatgtcattgtaatgatttcactcctaactgtgacatttttatcaaatgtgtgaataaatacataaagattggtacaaaaaaaaaaaaaaaaaaaaaaa

SEQ ID NO: 2487 - DNA, 1830 bp, Homo sapiens
ggcacgagggtgcagcccgtgccccccgcgcgccggggccgaatgcgcgccgcgtagggtcccccgggccgagaggggtgcccggagggaagagcgcggtgggggcgccccggccccgctgccctggggctatggccatggtgaccggcggctggggcggccccggcggcgacacgaacggcgtggacaaggcgggcggctacccgcgcgcggccgaggacgactcggcctcgccccccggtgccgccagcgacgccgagccgggcgacgaggagcggccggggctgcaggtggactgcgtggtgtgcggggacaagtcgagcggcaagcattacggtgtcttcacctgcgagggctgcaagagctttttcaagcgaagcatccgccgcaacctcagctacacctgccggtccaaccgtgactgccagatcgaccagcaccaccggaaccagtgccagtactgccgtctcaagaagtgcttccgggtgggcatgaggaaggaggcggtgcagcgcggccgcatcccgcactcgctgcctggtgccgtggccgcctcctcgggcagccccccgggctcggcgctggcggcagtggcgagcggcggagacctcttcccggggcagccggtgtccgaactgatcgcgcagctgctgcgcgctgagccctaccctgcggcggccggacgcttcggcgcagggggcggcgcggcgggcgcggtgctgggcatcgacaacgtgtgcgagctggcggcgcggctgctcttcagcaccgtggagtgggcgcgccacgcgcccttcttccccgagctgccggtggccgaccaggtggcgctgctgcgcctgagctggagcgagctcttcgtgctgaacgcggcgcaggcggcgctgcccctgcacacggcgccgctactggccgccgccggcctccacgccgcgcctatggccgccgagcgcgccgtggctttcatggaccaggtgcgcgccttccaggagcaggtggacaagctgggccgcctgcaggtcgactcggccgagtatggctgcctcaaggccatcgcgctcttcacgcccgacgcctgtggcctctcagacccggcccacgttgagagcctgcaggagaaggcgcaggtggccctcaccgagtatgtgcgggcgcagtacccgtcccagccccagcgcttcgggcgcctgctgctgcggctccccgccctgcgcgcggtccctgcctccctcatctcccagctgttcttcatgcgcctggtggggaagacgcccattgagacactgatcagagacatgctgctgtcggggagtaccttcaactggccctacggctcgggccagtgaccatgacggggccacgtgtgctgtggccaggcctgcagacagacctcaagggacagggaatgctgaggcctcgaggggcctcccggggcccaggactctggcttctctcctcagacttctattttttaaagactgtgaaatgtttgtcttttctgttttttaaatgatcatgaaaccaaaaagagactgatcatccaggcctcagcctcatcctccccaggacccctgtccaggatggagggtccaatcctaggacagccttgttcctcagcacccctagcatgaacttgtgggatggtggggttggcttccctggcatgatggacaaaggcctggcgtcggccagaggggctgctccagtgggcaggggtagctagcgtgtgccaggcagatcctctggacacgtaacctatgtcagacactacatgatgactcaaggccaataataaagacatttcctacctgcaaaaaaaaaaaaaaaaaa

SEQ ID NO: 2488 - protein, 404 aa, Homo sapiens
MAMVTGGWGGPGGDTNGVDKAGGYPRAAEDDSASPPGAASDAEPGDEERPGLQVDCVVCGDKSSGKHYGVFTCEGCKSFFKRSIRRNLSYTCRSNRDCQIDQHHRNQCQYCRLKKCFRVGMRKEAVQRGRIPHSLPGAVAASSGSPPGSALAAVASGGDLFPGQPVSELIAQLLRAEPYPAAAGRFGAGGGAAGAVLGIDNVCELAARLLFSTVEWARHAPFFPELPVADQVALLRLSWSELFVLNAAQAALPLHTAPLLAAAGLHAAPMAAERAVAFMDQVRAFQEQVDKLGRLQVDSAEYGCLKAIALFTPDACGLSDPAHVESLQEKAQVALTEYVRAQYPSQPQRFGRLLLRLPALRAVPASLISQLFFMRLVGKTPIETLIRDMLLSGSTFNWPYGSGQ

SEQ ID NO: 2489 - DNA, 3018 bp, Homo sapiens
ataaaaccggcccggttctgtggaaagtgggcggcggagccagggtccctggaatggcggagactctgtcaggcctaggtgattctggagcggcgggcgcggcggctctgagctccgcctcgtcagagaccgggacgcggcgcctcagcgacctgcgagtgatcgatctgcgggcggagctgaggaaacggaatgtggactcgagcggcaacaagagcgttttgatggagcggctgaagaaggcaattgaagatgaaggtggtaatcctgacgaaattgaaattacctccgagggaaacaagaaaacatcaaagaggtctagcaaagggcgcaaaccagaagaagagggtgtggaagataacgggctggaggaaaactctggggatggacaggaggatgttgagaccagtctggagaacttgcaggacatcgacatcatggatatcagtgtgttggatgaagcagaaattgataatggaagcgttgcagattgtgtcgaagacgatgatgctgataacctccaggagtccctgtcggatagtagagagctagtcgagggggaaatgaaagagcttccggagcagcttcaggaacatgctatagaggacaaagaaactataaacaatttagatacttcatcatctgacttcactatattacaggaaattgaagagccatccctggagccagaaaatgagaaaatactcgacattttgggggaaacttgtaaatctgagccagtaaaagaagaaagttccgagctggagcagccatttgcacaggacacaagtagcgtggggccagacagaaagcttgcggaggaagaggacctatttgacagcgcccatccggaagagggtgatttagatttggccagcgagtcaacagcacacgctcagtcgagcaaggcagacagcctgttagcggtagtgaaaagggagcccgcggagcagccaggcgatggcgagaggacggactgtgagcctgtagggctagagccggcagttgagcagagtagtgcggcctccgagctcgcggaggcctctagcgaggagctcgcagaagcacccacggaagccccaagcccagaagccagagatagcaaagaagacgggaggaagtttgattttgacgcttgtaatgaagtccctccggctcctaaagagtcctcaaccagtgagggcgctgatcagaaaatgagttctcccgaagatgactcggatacaaaaaggctttccaaagaggaaaagggtcgcagcagttgtggtagaaatttctgggttagtggactctcttctacaaccagagctacagatttgaagaatcttttcagcaaatatgggaaggtggtgggcgccaaggttgtgacaaatgcccggagtcctggagctcgctgttacggttttgtcacgatgtccacagcagaagaggccacaaaatgcattaaccacctgcacaagacggagctccacggaaagatgatctccgtggagaaagccaaaaatgaacctgtgggaaagaaaacctctgacaaaagagacagtgacgggaaaaaggagaagtcgagcaacagtgacagatctacaaaccttaagagggatgataaatgtgacagaaaagatgatgctaagaagggtgacgacggaagtggagaaaagagtaaggaccaagatgatcagaaacctggcccctcagagcgatctcgagccacaaagtcaggaagtcgagggaccgaacggactgtagtaatggataaatccaaaggggtgcctgtgattagtgtaaaaacgtccgggtccaaagagagagcttccaaaagccaggatcgcaaatcagccagcagagagaagcggtccgtcgtgtcctttgataaggtcaaggagcctcggaagtcaagagactcagagtcccatagcagggtgcgtgaacgcagtgaacgcgaacaacgcatgcaggcgcagtgggagcgcgaggagcgtgagcggctggagattgcccgagagaggctggccttccagcgccagcggctggagcgggagcgcatggagcgggaacggctggagcgcgaacgcatgcacgtggagcacgagcgcaggcgcgagcaggagcgcatccaccgtgagcgcgaggagctgaggcgccagcaggaactgcgctatgagcaggagcggcggcccgcggtgcggcggccctacgacctggaccggcgagatgatgcctattggccggaagccaagcgggccgccctggatgagcgctaccattctgactttaaccgccaggaccgcttccacgactttgaccacagggaccgcggccgctaccccgaccactcggtggacaggagagaaggttcaaggtcaatgatgggagaacgagaaggacagcattacccagaacgccatggaggaccagagcgccacggccgggactcccgcgatggctgggggggctatggctctgacaagaggatgagcgagggccgggggctgcctcctccccccagacgtgactggggggaccatggccgaagagaggatgaccggtcatggcagggcacggccgacgggggcatgatggacagggatcacaagaggtggcaaggtggcgagagaagcatgtccggtcactccgggcctggccacatgatgaaccgaggaggaatgtcagggcgcggcagctttgccccaggcggggcctcccggggccaccccatcccacacggtggcatgcagggcgggtttggaggccagagccgggggagcaggcccagcgatgcccgcttcactcgccgctactgagtacttggaatcctgtgtcctgtctcgtggcaacaaggctatgttctgttaggagttaccttaaactgtgtaaaaatatttttttttaatctgctgccatattgtagctcaatacaatgtgaatttgtttttcgttttggggttttttttttttgtaataaatgtgtttccgttcacataccctttaaaaaaaaaaaaaaaaaaaaaaaaaaaaaaa

SEQ ID NO: 2490 - protein, 915 aa, Homo sapiens
MAETLSGLGDSGAAGAAALSSASSETGTRRLSDLRVIDLRAELRKRNVDSSGNKSVLMERLKKAIEDEGGNPDEIEITSEGNKKTSKRSSKGRKPEEEGVEDNGLEENSGDGQEDVETSLENLQDIDIMDISVLDEAEIDNGSVADCVEDDDADNLQESLSDSRELVEGEMKELPEQLQEHAIEDKETINNLDTSSSDFTILQEIEEPSLEPENEKILDILGETCKSEPVKEESSELEQPFAQDTSSVGPDRKLAEEEDLFDSAHPEEGDLDLASESTAHAQSSKADSLLAVVKREPAEQPGDGERTDCEPVGLEPAVEQSSAASELAEASSEELAEAPTEAPSPEARDSKEDGRKFDFDACNEVPPAPKESSTSEGADQKMSSPEDDSDTKRLSKEEKGRSSCGRNFWVSGLSSTTRATDLKNLFSKYGKVVGAKVVTNARSPGARCYGFVTMSTAEEATKCINHLHKTELHGKMISVEKAKNEPVGKKTSDKRDSDGKKEKSSNSDRSTNLKRDDKCDRKDDAKKGDDGSGEKSKDQDDQKPGPSERSRATKSGSRGTERTVVMDKSKGVPVISVKTSGSKERASKSQDRKSASREKRSVVSFDKVKEPRKSRDSESHSRVRERSEREQRMQAQWEREERERLEIARERLAFQRQRLERERMERERLERERMHVEHERRREQERIHREREELRRQQELRYEQERRPAVRRPYDLDRRDDAYWPEAKRAALDERYHSDFNRQDRFHDFDHRDRGRYPDHSVDRREGSRSMMGEREGQHYPERHGGPERHGRDSRDGWGGYGSDKRMSEGRGLPPPPRRDWGDHGRREDDRSWQGTADGGMMDRDHKRWQGGERSMSGHSGPGHMMNRGGMSGRGSFAPGGASRGHPIPHGGMQGGFGGQSRGSRPSDARFTRRY

SEQ ID NO: 2491 - DNA, 2732 bp, Homo sapiens
gaagctctcctgtttgacgaaagtatgtctcaggaaggtgcggtcccagctagcgcggttcccctggaagaattaagtagctggccagaggagctatgccgccgggaactgccgtccgtcctgccccgactcctctcattgtctcaacattctgaaagttggattgagcatattcactgtgaaattattcgatgacatgatgtatgaattaaccagtcaagccagaggactgtcaagccaaaatttggaaatccagaccactctaaggaatattttacaaacaatggtgcagctcttaggagctctcacaggatgtgttcagcatatctgtgccacacaggaatccatcattttggaaaatattcagagtctcccctcctcagtccttcatataattaaaagcacatttgtgcattgtaagtttcagaccttctccaggctcttttcaaggaggcctattctcttcaaaagcagttaatggaactgctggacatggtttgcatggaccctttagtagatgacaatgatgatattttgaatatggtaatagttattcattctttattggatatctgctctgttatttccagtatggaccatgcatttcatgccaatacttggaagtttataattaagcagagccttaagcaccagtccataataaaaagccagttgaaacacaaagatataattactagcttgtgtgaagacattcttttctccttccattcttgtttacagttagctgagcagatgacacagtcagatgcacaggataatgctgactacagattatttcagaaaacactcaaattgtgtcgtttttttgccaactcccttttgcactacgctaaggaatttcttcctttcctctctgattcttgctgtactttgcaccaactgtatcttcagatacacagcaagtttcctccaagcctttatgctaccaggatttctaaagcacaccaagaggaaatagcaggtgctttcctagtgacactggatccacttatcagtcagctgctcacatttcagcctttcatgcaggtggttttggacagtaaattagacctgccatgtgaactgcagtttccacaatgtcttcttctggttgttgtcatggataagctgccatctcagcctaaggaagtgcaaaccctgtggtgcacagacagccaggtctcagaaacgacaaccaggatatctctactcaaagccgttttctacagttttgagcagtgttctggtgaactctctctacctgttcatttacagggattaaagagtaaggggaaagctgaggtggctgtcaccttgtatcagcatgtttgtgttcatctgtgtacatttattacttcctttcatccctcactgtttgctgaactggatgctgctctgctgaatgctgtacttagtgctaatatgatcacctctttgttagctatggatgcatggtgcttccttgctcgatatgggactgctgaactgtgtgcacaccatgtcaccatagtggctcatctgataaagtcatgccctggagaatgttatcaactcatcaacctatcaatactgttgaagcgtctctttttcttcatggcaccaccccatcagctggagtttatccagaaattttccccaaaagaagcagaaaatctgcctctgtggcaacatatttccttccaggcgttacctcctgagcttagggaacaaactgtccatgaggtcaccacagtaggcactgcagaatgcaggaaatggctgagcaggagtcgtactttgggagaactagaatctctgaacacagtactgtctgctttgcttgcagtatgtaattctgctggtgaagctttggatacaggaaaacaaactgcaattatcgaagttgtgagtcagctttgggcttttttaaacattaaacaggtagcagatcaaccttatgttcaacagacattcagccttttacttccactgttgggatttttcattcaaactctagatcctaaactgatacttcaggcagtaactttgcagaccttgctacttaaattagagcttcctgactatgttcgtttggcaatgttggattttgtatcttctttaggaaaactttttatacctgaagctatccaggacagaattctgcccaacctgtcctgtatgtttgccttactgctagctgacaggagttggctgctagaacaacataccttggaggcgtttactcagttcgctgagggaacaaatcatgaagagatagttccacagtgtctcagttctgaagaaactaagaacaaagttgtatcctttctggagaagactgggtttgtagatgaaactgaagctgccaaagtggaacgtgtgaaacaggaaaaaggtattttctgggaaccctttgctaatgtgactgtagaagaagcaaagaggtcatctttacagccttatgcaaaaagagctcgtcaggagttcccctgggaagaagagtacaggtcagcgctgcatacaatagcaggggctttggaagcaactgagtcactactccaaaagggtcctgctccagcctggctttcaatggaaatggaggcgctccaagaaaggatggataagctaaaacgttacatacatactctagggtgaaacttatcactaggcagaactgggtttgatgctttgtcaactgaaaatacttatgtctgtacattttctaacagatataaaacaaattttgtaaagtt

SEQ ID NO: 2492 - protein, 718 aa, Homo sapiens
MELLDMVCMDPLVDDNDDILNMVIVIHSLLDICSVISSMDHAFHANTWKFIIKQSLKHQSIIKSQLKHKDIITSLCEDILFSFHSCLQLAEQMTQSDAQDNADYRLFQKTLKLCRFFANSLLHYAKEFLPFLSDSCCTLHQLYLQIHSKFPPSLYATRISKAHQEEIAGAFLVTLDPLISQLLTFQPFMQVVLDSKLDLPCELQFPQCLLLVVVMDKLPSQPKEVQTLWCTDSQVSETTTRISLLKAVFYSFEQCSGELSLPVHLQGLKSKGKAEVAVTLYQHVCVHLCTFITSFHPSLFAELDAALLNAVLSANMITSLLAMDAWCFLARYGTAELCAHHVTIVAHLIKSCPGECYQLINLSILLKRLFFFMAPPHQLEFIQKFSPKEAENLPLWQHISFQALPPELREQTVHEVTTVGTAECRKWLSRSRTLGELESLNTVLSALLAVCNSAGEALDTGKQTAIIEVVSQLWAFLNIKQVADQPYVQQTFSLLLPLLGFFIQTLDPKLILQAVTLQTLLLKLELPDYVRLAMLDFVSSLGKLFIPEAIQDRILPNLSCMFALLLADRSWLLEQHTLEAFTQFAEGTNHEEIVPQCLSSEETKNKVVSFLEKTGFVDETEAAKVERVKQEKGIFWEPFANVTVEEAKRSSLQPYAKRARQEFPWEEEYRSALHTIAGALEATESLLQKGPAPAWLSMEMEALQERMDKLKRYIHTLG

SEQ ID NO: 2493 - DNA, 2874 bp, Homo sapiens
gtagtggccacagccttacaggcaggcaggggtggttggtgtcaacaggggggccaacagggtaccagagccaagaccctcggcctcctcccccgccgccttcctgcagatctgcttggctttgaggaagagtggcagtactgcctcactgcataagggatgggatcagagaacagtgctttaaagagctatacactgagagaaccaccatttaccttaccctctggacttgctgtttatcccgctgtactgcaagatggcaaatttgcttcagtttttgtgtataagagagaaaatgaagacaaggttaataaagctgccaagcatttgaagacacttcgtcacccttgcttgctaagatttttatcttgtactgtggaagcggatggcattcatcttgtcactgagcgagtacagcccctggaagtggctttggaaacattgtcttctgcagaggtctgtgctgggatctatgacatattgctggctcttatcttccttcatgacagaggacacctaacacacaataatgtctgtttatcatctgtgtttgtgagtgaagatggacactggaagctaggaggaatggaaactgtttgtaaagtttctcaggccacaccagagtttctgaggagtattcagtcaataagagacccagcatctatccctcctgaagagatgtctccagaattcacaactctcccagagtgtcatggacatgcccgggatgccttttcatttggaacattggtggaaagtttgctcacaatcttaaatgaacaggtttcagcggatgttctctccagctttcaacagaccttgcactcaactttgctgaatcccattccaaaatgtcggccagcgctctgcaccttactatctcatgacttcttcagaaatgattttctggaagttgtgaatttcttgaaaagtttaacattgaagagtgaagaggagaaaacggaattctttaaatttctgctggacagagtcagctgcttgtcagaggaattgatagcttcaaggttggtgcctcttctgcttaatcagttggtgtttgcagagccagtggctgttaagagttttcttccttatctgcttggccccaaaaaagatcatgcgcagggagaaactccttgcttgctctcaccagccctgttccagtcacgggtgatccccgtgcttctccagttgtttgaagttcatgaagagcatgtgcggatggtgctgctgtctcacatcgaggcctacgtggagcacttcactcaggagcagctgaagaaagtcatcttgccacaggttttgctgggcctgcgtgatactagtgattccattgtggcaattactctgcatagcctagcagtgctggtctctctgcttggaccagaggtggttgtgggaggagaacgaaccaagatcttcaaacgcactgccccaagttttactaaaaatactgacctttctctagaaggtgatccattttctcagcctattaaatttcccataaacggactctcagatgtaaaaaatacttcggaggacagtgaaaacttcccatcaagttctaaaaagtctgaggagtggcctgactggagtgaacctgaggagcctgaaaatcaaactgtcaacatacagatttggcctagagaaccttgtgatgatgtcaagtcccagtgcactaccttggatgtggaagagtcatcttgggatgactgcgagcccagcagcttagatactaaagtaaacccaggaggtggaatcactgctacaaaacctgttacctcagcggagcagaagcctattcctgctttgctttcactcactgaagagtctatgccttggaaatcaagcttaccccaaaagattagccttgtacaaaggggggatgacgcagaccaaatcgagccgccaaaagtgtcatcacaagaaaggccccttaaggttccatcagaacttggtttaggagaggaattcaccattcaagtaaaaaagaagccagtaaaagatcctgagatggattggtttgctgatatgatcccagaaattaagccttctgctgcttttcttatattacctgaactgaggacagaaatggtcccaaaaaaggatgatgtctccccagtgatgcagttttcctcaaaatttgctgcagcagaaattactgagggagaggctgaaggctgggaagaagaaggggagctgaactgggaagataataactggtgacaatagatgtgagttaaactttaggaaaaaggtttccctttttttaaaaaaaatcaatacctcaaaagcaggctttgggacaagaaaaccccaaagtggcctgcttttcccatcccaggagctcattatccagtctgtgccaactgaagtaggagactgactgtgagtgctggctaaaagccctgggtggtgaggctcacagtactggtttccaggaggaagagcctttgtgcatttgactgaggccagtttctatgaagagcaagtagctgaggagaggtcgaatttactgctttttccaggacaattccggaagtaaagaaaatgtaattcaagctggttagcttaattttgtgccattcttttctttaacataagagtaagctctattatgaaatacaactttaaaaaattttagctataaattatataaatgattttaaattgctgaggtttccttaggcagcttatttatttgtttacagttagactatctgagtaaatggttctttgtggacctaggcagttcctgactgttccacatgtagtacattgtaccaaagttcttaataagaatattccccacaatcctgttctctaaatgtcaaataaagattattttcactagaaaaaaaaaaaaaaaaaaaa

SEQ ID NO: 2494 - protein, 688 aa, Homo sapiens
MGSENSALKSYTLREPPFTLPSGLAVYPAVLQDGKFASVFVYKRENEDKVNKAAKHLKTLRHPCLLRFLSCTVEADGIHLVTERVQPLEVALETLSSAEVCAGIYDILLALIFLHDRGHLTHNNVCLSSVFVSEDGHWKLGGMETVCKVSQATPEFLRSIQSIRDPASIPPEEMSPEFTTLPECHGHARDAFSFGTLVESLLTILNEQVSADVLSSFQQTLHSTLLNPIPKCRPALCTLLSHDFFRNDFLEVVNFLKSLTLKSEEEKTEFFKFLLDRVSCLSEELIASRLVPLLLNQLVFAEPVAVKSFLPYLLGPKKDHAQGETPCLLSPALFQSRVIPVLLQLFEVHEEHVRMVLLSHIEAYVEHFTQEQLKKVILPQVLLGLRDTSDSIVAITLHSLAVLVSLLGPEVVVGGERTKIFKRTAPSFTKNTDLSLEGDPFSQPIKFPINGLSDVKNTSEDSENFPSSSKKSEEWPDWSEPEEPENQTVNIQIWPREPCDDVKSQCTTLDVEESSWDDCEPSSLDTKVNPGGGITATKPVTSGEQKPIPALLSLTEESMPWKSSLPQKISLVQRGDDADQIEPPKVSSQERPLKVPSELGLGEEFTIQVKKKPVKDPEMDWFADMIPEIKPSAAFLILPELRTEMVPKKDDVSPVMQFSSKFAAAEITEGEAEGWEEEGELNWEDNNW

SEQ ID NO: 2495 - DNA, 1327 bp, Homo sapiens
ggccgcccggcgcccccagcagcccgagccggggcgcacagccggggcgcagcccgcgccccccgccgcgattgacatgatgtttccacaaagcaggcattcgggctcctcgcacctaccccagcaactcaaattcaccacctcggactcctgcgaccgcatcaaagacgaatttcagctactgcaagctcagtaccacagcctcaagctcgaatgtgacaagttggccagtgagaagtcagagatgcagcgtcactatgtgatgtactacgagatgtcctacggcttgaacatcgagatgcacaaacaggctgagatcgtcaaaaggctgaacgggatttgtgcccaggtcctgccctacctctcccaagagcaccagcagcaggtcttgggagccattgagagggccaagcaggtcaccgctcccgagctgaactctatcatccgacagcagctccaagcccaccagctgtcccagctgcaggccctggccctgcccttgaccccactacccgtggggctgcagccgccttcgctgccggcggtcagcgcaggcaccggcctcctctcgctgtccgcgctgggttcccaggcccacctctccaaggaagacaagaacgggcacgatggtgacacccaccaggaggatgatggcgagaagtcggattagcagggggccgggacagggaggttgggaggggggacagaggggagacagaggcacggagagaaaggaatgtttagcacaagacacagcggagctcgggattggctaaactcccatagtatttatggtggccgccggcgggggccccagcccagcttgcaggccacctctagctttcttcctaccccattcccggcttccctcctcctcccctgcagcctggttaggtggatacctgccctgacatgtgaggcaagctaaggcctggagggtcagatgggagaccaggtcccaagggagcaagacctcgcgaagcgcagcagccccggcccttcccccgttttgaacatgtgtaaccgacagtctgcctgggccacagccctctcaccctggtactgcatgcacgcaatgctagctgcccctttcccgtcctgggcaccccgagtctcccccgaccccgggtcccaggtatgctcccacctccacctgccccactcaccacctctgctagttccagacacctccacgcccacctggtcctctcccatcgcccacaaaagggggggcacgagggacgagcttagctgagctgggaggagcagggtgagggtgggcgacccaggattccccctccccttcccaaataaagatgagggtact

SEQ ID NO: 2496 - protein, 197 aa, Homo sapiens
MMFPQSRHSGSSHLPQQLKFTTSDSCDRIKDEFQLLQAQYHSLKLECDKLASEKSEMQRHYVMYYEMSYGLNIEMHKQAEIVKRLNGICAQVLPYLSQEHQQQVLGAIERAKQVTAPELNSIIRQQLQAHQLSQLQALALPLTPLPVGLQPPSLPAVSAGTGLLSLSALGSQAHLSKEDKNGHDGDTHQEDDGEKSD

SEQ ID NO: 2497 - DNA, 1144 bp, Homo sapiens
cgactgaggcggcgggcggagcggcaggcggcggcggcgcggcagcggagcgcagcatcatggcggaccgagacagcggcagcgagcagggtggtgcggcgctgggttcgggcggctccctggggcaccccggctcgggctcaggctccggcgggggcggtggtggcggcgggggcggcggcggcagtggcggcggcggcggcggggccccaggggggctgcagcacgagacgcaggagctggcctccaagcgggtggacatccagaacaagcgcttctacctggacgtgaagcagaacgccaagggccgcttcctgaagatcgccgaggtgggcgcgggcggcaacaagagccgccttactctctccatgtcagtggccgtggagttccgcgactacctgggcgacttcatcgagcactacgcgcagctgggccccagccagccgccggacctggcccaggcgcaggacgagccgcgccgggcgctcaaaagcgagttcctggtgcgcgagaaccgcaagtactacatggatctcaaggagaaccagcgcggccgcttcctgcgcatccgccagacggtcaaccgggggcctggcctgggctccacgcagggccagaccattgcgctgcccgcgcaggggctcatcgagttccgtgacgctctggccaagctcatcgacgactacggagtggaggaggagccggccgagctgcccgagggcacctccttgactgtggacaacaagcgcttcttcttcgatgtgggctccaacaagtacggcgtgtttatgcgagtgagcgaggtgaagcccacctatcgcaactccatcaccgtgccctacaaggtgtgggccaagttcggacacaccttctgcaagtactcggaggagatgaagaagattcaagagaagcagagggagaagcgggctgcctgtgagcagcttcaccagcagcaacagcagcagcaggaggagaccgccgctgccaccctgctactgcagggtgaggaagaaggggaagaagattgatcaaactgaatgaaacccccacacacacacacatgcatacacacacacacacagccacacacacagaaaatatactgtaaagaaagagagaaaataaaaagttaaaaagttaaaaa

SEQ ID NO: 2498 - protein, 322 aa, Homo sapiens
MADRDSGSEQGGAALGSGGSLGHPGSGSGSGGGGGGGGGGGGSGGGGGGAPGGLQHETQELASKRVDIQNKRFYLDVKQNAKGRFLKIAEVGAGGNKSRLTLSMSVAVEFRDYLGDFIEHYAQLGPSQPPDLAQAQDEPRRALKSEFLVRENRKYYMDLKENQRGRFLRIRQTVNRGPGLGSTQGQTIALPAQGLIEFRDALAKLIDDYGVEEEPAELPEGTSLTVDNKRFFFDVGSNKYGVFMRVSEVKPTYRNSITVPYKVWAKFGHTFCKYSEEMKKIQEKQREKRAACEQLHQQQQQQQEETAAATLLLQGEEEGEED

SEQ ID NO: 2499 - DNA, 4295 bp, Homo sapiens
gaggaggttcctgtagggcggcacaaccagggagggcgtggaagctctgcatcccttctcccataccttgctctacacatctcttcatctgtatcctctgcagcatccttgatgataaaccagtaaatatgagttttgatcatcctgagaaaaatgggccttggcctgcagacccaataaaccttccctcccatggataatagtgctaattcctgaggacctgaagggcctgccgcccctgggggattagccagaagcaggcttgttttcctgctcagaacaaagtgacttccctgaacacatcttcattatgattcacaccaacctgaagaaaaagttcagctgctgcgtcctggtctttcttctgtttgcagtcatctgtgtgtggaaggaaaagaagaaagggagttactatgattcctttaaattgcaaaccaaggaattccaggtgttaaagagtctggggaaattggccatggggtctgattcccagtctgtatcctcaagcagcacccaggacccccacaggggccgccagaccctcggcagtctcagaggcctagccaaggccaaaccagaggcctccttccaggtgtggaacaaggacagctcttccaaaaaccttatccctaggctgcaaaagatctggaagaattacctaagcatgaacaagtacaaagtgtcctacaaggggccaggaccaggcatcaagttcagtgcagaggccctgcgctgccacctccgggaccatgtgaatgtatccatggtagaggtcacagattttcccttcaatacctctgaatgggagggttatctgcccaaggagagcattaggaccaaggctgggccttggggcaggtgtgctgttgtgtcgtcagcgggatctctgaagtcctcccaactaggcagagaaatcgatgatcatgacgcagtcctgaggtttaatggggcacccacagccaacttccaacaagatgtgggcacaaaaactaccattcgcctgatgaactctcagttggttaccacagagaagcgcttcctcaaagacagtttgtacaatgaaggaatcctaattgtatgggacccatctgtataccactcagatatcccaaagtggtaccagaatccggattataatttctttaacaactacaagacttatcgtaagctgcaccccaatcagcccttttacatcctcaagccccagatgccttgggagctatgggacattcttcaagaaatctccccagaagagattcagccaaaccccccatcctctgggatgcttggtatcatcatcatgatgacgctgtgtgaccaggtggatatttatgagttcctcccatccaagcgcaagactgacgtgtgctactactaccagaagttcttcgatagtgcctgcacgatgggtgcctaccacccgctgctctatgagaagaatttggtgaagcatctcaaccagggcacagatgaggacatctacctgcttggaaaagccacactgcctggcttccggaccattcactgctaagcacaggctcctcactcttctccatcaggcattaaatgaatggtctcttggccaccccagcctgggaagaacattttcctgaacaattccagcctgctccttttactctaggggcctctgtcagcaagaccatggggacttcaagagcctgtggtcaggaaatcaggtccagccttccctgtagccagacagtttatgagcccagagcctcctgccacacacatgcacacatatctagcattctttccagacagcatcctccccgccttccaccttggtagatgcaaggtctatctctcccatcagggctgccaaagctgggctttgtttttcccagcagaatgatgccattctcacaaaccaatgctctatattgcttgaagtctgcatctaaatattgatttcacgttttaaagaaattctcttaaattacaattgtgcccaatgcagggtggctctggggggcaagtaggtggtacaggggattggaaacatgctccgcgcctccagagaaaagttgctcccgaggtccatgcccctggaacgtgttcctatcactctggctggttgggctggtccttagactgggtgcttatgattaaagggtcttggttagcccactttccctctccatgtggagatggaaggtagagaaggatacagtgtctatcctcaagttgctacggttcagtgagagaggcagacatctgaacaggcaggtaggattcagtgtgctcagtgcactggggatttggagagagatgggcttgctctctctgtgcacccaggagggccacgcacttaaaactgtgtttgtggatcagagaaggctttatagcacagggggcattcagatgagtcttagaggaagagaagaaacatggcaagcagattacatctgagccgtttgaattgtgtttttctttcttcccatgtttattttctaagatctacctgaacttagagactcaagatatttttttaggaaacctcctacccatgtctgaggtagcaagtgcagcctcacgacagataccaggcaatccagagccacaaaacgtgattcctccaggctctgcctggcctgaccctgtcctgtcagctgggtttacataccagtcccattcttccttttcaatacctacccccaaatcttctcctaaccaccatctgttttttttttttaaagcattttttgctttaaaagcatcctgaccccaatttctttgagctcacgggccttttgctgaaggtctctcagggtgtagtggtgtggctctctggacttaacgtcactctcagaggtcagaaccttggagatcagaactgattctcaccaggtgtgagaggtgtggtagcagattgcaatgctctgcacctcttccttgcaagtgagcaacttcaggctctctgggcagaggctggcccactgtagtttgcagacatgctctccagatggttttactaagtcccctctccctgatagggaatcctgctggaccagcgcagccctggtgtggagaggttaaaagacttgcacaggatcaccaagtcatgctgtagagccaggattcctagacccagggctctgcactctcaaggctggccccatgtgctcaaggggatctaatgtttgggctccaaactaaccatctcggagctgggctcctcatttactgccaaaccctcagcttatgtagctagaaagggccctggagtgagaaagcctggattttcaaattgatgctcccctactgactagctgtgccactctgggcaaatgctcttccttgagcctgtttccacacctgtaaagtggggatgatgatcctatctcactgcttttgtgaggattacaggaaagcacctgtcctggctctgtacctggcacgtagtaggtgctcagttcatgctggtttccttcctgcctttagtagggacctgctctgtgctcacacctcggctgcatgcaccctgctgtgacggaggctagtgtggaagaggtcctgtcctcagggaattaactgtcttattgggagacaacaactgtcctccttggaacacccaagaaaccatgcaaagcagtggacaacacagaacacgccctcctcctcgctgcctgcagctccaatctgattctgcttgggaatgggcggagcacgtgggctgcttaactgctgtataggacaagccccttacccctctctgggcccatgaattcctggcttggtttatgttctgatttgacacactgattttaatcttcgaatcatgacactgagtgcagaggaggtggcattccgacagcaggacatacatgttggtgtgaagactgggacgacactgggtagaatctagtttttaattattattaatataaaggatcaaattaatttaaatatgattctgaagtctacagaacttttagttctgtgctgtctatgtggacactttggtaaaatgcaaattatgatatggacgttatcattggtctggtgagatgtttcatatttgtgacagttaatttaaaaattatgagttaatgctgcctgtgtctatggggttctgtcttctttgatagccatctattcatctggatcatgggaccctctctaatccttccaccaatcaaataagctattgctattggtttggagttgagatatcagtctcggaaacttctgaaaaatgctaataattacccaaggattatgtcaaattttaaaataaatgtgtgtgtgtttctttaaaaaaaaaaaaaaaa

SEQ ID NO: 2500 - protein, 406 aa, Homo sapiens
MIHTNLKKKFSCCVLVFLLFAVICVWKEKKKGSYYDSFKLQTKEFQVLKSLGKLAMGSDSQSVSSSSTQDPHRGRQTLGSLRGLAKAKPEASFQVWNKDSSSKNLIPRLQKIWKNYLSMNKYKVSYKGPGPGIKFSAEALRCHLRDHVNVSMVEVTDFPFNTSEWEGYLPKESIRTKAGPWGRCAVVSSAGSLKSSQLGREIDDHDAVLRFNGAPTANFQQDVGTKTTIRLMNSQLVTTEKRFLKDSLYNEGILIVWDPSVYHSDIPKWYQNPDYNFFNNYKTYRKLHPNQPFYILKPQMPWELWDILQEISPEEIQPNPPSSGMLGIIIMMTLCDQVDIYEFLPSKRKTDVCYYYQKFFDSACTMGAYHPLLYEKNLVKHLNQGTDEDIYLLGKATLPGFRTIHC

SEQ ID NO: 2501 - DNA, 4403 bp, Homo sapiens
gcccggcgttaacaaagggagccgataccgaccggcgtgggcgcggagcgggcggccgccaccgagcgtgctgagcaaccgcagcctccgcggccgagagtgcagcgagcaaggggagagccagttgcgcagagccctgcaaccagcagtccagggagaagtggtgaatgtcatggagcccagctgaaatggactggcccccttgagcctgtcccaagccctggtgccaggtgtccatccccgtgctgagatgagttttgatcatcctgagaaaaatgggccttggcctgcagacccaataaaccttccctcccatggataatagtgctaattcctgaggacctgaagggcctgccgcccctgggggattagccagaagcaggcttgttttcctgctcagaacaaagtgacttccctgaacacatcttcattatgattcacaccaacctgaagaaaaagttcagctgctgcgtcctggtctttcttctgtttgcagtcatctgtgtgtggaaggaaaagaagaaagggagttactatgattcctttaaattgcaaaccaaggaattccaggtgttaaagagtctggggaaattggccatggggtctgattcccagtctgtatcctcaagcagcacccaggacccccacaggggccgccagaccctcggcagtctcagaggcctagccaaggccaaaccagaggcctccttccaggtgtggaacaaggacagctcttccaaaaaccttatccctaggctgcaaaagatctggaagaattacctaagcatgaacaagtacaaagtgtcctacaaggggccaggaccaggcatcaagttcagtgcagaggccctgcgctgccacctccgggaccatgtgaatgtatccatggtagaggtcacagattttcccttcaatacctctgaatgggagggttatctgcccaaggagagcattaggaccaaggctgggccttggggcaggtgtgctgttgtgtcgtcagcgggatctctgaagtcctcccaactaggcagagaaatcgatgatcatgacgcagtcctgaggtttaatggggcacccacagccaacttccaacaagatgtgggcacaaaaactaccattcgcctgatgaactctcagttggttaccacagagaagcgcttcctcaaagacagtttgtacaatgaaggaatcctaattgtatgggacccatctgtataccactcagatatcccaaagtggtaccagaatccggattataatttctttaacaactacaagacttatcgtaagctgcaccccaatcagcccttttacatcctcaagccccagatgccttgggagctatgggacattcttcaagaaatctccccagaagagattcagccaaaccccccatcctctgggatgcttggtatcatcatcatgatgacgctgtgtgaccaggtggatatttatgagttcctcccatccaagcgcaagactgacgtgtgctactactaccagaagttcttcgatagtgcctgcacgatgggtgcctaccacccgctgctctatgagaagaatttggtgaagcatctcaaccagggcacagatgaggacatctacctgcttggaaaagccacactgcctggcttccggaccattcactgctaagcacaggctcctcactcttctccatcaggcattaaatgaatggtctcttggccaccccagcctgggaagaacattttcctgaacaattccagcctgctccttttactctaggggcctctgtcagcaagaccatggggacttcaagagcctgtggtcaggaaatcaggtccagccttccctgtagccagacagtttatgagcccagagcctcctgccacacacatgcacacatatctagcattctttccagacagcatcctccccgccttccaccttggtagatgcaaggtctatctctcccatcagggctgccaaagctgggctttgtttttcccagcagaatgatgccattctcacaaaccaatgctctatattgcttgaagtctgcatctaaatattgatttcacgttttaaagaaattctcttaaattacaattgtgcccaatgcagggtggctctggggggcaagtaggtggtacaggggattggaaacatgctccgcgcctccagagaaaagttgctcccgaggtccatgcccctggaacgtgttcctatcactctggctggttgggctggtccttagactgggtgcttatgattaaagggtcttggttagcccactttccctctccatgtggagatggaaggtagagaaggatacagtgtctatcctcaagttgctacggttcagtgagagaggcagacatctgaacaggcaggtaggattcagtgtgctcagtgcactggggatttggagagagatgggcttgctctctctgtgcacccaggagggccacgcacttaaaactgtgtttgtggatcagagaaggctttatagcacagggggcattcagatgagtcttagaggaagagaagaaacatggcaagcagattacatctgagccgtttgaattgtgtttttctttcttcccatgtttattttctaagatctacctgaacttagagactcaagatatttttttaggaaacctcctacccatgtctgaggtagcaagtgcagcctcacgacagataccaggcaatccagagccacaaaacgtgattcctccaggctctgcctggcctgaccctgtcctgtcagctgggtttacataccagtcccattcttccttttcaatacctacccccaaatcttctcctaaccaccatctgttttttttttttaaagcattttttgctttaaaagcatcctgaccccaatttctttgagctcacgggccttttgctgaaggtctctcagggtgtagtggtgtggctctctggacttaacgtcactctcagaggtcagaaccttggagatcagaactgattctcaccaggtgtgagaggtgtggtagcagattgcaatgctctgcacctcttccttgcaagtgagcaacttcaggctctctgggcagaggctggcccactgtagtttgcagacatgctctccagatggttttactaagtcccctctccctgatagggaatcctgctggaccagcgcagccctggtgtggagaggttaaaagacttgcacaggatcaccaagtcatgctgtagagccaggattcctagacccagggctctgcactctcaaggctggccccatgtgctcaaggggatctaatgtttgggctccaaactaaccatctcggagctgggctcctcatttactgccaaaccctcagcttatgtagctagaaagggccctggagtgagaaagcctggattttcaaattgatgctcccctactgactagctgtgccactctgggcaaatgctcttccttgagcctgtttccacacctgtaaagtggggatgatgatcctatctcactgcttttgtgaggattacaggaaagcacctgtcctggctctgtacctggcacgtagtaggtgctcagttcatgctggtttccttcctgcctttagtagggacctgctctgtgctcacacctcggctgcatgcaccctgctgtgacggaggctagtgtggaagaggtcctgtcctcagggaattaactgtcttattgggagacaacaactgtcctccttggaacacccaagaaaccatgcaaagcagtggacaacacagaacacgccctcctcctcgctgcctgcagctccaatctgattctgcttgggaatgggcggagcacgtgggctgcttaactgctgtataggacaagccccttacccctctctgggcccatgaattcctggcttggtttatgttctgatttgacacactgattttaatcttcgaatcatgacactgagtgcagaggaggtggcattccgacagcaggacatacatgttggtgtgaagactgggacgacactgggtagaatctagtttttaattattattaatataaaggatcaaattaatttaaatatgattctgaagtctacagaacttttagttctgtgctgtctatgtggacactttggtaaaatgcaaattatgatatggacgttatcattggtctggtgagatgtttcatatttgtgacagttaatttaaaaattatgagttaatgctgcctgtgtctatggggttctgtcttctttgatagccatctattcatctggatcatgggaccctctctaatccttccaccaatcaaataagctattgctattggtttggagttgagatatcagtctcggaaacttctgaaaaatgctaataattacccaaggattatgtcaaattttaaaataaatgtgtgtgtgtttctttaa
